United States Patent Application Publication US 2020/0377945 A1 - sequence listing, part 47

SEQ ID NO: 10519 - DNA, 42556 bp, Unknown
  gut microbiota DNA sequence
ccttccactcgttcctcttccacatcacaccccttctctagcttttgtcctggagacattctacaagcttggccagctcggcagccgagtgcacgcccgtcttcgtgtaaatggcatgaacgtgcgagcgcaccgtggccaccgacaccaccagcacatcactgatctcgcgggggcgcttgttgcgggcgagcaggcgcagcacctcggtctcacgctcggtcaggccgaactgatccgccagagccgcgcagcgctcatcgcgggtgcgctcgtagcggccacgcggatcctcgtggggcagaaggccccaaaccgtcttggcgtacttctccgagttcatgttgaaggtgacgagcacaagcaggacgaacaccgccgtgccgatgacggagaaggccgcggtatcgagaacgaggttttcgtgcacctccatccccacaaggttgccgaacagaaagccgacggatcgaatgagaaaagcccgcccaaatatctgggaaggcgcggcgttgatggcccggctgataaccgagcaggccatggcgagcaatgcatcgaaataataaagggcgcaggcctgcatgatgagagccggcagaaactcactgctgttggtgagcggaccgagcagtgccgccacacagaccgcagggaacacgaagcggtagaagcggttccaaatgagcgacacgtccacagctcgcccgcgatgtagcgtagcgacgaagagcgcgagtgcgatggcggcgcccacgagaaacgacgccacccgcgccacaacgcccaaaggcagcgccagcggaatgacatggagaaagccgaacaccataccgtaggagccgacgatgacgaagagccggacgcacagaggcacccgacggcgcgatgacgcggagccattcgcccccagcccatcggagacactctctcccgatgcttctggcgcctccccctctccgtcctcgcgggcacgaatgggcgcgaacgagcgacggtagctctccggaaaacaggagccaggagccatggacttcacgaggcacagccccgctgcaaccaccagccccacgtgcaaaagctctgagaccagcagcgaagaagtagcctcaagcatgctgaacaagccctggacgataagggtggtcagcgccaccaccgccacgatagtgcccataaacagcgtgggaccgaccgtgcaggccacctgacttgcgaccacgaaaaaccatgcccccgaggcggctccgataaactgcacgacaataacgacgaagggcgcgtcaagcaccgtaagacagccatagaacaaaaggatgtttcccacttgcgcaataaagaagacgagccagaacagaccgtcaccgaccaagcgggagaaccttcgtccgcatatctgcgtcgcaacgtagccgaagacaagcccgagcgaatgggcgtcgcaggagaaggcgcggatgttgaccggcgcgccccacagcggcgcgaggtcgagcatccagcttcccgattcgtgcagcagcatggccgccgacgccagagccacaagcgccccaacgatccaccaatagcccttcggcgccccatcgaacgttcgcaacgcgcgggccgatgccttcctgtcttcttccatgttcttcaaccccctgcccctcacaactgatcctctatctccagcgcaacacgaagcgccaaaggctcgtcatcgccgacccatcctcctgcgatctctaggctccttgcgagcactacttagccgacttaatcatatcacctggcgtttctctgaaatcaacaagagttgttgagatggccagtcaacctcaataaacgttgctgatttttcctgcaacgactctttttatagtgggcctagccgtccgggccttgcacgcaacggacggtacggaaatcccgaagcaattatggaaggagaggaatcatgaggacaaccgaaagcaagacaacgtctcggctcatcgtggccggagccgtcgtcgccgccgtgctcgctttggctctagccctgtggggctgtgcgccaaacgcaacgggtgccaccaccgatcagaaaggggacgacaaagcgaccgaagaaacaacgacttcagccagcgtctatccgaattttaccgaaaaggccgcaggcttgttccccgacacgtacttcaaccgcgatatgctcaacaccggcaaccgcggctgcaatgcgtgtcacgagaacctgttcgacaaaatggtgaacaaggagggcctgacccacatcctcagctacgttggctacgagaaggacggcacctacaaggattgcgagccatgccatcagggccatatgacgttgaccggcccgtacttgggcgatgctatccacgcgagtcactacggcaaccagcagttcgttgacgccaacggcaactgttggagctgccatgccgtgaactccgacggcgaggtcggcgaataccagttcatgctatgggaggacttctacgagcaggccgcgctcggcggctacccgtggctcgccgacgacgagaccacccgcgcctgggtcgagtcccgaggatacgctggcggctaccccacggaattctcccaggaaaaatcgcccaacatctctgcgacattcgcccaagatgccaccgatgcaaaagatctgttcatcgtcaacaactggggtcccgatgccatcgatttggaggctgtgtcggccgacagcaacccgctttccatcacgggcgtgaacaacccgcgcactttcacggtagaagagatccgcgccatgcctcagaccgagttcaccgccttccagaactgcgccactaacggcgagggcggcgcactcatggagaacattcccatgaagggcgtgcctctgtcctacctcgtggagcagtgcggcggcctggtagaaggcaccaatgccatgaacgcctcaggcaacgacggctgggcagccttcccgcccatggacatggcgctcgacctcatgtatgaggactgctatgtggtcacccagtactacggtcagaacctcaccgtggatcagggcgcgccgctcgtgctggtgccctgcggtatgccgggcgcccaatgggtgaagcatctcggcaccatcgatttcaaggtggccgatcaattcatggatggcccgacttacgctgccgccacggcgccttccccgaagatcaacgtgaacggcatgtggttccagaacaacggcctgagcgcaaaggtgggcgagaaagtcgctcttacaggtgcctgcacctcttggagcaagatagtcggcgaactggacaccattcgctttagcttcgatctgggccagacttggcaggaatacaaggtgaccagtgaggtgcccaactttgatccctaccagtgggtcaactacacgttggagtggacgccgtcggcaccgggtaaatatcaagtaaagctggacgccatagacaccgaaggcaaccacatccccaaccccgtcacgctgttcgtgaacgtcgaggaatagaaagggacggtgacattccatgaaatctcagactgttaagaccatcggcggcgtgatgagcgcggtggccctcatctccggaggcgccggcgtggcccaggccgctaccatcgagcccgcggcagccgctccggcatctgcgaccaccctggctgccgcagatgtcgcagacaccgaggcccctgcgcgcgccgtggagggaacctttagctacacgcaggacgccgtgtcctccaacgccgagataagcggcgttttctgcaaggcggccgccacgctgtgcgcgtcgctgcccacttacggctgcgaggccgtcaaggccgcggccgtcaccgtggcgggccccaacgcctcgttcacggccaccgtggacgagctggccggcgaggaggaagcgacctcctacgtgatggcctgctcctgcgctaccaacgttgccggcggcggcgccatcgccaacgccgaggtcgagggcgtctctctggaaaccctcgttcagatggcctgcgcctaagaaagagcgcgctgtcgcccgaaacttgaagggctcgactcgcccagcgccacccgcctccccctcggcccggaagccctcgcttccgggccttttccataggcaaaggatgcaaacccgtagcacgaagccgctttttgccttccgtttcaacgcagatcgacattttcccgcctctggctattgtgttacctaggcataactttaagcttatcaagaaaatgcctggtcacagcttcgcaagaaagcctagtcctcaatacacccgtagccagagacggaaaaatgtcggagacgaccgagcgacagggcaaaaacccgcctcgggctacggctcgcagcaaaaaggccggcccctttgcgggagccggccttggtttctcgggctttcggcccttggcgcgatgagcgcttgaagctaggaagcgaagatctcgatggtctcgccctcggccagggtgaccatggccttcttccaggtgcgggtgcgaccctcctggtagcgaacgcgcttcggcttcgacttcacgttcagggtgttcaccttgaccaccttcacgttgaagatagcctcgatagcctggcgaatctcaaccttgttggcgtccttggccacctcgaaggtgtagacgttgttctccatagcgtcgtagctgtgctccgtgatgacggggcggatgatgacgtcgcggggatccttctccattatgcaagcacctcctcaatgcgggccaggcacggctcggcgataacgagggccttgttgtcgaccagctcgtaggtgttgatatcgcccaccggcagaatgttcacctcggggatgttgcggaaggagaggaaggcctcgatgtcctcgttgccgatgaccacgcagatgcgcttgccctcgagacccagcgccttgatgagcgccacggcgtccttggtgcagggcttctcgaagtccatgtccttcacgatgtagagctcgccgtcggccagcttgccggagagagccgagcgcatggccagcttgatctccttcttgttgaccttctggtcgtagctgcgggtgtgggggccgaacacggtaccgccgccgacccactggggagcgcggatggtaccctgacgggcacggccggtgcccttctgacgccacggcttcttgccgccgccgcgaaccatgccgcgggtgcgcgtgttggcggtgccctggcgccaagatgcctgctgcgccttcacggtgcgatgcatcacaggcacgttcggctcgatggcgaacacggcgtcggaaagctcgaccgtgccggcggcagcgcccttcacgtccttaatctcaatagttgccatagttgctgtaactccttgttaccgatcgttccaattaagccatgcggacgcggacgatgccgttcttgccgccgggcaccgcacccttgaccaggatgaggttctgctcctcgtcgatgcgaacaacctcgaggttcttcacggtgacggtgtcgcagcccatgtggccaggcagacgcaggcccttgaacacgcgggacggcgtggcgcactggcccacggaaccgggggcgcgatggaagtgcgcgccgtggccgcccgggccgccggcaaagccgtagcgcttcatgacgccggcaaagcccttgcccttggacgtgccggtcacgtcgatcttcttcacgtcggcgaaggccgcgacggtctgctcgtcgcccaccttgtactcgccggcgttctcgacgcgaacctcgcgcaggtagcgcttcggctcggcgccctgggcgtcgaagtggccctgcatgggcttgttcacgcgacggggcttgatgtagccgaagcccatctgcacggcctcgtagccgtcggtatccacggtcttcacctggcacacggtgttcggctcggcctggataacggtgaccgggacgatgcggtcctggtcgtcgaagatctgggtcatgccgatcttcttgccatagatagcgttaatcatgcccaaacctccttacagcttgatctcgatgtcaacgccagcggggagatcgagacgcatcagggagtcgaccgtgttgggggtcggctcgaggatgtcgatcaggcgcttgtgggtgcgcatctcgaactgctcgcgggagtccttgttcacatggggcccacggatgacgcagtacaggttgcgctccgtcggcagcggaataggaccggaaaccttggcacccgtcttctgggcggtatcgacgatgaggcgcgtggactgatccacgatctcatgatcgtatcccttgaggcggatgcgaatcttctgacttgccacttacattacctccaaatagaagtttctctgaggacgccttaggcgttgccgccggccttgctgatgatctcgtcctgcacggacttgggcacgggctcgtaggagtccatctgcatggtgtacacggcgcggccctgcgtaccggaacgcaggtcggtcgcgtagccgaacatgttgcccagcggaaccttcgcctcgatgacgacggcgtttccacgctgctcctggccctgaataagaccacgacggctgggaatgtcacccatgacgaagccggtgtactcctcgggcgtctcaacctcgacagccatgacgggctccaggatgaccgggttggatttgcgcagggcgtccttgatggccatggaaccggccaccttgaaggcggcctcggaggagtccacgtcgtggtaggaaccgtcgatcagctcgaccttcacgtcctcgaccgggtagccggccagaacgccggagttcagcgcctcctggatgcccttgtcgatggaggggatgtactccttgggcaccacgccgccgacgatcttgttgacgaactcgtagcccttgccagcctcctgcgggtacatgttgatgaccgcgtgtccgtactggccgcggccgccggactggcgaacgaacttgccctcggcgttcatgacctcgtggcccggacgctcgcgataggctacctgcggcttgcccacgttcgcctcgaccttgaactcacgcagcaggcgatcgacgatgatctcgaggtgcagctcgcccatgccggcgatgatggtctgaccagtctcatggttggtggacacgcggaaggtcgggtcctcctcggcgagcttctgcagggcgatggccatcttgtcctgctcggccttggtcttgggctccacggcgatgtcgataaccggatcggcgaactccatggactccagtatgatgggagcgtcctcggcgcacagggagtcaccggtggaggtgtctttcagacccacaacagcaacgatgtcgccagcggacacggcgtcgatgtcgacgcgctggttggagtgcatctgcagcagacggccgatgcgctctttcttgcccttcgtggcgttcagcacgtagctgccggcgtccagatggccggagtacacacgcaggtaggtgagcttgcccacataggggtcggtcatgatcttgaaggccaacgaagcgaacggagccttcggatcggccggacgctcctcttcctcgccggtgtcggggttggtacccttgatcggcgggatgtccaccggggagggcatgtagtcgaccacggcgtccagcagctcctgcacacccttgttcttgtaggcggagcccacgaacacggggttgatctggcaggcgataacacccttgcggatggcggccttcagctcgtcgacggagatctcctcctccatgaggaccttctccatcagctcgtcgtcgcagtcggcggcggcctcaagcagctcctggtggtacagctcggcatcttccttgaactcggccgggatctcgtccatcggctcggggtaggtcatgcccttgtcgtcggccttgaagtcccaggcagtcatggtcacgaggtccacgatgccccagaagttatcctcggcacccatgggaatctgggcggccacggccttcgcatccagacggtcgcgcatggtctggatggcatggaagaagtcggcacccacgcggtcgtacttgttgatgaaggcgatgcggggcacgccgtaacgctcggcctggcgccacaccgtctcggactgcggctgcacgccggcaacggcatcgaatacggcgacggtgccgtcgagcacgcgcagggagcgctctacctcggccgtgaagtccacgtggccgggggtgtcgatgatctggaagcggtattccttgccgtcggatgcgccgccggggtacttccaaaagcaggtggtggctgcggcggtgatggtcacgccgcgctcctgctcctggaccatccagtccatggtggcagcgccgtcgtgcacctcgccgatcttatgagtcttgcccgtgtagtagaggatgcgctcggtcgtggtggtcttgcctgcatcgatgtgggccatgatgccgatgttgcgcgtatccttcagatcgattttagccatgtatcttcaccagccctagaagcgatagtgcgagaacgcacggttagcctcggccatcttgtacatgtcctcgcgcttcttcacagcggcgcccgtgttgttggaggcgtcgatgatctcgttggcgagacgctcgcgcatggtgtgctccttgcgcttgcgggagaagtcgacgatccagcggatcgccaatgtggtggcacgacgggagttgacttccatcggcacctggtaagtggcgccgcccacgcgcttcggcttgcactcgagggtggggcggacgttgtccatggccttcttgaacacggtcagcggatcctcgccggtcttctcctgaaccaggtcgaaggcgccgtagacgatgttctcggcgatggacttcttgccgtcaagcagaaccttgttgatgagctgcgtgacgagacggttgttgaactttgcgtccggctgcgtttcgcggcggactgctgctgcacgacgcggcatgtagttactccttttgcttctgcgcgcttcggggcaccggttcggcgtccattaggtcggtggggctccttacccagactctaccggcccgcgcggcttaacgaacgttatttcgggcgcttggcgccgtagcggctgcgggcctgcttgcggttgtccaccgcagcgcagtcgagcgccgcgcggatgaccttgtaacggacaccgggaaggtcctttacacggccgccgcggatgagcaccatggagtgctcctggaggttgtggccctcgccggggatgtaggccgtgacctccataccgttgacgagacgcacacggcagaccttgcgaagagcggagttcggcttcttgggggtcgtggtgtacacgcgggtgcacacgccgcgcttctgcgggttgcccttgagcgccggggtcttcgacttgtcgaccgtcttcttgcggcccttgcggaccagctggttaattgtaggcaagactcttttcctttcctttttccacgggcttgcactgcacaaaacaagcgcctctgtgaggcgcgagggggtatattacgagggtttccgctgtgtgtcaaacgccacgcacccgggcgtatccatcccctccggcgagcggcacaatttgtccataatcgcaggaagtgcaggcaaggaagccccacgcacttccgaccgacaaggactggcacgctttctcgtagaggccgacgaggactgacgcgcttttcccgtaggggccgatcttggtcggccctcccgaccgatgaaggccagcgccctcggtcatctaaaccgacttcaatcgtcatctatcccatcatctccgaagccggagacgagatcgatgagctcggccttggaatggacatcgagcttctgataaatgtgccggcgatgagtaatggcggttccctcggcaatgaaaagcacctcctgaacgcgacccagcccatgcccgcgcgccagaatgcccagaacctctgcctctcgctcagtcagcgcgtagacctcagccacggccgcgacccgctcatcgaaaggcgtaccgccgtcagcagactccgcctctttgccccctgcggcagttacggccctcttgtaggcccgtgccaaacttccgcgcgtcaacaccacatccgacgcgataacagcaagcaccatggccgcgatggccgtcacgctcacgtggccctggagatcgaggctctccatcataagcgccaaactcgaccccaaagccgcgcccagggcaagcgcgcccagagccacaccccacacgatagcaaaaggtacgcgaatctgtccggccgcctccgccgcgactcccaccaccaaggaaaggtacacccacagagccaccgccgaggcccccatggcaaagcgcagggagaactcgcttccggcatcgaaggggtaaaaagccacaagtatcggtatggccgcaaagcgcagaaggagcagccagctgaatccctgtttgagcagcgcctttgccacaacctcgaccacgagggagataacgacgcccgaaaggctcaaaagccacgtccacgacagggcgtgaccgtgacgcgcaatgagaaactgcgtgatcatcagggcgaagacaaggccgaacaggccataggacgcgataatgcgaacaaaagccccctgcagatgcgtcactggcgaagaggttttagtaggagcctcaccgcgagacgccgacaccatgaacaaggcgctggacaccgccgagaacacggcgaccactgcaagcagcaaccagtggatgcctatggactgagcgaaggccgccagcaggcaggcagcgagtacgacgagaaacgaaacccgggagcgcgccggagcatccagccgtccaaagcgttcgctccataccatggtgagcaaaccgccgcccaagccgagcagcgcgccggacacgacgcgtagaaccgcaactgccacagaggcgccccgttcgggaacgagcagaagcgctgcgccggcgatggcagccaacgcgcccgcaaacgccccgaagacgcctcgagaccattcgtccctccaacgcgcgaaagacgctgcgcacgccgtcgtccccaaaacaacaagataagaaaagagaagggggttcagccccgacagcgccagatcgcccccgcgatacatatcggctaccacgccgacaatgggaagccacgtttgggcgccaatatacccgagaaccaccaaaagcccgctcttctcggaagcccctcctagcccccgagacggtagcgcgccatcgtccttcgtaattcctaccatcgccgaccctcccgtatcgatgtgcggtcaagggcagtatagcaagggcaaggccgagaaccacccacaatctgtccttcgtcatcccttatcccacctggtctttcatccttttcagatgatggcttggcagcaaaataatctgtctcctcccgcgaagcatcggctttggatgatggcatttcggcgacgaggacgcacaatgccgcccatcgaatttaatccggcgggacgacgagagagccgccggagccacttggaaggagaggagcatggctcacgtatccctgcgcaagatcgttcttgcctccgctgtcgcgggtgtcatcgcacttatgtccctgggcactgtcggctgcgccccgaaaacggcagatctcagcgaaacgggcagcggctcacaggctgaagccgacgagaacgccgcaatgacaggggacttcgcgttctccgcagataccgactgcaccacctgccacagcaccgagggcgactcgctcggcgacgcgacgatgcccgcatctaaccatgcgacgcaggagtgcaccacctgccatagcgacatcgacagcctggcgaccgcccacgatggcgtgcagttcggcgacaagacgcccaaacggctgaaaaagaccaccatcgataccaccgcctgcttcagcagcggttgccacggcagccaggaggacctggccgccaagactgaagcctgcgccatcctcaccgacgccaacggcacggtagtgaacccccacgccctgcccgagaacgaagatcatacgaccatcgactgcggcagctgtcacagcatgcattccgacgacaccatcgaggacacggcaaagaaggcatgcaagggctgccaccacatggacgtctacgagtgcaacacctgccacgagtaaggcccggcgcatttaattgactccggttctgcccggaccccgtcaatccctccccctacggggcccgagtgcggccattcccatctcagcatcatccgcactccggcggatgacatagcaagccttattaaggaggaaaacatggaggaagtatctcgccgctcttttttgaagggctcagccctggctgccgccggcgctgccggcgccgccgccctggccgggtgcgccaacaacgacgctgcgctctctgagactggcagcacccccgagtggatgcccgagacttgggactacgagaccgacgttttggtgatcggctacggcggagcgggcctgtgggccggcatcaccgccttcgacgagggcgctcaagtgctctatctggagaaatcgccgttccgcggaggcgggtcctcgtctatcaacatgggtcagtggactgccccccacgatgccgacgcggccgctcagtttgctttcgaggccttccatgggcagacacctatggaggtctgccaggcctgggccgaggaagccgtgcaaaaccccgactacgccgacgagtacggcctcgagtacaccctgggcgatagcccccgtgccgagtacaacatcttcactggctacgaggagatgtacgtcggttccggcgacggctacggcgcgggcttcttcgaggccatggaccagcatcgcgccgaccgcggcatcgaggtgctgttcgaatgccacgacgaggagctcatccagaaccccgtcaccaaggagatcgtcggctgctacaccctcatgggaaccgacgagacccccaaggccgtgaaggcctccaagggcgtcatcctgtgcactggcggcttcgaattcaacgaggagctgcaggccaagtatctgaagtgctacccgatgcgcggcttctacggctggaagtacaacaccggcgacggcatcaccatggcccagaaggtgggtgccgacctgtggcacatgcagcaggtctgtggcggcgacgacgcctggttcgacgatccggagatcgtgcccgggggcgtttccgtgcagagccccacgcccaattacatcaaagtatctcgcctaggcgaacgctggggtaacgaggaaatcttcagcccccatggtggctggaagccctacgccaatttcgatgaggagatctgcgatttcgaccgtattccctcttggtacatcttcgatcagacctccttcgacggcggctcctggggcggcatggtcggcggcgcggccaccgagaacggtggcatgggcatcggctacatgaccgagggtctcgatcccgaactcggtggctgggccggatggtctgccgacaacaaatgggagctcgagcgtggctggattaccaccggcgccaccctggacgagctggccgccaacatcgccgccagcaaatgggacgacaagatggacgctgagaagctgaaggcctccgttgcccgctggaacgagctgtgcgacaagggcgctgacgaggacttcggccgccagcagctggcaaaggtcgagaccggtccgttctacgccattccgctgtacccgggcatctgcaataccatcggcggtgctcgccgcaacgagaacgccaacatcgtcgatccgagcggcaacccgattccgcgcctgtactccgccggctcgttcggcaacatgaatggccacacttacgccatcaccggcggcaatggctccgagaactggtgcgtcggccgtatcgccggccgcaatgccgccgccctcgaaccctgggatgccgtaaccgaggcctaggcccggcctggcgccgatgagcacaagcgggcccgctcttgaaaagcgggccctttttctaaacgagagaggaaggaggggctctgtggctcaactcgagttttccattccttataacggagacgccgccacgctgcgacagctgatcgcgcttcaaagacgcgacggcaacgttattcgggagatctacctgaatgcgccgcaagccatcaccggttcgggccgcgttggaaacgtgacgaccctcgacgagttcgtcggagtggtcagcatcattcgcgaagcgggcatccgcgtcgacgtcacaatgaattccacgtgcgatggcggggattggtacgccgaggagaccctcaatcgccaaatcggattcattcgcgacatgcacgagcaacacggcattgaggcagtgacactggccaatcccttcctcatcgaacaagcgcgccaaacctgtccgaaccttgaaatcagcgcctcagtcctcgccgacatcgattgcttttcccgcgccgaagccttcgcgctagcaggcgccaccactatgaccgtggacacgagcatcaaccgcgacctgaagctcttgcggcaaatccgcgagaaacttggcgtagagctcaagctcatggtaaacgaggggtgcttgaacaaatgcccctaccgcaagttccacatgaacttgatctcccacaaatcccacgaagagcgcgacgagggcaacgccttctctttcgcttgcggcgacatcatcggccgcgatgccgggcagattttcaaatcgaactggatcaggcccgaagatatgcgccgctacgagggcatcacaagcttcttcaaaattgtcggccgcgatatgatgccgagcaaagtgcttcgctgcaccgaagcctacttggacgagtcctacgacggcaacctcttcgatctgctgtgcagctccatcggctattacggcatcgaattccgcgcgcacatcgacaacaaggcacttggcaggacgaatttcttcaaacgcacctccacttgcaacagacaatgccagcgctgcgcctattgtgccgaattggccgacgagcttctgggctatggctggatcactcgcgagatgctcgaggatatggggcagacgtcgatgatcgccgccatcgaagcgcaattcggaggcagctaccctgtttgccgctccttttcaaagacgccccttgaaaacccattccaatctctgtaaacgcgaggaggaaccctatgtctacccaagtcagaacctggaccgagtattgcggcgccgagggcgagccctcgcgctgggatctgtccatcaacgaccgccccgtgccgggcggctatatcgagaaaaccgccgaagggttcgagatccattatccacaccttcccctcaaaaagctcaccaccctagaggaggcgaagcgcagcctggagctggccccaccgatttcaacagctggcctgaaagtgggaaggatagccgacgaggacagcgacctcatctcgtctgccgaagctggcgagatactcggcgtgagtcgcttccgcgtgaatgccatggtggcctcgggcgtgctgcccggccgccgcgacaacggcaagattctcgtcgatcgcgccgctgcggagcagaaggccgcccaaggcctctccgagggacctcaagggaagttcgccaaccttttcctgttctacgcgccagcaggcgaactcacgcaatatgtggctgaactcgaagccgacgacgccgactccatcgaacgcgcccgcgccttcgcccaagaagtcatggaggacgagagcgaagacgccgtagaagtgcgcgactacctgcgcatgcgcaacttcttgcgtcgccacgaaaacgaatttgagtttgctcgcagcgtctttggcgatctcgtcgaagagcgagcccgacgcgcatccctacgcataccggaaactgaagcatagcctttcacgcgatcttgtcttagacgataccaaacctcggattctggcagtccacgggtaccaaacctccagtttcacccgaagctctgatctgggaaaacttcctataatgcctggtagatggcttgtcgcagttcagccaaaacgggcggtttgggtccctgcgcctggcaaaacaggcggtttggtacccgcgtctgccaaaatccgagccttgtccccgcaggtgccgggacaaggctctccctgccggaaaagtctgccgttgcagagaggggcgaccaaggtcgccccctacggggtcgcttctaaagctacatcgcgtactcggcgatgatggcctcgacgtagcgggccatgttctggaggtcggctacctctatatactcgtcgacggaatggaagttggtcatgccgatgccgagggtgatggcgtcggcgcccttcgtgccgaggatgttcgcgtcggccccgccgccggaggtggcgtggcgggactcaaggccgcaagtggccgcagcggcctccaaatgcgcgacgatggcgtcgccgggctcgtgcacgacagccgggtagtccagctcccaggccacttccacctggccgccgaagcgagcggcggcttcttccaaggcgcgggtcatggcgtcgcgctgggcgagcacgcgatcctcgtacagcgaacggcactcccccatgagcgtcacgacggcgggcacgatgttcacggccacgccgccctcgatgcggccgacgttggccgtggtgcactcgtcgatgcgcccaagcggcatggcggccacggcggctgcggcgatctgaatggcggagacgccctcctccggttccacgccggcatgggcggcacggccctcgatgcgagcgcgcagcgtccagtggtagggcgcgcccatgatgatggtgcccggcgccccgtccgcatcgagcacgaacagcgggaaacgtccgtcgcgctcggcttccggggtagccgccggcagattctccggccacgcgagcgcatcgtcggccagggcaccggcccctagcaggctctgctcctcacaggtggtgagcagcaccgtgatgtcgggccggggcgtgccggattccagcaccgagcgcagcccctcgaaaatggcggcgatgccggccttgtcatcggccgagaggatcgtctcccccgccgagtagacgacctcggccatgcggcaggtaatgtcgtcgcagatatggcgctgctcgatgaccgcctcgatgcccgcgcagggcttcaccgtgtccagatgcgccgagaacccgatgcgccccggcaccgtgccgggcaaatgcgcgatgaggttgcccgtatccgaccccgtttccgccgcagaagcgtcgaaggtgaccgtgaatcccatctccgccagcttttctgcacaataagctgccatgggagcctcgtgccatgacgggctctcgatggccaccatttccaaaaacgattcaagcacgcgatcggggttcataagggtccttctttcaaaattcctaaattttttgtcgcagggatgcgcccaaggaaaacagcgagggtccgacaggtgcctggatttgccccgccttttgcccaagcggccttcgtgccgcgccgtggcaaaaacaaggggcaaggccaggtgcctgtcggacccgcagcgtcgcgtaataattcctcaaggaattattacgaggcaagaatgggggccgccacctgcttcttgcgggacagcacgccgggcatccagttaccgccctcgcagcactcgatctcgaagacgcggttcacacgggccggatcgccctccacgatgaactgcgagccctcggccagaatgtcagtgacgagcagcagggcgaactcgtagccgttgtcttccacgagcttcttcatgtgatcgcgaatctccgcctcgcgggccatcacggtcgggaggtctaccgtctcgcgctgggcgatgagcaccgttacgtcgtcgttgaccttgaactccttggaatcggcctcgaccaacttggcgatgggcattttgtcctcgccgccgcgggtgaggaagatgtccatgccgtactccaccgcatcgacgccgagcttgtcggcgaggaagttcacctggtcgacgtccacctgggtgcaggtgggagacttcatgatgaccgtgtcggtgaggatggccgacaggagaacgcgggcgatggaatcgggcagctcgatgccggtctggcggaactgaagcgtgacgatggtggccgtggagccgatggggaggttcaaaaagaggatggggttggccgtggaaacatcggcgatgcgatggtggtcgatgatctcgacgacatcggcgttctcgatacccagggccgcctggccgatctcgttgtgatccacgaggatgaccttctgcttgacttcctcgccatcgcgctcgacagggttcacgttttcgatgagcaccggctcggcgatgtcgttctgctccagaatccaggcgctttccaccggcagcggccccagacgggcgggcacgtactcgacggcgtcggcctcgccgtcgcgggcggccagcgcattcttcagatgcgcgtagcccacggctgcggcgatggagtcgttgtcggggttgcgatggcccacgacgaggattttggaagacatgaaggttcccctttctcaccaacttacggttttgaggcagtatagcgcctctgcgcccgttaggcgatgggctatgataggcttcttcgatgaaatgaagccctgaactgctctgcggatgggaaacgcgaaaggagctcttgtgaaaacctatggtctgagggacattatcggccccatcatggtgggaccgtccagctcgcatacggcgggggctttggccctcgcctccatggcgcggaagctcttcggcgagcagcccgaacgcgccgtcttcaccctgtacggctccttcgccgccaccggatccggccacggcaccgacaaggcgctggtggccggcatcctggggctcgcgaccgacgacccgcgcgtggccgacgccttcgccctggcgaaggcagccggcgtgcaggtggacatcgtctgggacacgaccaccgaggtggcgcaccccaacaccgtggacatccgctgcgagagccgcgaggggcgcaccctggagatgcggggcgtctccatcgggggcggcgcggcggtcattcggcgtatcaacggcatcgacgtggacatcaccggggaacgcacgagcgtggtcgtgcaccagcgcgacgagcgcggggtgctcgcccacatcgccggcgtgctggccggctgcggcatcaacatcgccaacgcgaacctgcaccgcacggccaagcgcggcgacgcctacaccgtccttgagaccgatagcgccgtggatgcgagcgtgcgcgagcttctgatggaccacccggacatcatcaacgcgcgcgtcgtacccgccacctgcgccggcgacggcgaggaggtgcccatgcccgaggatgccgaggagcggttcgcccgctgggactacgcatccggcgaggagcttctggcgctgtgcgagcgcgagcacgtcaccatcgcccaagccttccgcgcccgcgaggaggcgctgtgcgccaagcagggcaccgaggccggcatcgacgcctatctcgatcgcgttctggaagtgatgggcaacgccgccaccgagcccttgggcaacccacagccctccgtgggcggcctcatcggcggcgaggcggcgaaactgcgggcggccttggaagatgccgatccccggcaccgcttggtagatcccctggcggcccgggcggcccagtacgccctggcgaccctggagaccaacggacgcatgggcgtcatcgtggccacccccaccgcgggctcggccggcgtgctccccggcgtgcttctggccctgcgcgacgagcgcggcttctcccacgaccagctgcgcgagggcatcctcaccgccgcgggcctgggctacctcatcgcccgcaacgccagcgtgtccggcgccgagggcggctgccaggccgaggtgggaagcgcggcggccatggcggccgcggcggccgtcgcgcttgcgggcggtgcccccgaccgctgcctggccgccggcgcgaacgtgatgatgtcgctgctcggcctggtatgcgacccggtggggggccttgtggaagtgccctgccagaagcgcaacgccacggcggcctccgtcgccttcgtcagcgcccagatcgccctttccggcgtccagaacctcatcagcttcgacgaggccgtggccgtcatggacgaagtgggccggggccttccccccgagctgcgcgagacggccctcggcggcatcgccaaggccccttccgcctgcgccttctgtgcggggtgctagggtaacgcgacagacgcttccagcacggcggcccagatcgacgcgatccgggccgccctctttttggcagggcgcctacccgatcttcacgatgggggcgtagtctttcagcagcttcttggtctggccggtcttggcgaacttgacgtgcagggtgtcgccgtccaccttcacgacagtgccgcggccgaaggtcttgtgatccacggcgtccccggcggcgaaagtggcccgggcgccctccttcttccccgcgttcgggttcgcccccgcaccgatgcggcccgagcctgcgcgggatgcgccgccgatgctgcccgccgcacgccccgtacccgtggccgcgcggtactcggcgaacgagcgaccctgagcgcccgaggcgctcgagcgaccgaacacgcggccctcccccgcctcggtgcccgaaccggcgatgccccggcggctgccgcgcttctcccagccggtgccggagaagcccgccgagcccagcccgctcgtctggcgcagctcgctggggatctcgccgatgaagcgtgagacggggttcgcgtgcgtctggccgaagatctgccgttgctgggcgcaggtaaggcacaggcgcttgcgggcgcgggtgatggccacgtaggcgaggcgccgctcctcttccacggccgccgcgtcgcccacggagttcatgtgggggaacagagtctcctccatgccggccacccagacgcagtcgaattccaggcccttggacgagtgcacggtcatgagggtgacggcctgcccgtcctcggtcaccgtgtccaagtcggtgcgcagccgcacccactcgatgaagtcggccagcgagtcgccgcgcagcacgcgcacgggctcggcggactcgtcctcgcccaccgtcggcgcggcgaagtcggactcctccgcatcgtgggtctgcacgaactcgtccacaacgcccagaaactcctggatgttctcgacgcgcccgcgcgcctcgtcggtgccctcgtcctgcagggcgcgcacgaggccggcgtggtcgatgatcatctccacgaccttgcgcaaatcgcccccgtaggtggcgccgtccttgatgacctggacgaactcccccaccgcgttgcgcgtggaggcgcggatgtccgggtcgacgatggcgagctcggccgccgtgaggaacggcatggacatctcgcgggcgaactggtcgatgcgctcgatggtggtcttgccgataccgcggcgcggcacgttgatgacgcgcttggcggcgatgtcgtcggccgggttcaccaccagggtgaggtacgccatgacgtcgcgaatctcggcgcggtcgaagaagcgcgtgccgccgacgatgcggtagggcacgccggcgcgcagaagcatatcttcaagcatgcgcgactgggcgttggtgcggtagaagacggccatgttgttgtaggaggtgccctcggcgcggcgccgatcgatctcgccggcgatccagcggccctcgtcgcgctcgtcggtggccatgtacaccgagatcttctcgccgtcgcccatggccgtgaacaggcgcttttccttgcggtgctggttgttggcgataacggcgttggcggcggccagaatattgcccacgctgcggtagttctgctccagcttcaccaccttggcttccgggtagtcgctttcgaactccaggatattgcgcagatcggcgccgcgccaggagtagatggactggtcgtcgtcgcccaccaccatgatgttgcggcgcttggcggcgagcagctgggtgatggcgtactgggcgcggttggtgtcctggtactcgtccaccatgaggtagcggaagcggtcctggtaggcctcgcgcacgtcctcgtggttcttcagcagcagatagccgtagagcagaaggtcgtcgaagtcgaaggcgttggccgcccgcagccgctcctgcagacgctcgtacacgcgctcggccactttgcccaccgggtcgtgggcatcgaagttgccaggggtgaccaggtcgttttttgcctgggagatgcggttcatcagctggttgatggggaagcgcttcgggtcgatgttcagctcggccatgatctccttgtacagccgcttcatgtcgtcggtgtcgtagatggtgaagttcttcgtgaagcccagccgctcggcatcggcccggagcatccgcacgcacatcgagtggaaggtggacacccacatgccccgcgagcgcgtgcccacgagctgcgccaggcgctcgcgcatctcggtggccgccttgttggtgaaggtaatggcgagaatttcccagggggccgccagattctgctccaggatgttggcgatgcggtaggtgagcacgcgcgtcttgccggacccggcgccggccagcaccagaagcgggccttccgtggtgacgaccgcctcgcgctgggggccgttcaaggtgtcgatgtcgatgggcatgggcgctcctgtttctttcacttcttcgacagacagcaaagcggttggcgacaatgcgccaaccgcgccgttttgagatcgctgaatgggtcaccataggatacaacaaggtcgggccgcgggaggagaagccgcggcaacccacgacagaaacacgcgaacgcacacagcggcgcaggcgccgacgagaggagcagccatgggcgagcacaagcacaacgagcacgagaaatcgcataagcaccccgagaccttcgccgagcgcgaccccttggccgcggaagagcccgacgtcctggaatcctccgcgagcgacccggagtttccggccatgcaggagttcgaggtggatcgcggaggcccgaaggcgaacacccgcaagcaccccgggctcatctggatcatcgtcgccgtcgtggccatcatagggctctgcatcgcgttcgccgccgccggcgactggatgaaccccactcaggccgagaaggtgcagcagaccgagttcgaggagcagaccgtccccgaagacctcggcgccaacgagaacccggaagcggcgtagcctcacaccaccttcgcgccgaacggcagcagggagagcttcgccattttgaagcactgcaggcctacggggatgccgatcacggtgatgcagtaggccacgcctaggcacgcataggaaaaggccatgggcaacccggccaaaatcaaccagaagatgttggctatgagcgacggcgcacctccgccgtaaacgatggtcttgccgaagggcgccagcgtcagcgatgccatcttgaagcactgccgccccagcggaatgccgatgatggtgatatagaacaacagccccgccagacaccaccaaatcgccgtgaacagtccgccgaaaatgatccaaattatgttcgcgatggtggacatgagaccattatgccacgacgagggtctcttcctctacgaccagctcggaacagcggcgggcgtcgaggcggcggttgcggaagtagacgagccagttggcggcaatgcagatgacgttgatgaagtaaacggcgagtacccagttcaaattccccgaaacgaacttcgccgcgatgccggcgaagtagccggcggtgatgagggcgatgaactgccagctggtgccaacggccgtgccggccttgtagttcttgtacgcgttgaggggccaggacagaccaaaacaaatgagcatgaccgcttcgagcaactccgccatgagaacgtgatcgcttccttcaaatcgagttcgtgcatgtgcggatcatgattgtaggacacatggccgcagagtgcagcacccttcacagcaatacgacagaatgctaagctttggcccatgaatcagctctacgacatgcactgccacatggggttcgccccctcccctatcgcaacggcgcaagagggcgcggctgcgggcattggcgcattttcctgcacggtggcacccgacgagtacgagcggctcctccccatcctggccgacgcgcccaatgtggccctcgggctgggggcgcatccgtggtggatcgccgatgggcgcgtgggcgaggtggagctggatcggttctgcgagctggcgcgcgcgacgcgcttcatcggcgagatcgggctcgacttcgcggggccgcgcgatacggaagagagccgcgtccggcagacgggcgccttcgcgcgcattctcgctgcttgcgatcagcccgtagcgccctcggcggcgggcgacctcgcttcgaagctcatctcaattcatgccgtcaatgccgccgccacggcgctcaatctgctcgaagcggctggaaccctcgcgcgccaccaggtgatcttccactggttctcgggcgcctccgatgacttgcatcgggccatcaagctcggctgtttcttctccgtggggccgcgcatgctggcctcgcggcgcgggcgcgagtacgcgcggcagattcccgtgagccagctgctcctggagaccgacatgcccgcacgcgctggcgacaagctgccggccgaggtctggcgcgccgagctggacaacgccctttccggcatcgcgcagctgaagggcatcgaccgcgcaaaccttgcggagcgcatcgcctccacaagccgcgagctgctaatgccctagagagcgcgaacgaagggcgccgacctcgcgtataatggtcgccatgaacgcaaagctcaagaaaatacgcctggacgacctgctggtagagcggggggactttcccgaccgcgcggccgcgctgcgggccgtcatggcgcgcgaggtgcgcgtggacgacgtctacgccacgagtgccgcgatcaaggtatcgcccgcagccgacattttcattcgcggacgcaagcagttcgtctcccgcggcggcaagaagctccagggggcgctggacgccttcaggcagcgcgtcgacggtatgaactgcctggacatcggctcgtccaccggcggcttcaccgactgcctgctgcaggccggcgccgcgcgcgtggcggcgctcgatgtgaactacggccagctcgcctggaagatccgccaagatgcgcgggtagccgtcttcgagcgcaccaacatcaaggacgccgacccggccgccctcggcgcccccttcgacctcatcgtcatcgacgtgtccttcatcggcctggcggcgctcgccccctcttcccccgcttcagccgaccgggcaccatcttcatcggcctggtgaagccgcagttcgagtcggcccacgacgagaccgaccgcggcgtcgtccgcgacgaggccgtacggctgcgcaccgtggaagaggtgaaggtcgccctcacggccgcgggcttcaccgtgaccggagcaaccgaatcccccatcaccggccccgagggcaacgtggaatacctcgtccgcgctgtgtatcgcaacgacctagatagctgacggcccactaggtcagcgaaccccttgatttctgcatgagattgacggttatgagcgtctgggggcgaacccccagacgcttcatggggcgtcgctgacaaaaccccagatcggttgcctctagacagacaggcataggctcaggccttaaccagcgacgctcataaccgtcaatctgctgcaatttcaggcagttcgccgaccggagcctcaatggtcatccttgcctcagccacgcaaagcgccttcctgttcgaatcccattccagcagatcgaacgcctcgcacgccgagcaccatcggtattccgcatgctcttcgctaagccgaatgacgacgttggcatcaacatcaacgcagaatgcatactccggaatctccagaacatcatcgccccatcgatagcagcccaccacatcgagaacgggaaccatggcgacagactcaagatcgatcagcctcgtcgcgctgacccccacctcctccatcgtctccctaattgcagcctcgcggggtgattcgtcgccctccccgccgccggcgacgccttgccaaactgacagatcggcacgcttcaataccaggtattcagggccgttggcatcaagccttcgcaggaaaacaagcacttgaaacggcgcgcggctcatcagctttcattctccaatcaggactacagttcaaaacgcccttcaagagattctaccacggcccacttcacgcagcccggtcgccaaatcgcttcctcggaagcaaggagacctcagagaagtatcgccgtcctagaagcagggcccccgcccctactaacactgcaacccgcgaatacgagctaggcctcgccttcttccgaaggatgggctggtgggaagtgctgatgatggaacgcacgcagctcatgacgaagctgcaggtggcggtcgagaaacgaggcggggcgcgcaggagctctgcctcttgttttgcgcgaaagggcatcggctatctcgatgaactcggagacgctatcgatctgcgaggacgtgaccgtcacgacgtcgaagccgtcggcaagcagggcatcgcggcgccgagaatcgcgcgcctgctgatgtcgctcaccatggaaggcgagaccgtcgtactccgccgcgacacgcgtctgcggccacagaaagtcgcagaccacccgatcaccccgcgcgatgcgcactgccttatctgaaagagcgacgggctcgttagcaagtgcgggaggcagccccaaaccgccacggcgcatcggcgtaaggagcagcgcgcccatttcagtctctttcaccgatgctgatttcgcgcaaaggaaaggaatgatggagcgcgctttcttcgaccccttaatgcgctcggcgcgcttcgcgaacgcagcaagtcgccctggcgttgcaagctgcgtccgcacaagtgcactcgaccgtcctgcatccaaagggtagcacccgcagagctcatagcccaaggcaatgagctcaccggcaaagagggactcggccatctgaacaaatacgagctccggggagcacagggcaatacctggagcaatctccagaaaggctccgcgtggcagaggcaccgcaatctgatggaagcgaacgcgcttcgtaggatggcgcccctctttcggccgcgcgagaacgtggagagggcgctcgaccgtggcgttgtcccatagctcttcgagcattcgtttcaggctgggccttttcgcactctcgatggctgcacgaacagcagcctcggtatcagcagcatgggcaagcgagctgaagcccttcaaatgggaagaaggaaggtgtcccacatcacgcgaacgcagatcgtggaaggcacgcaaagccagaggatggttgcacgaccagatcctgagaagatccaaagctgttgtatgactgaagatcacttccatgcgctgcaagataacaaacttcggacgccgttgatggctggcacgacaaatctgctgaatggacattcctgagcaaaatagttgtcttttggatgacttcgctttcgcttttcgagaatgaaacctgggcattctagtcctcttggaaacctcggcccccccttcagcttgtttccatttacggggactgcagcacaatgactatcctggggtcttgagtacccgtatgaaaggttgcctaatgggcttggtcaacggggacgcctcattttgcacgagattgacggttatgagcgtctaggtgtctcggtaaagaatagggccgcgagtggttttaaccaaatacctggtcagcgaactgagctggatgaaaatgttgacgcgatattttacaagcacgtctcgagacgctcataaccgtcaatctcatgcagaaaagcacctttcaaacaccgagcatcagtttgctgggaacgagccgtccgtaggaagccgacgactgcccaatgcgttccacatgcgacgcagatctcgagcctgaatagaaaacggagccccgaagtggggctccgttggaggattctccggctcgcttcgcttgctcggaacgacacgtgctctacggcaggagcagttgggcgatttgcacggcgtttaaggccgcgcccttgcggatctggtcggccacatcccagaaggcgatgccgtgaggcacggtcggatccttgcgcagacggccgacgaaggtgccgtcggtgccggcgagcaggcccggcatcgggtacaccttgttcgcagtgtcgtccatcacctccacgccgggggcggcctcgagcgccgcgcgggccgcctccacggtcacttcgtcggcgaactccacgttgatggcctcgccgtggcagcgcagcacgggaacgcgcacgcacgtggccgccacctcgatggacggatcacccatgatcttcttggtctcgacgaccatcttccactcctctttggtggagccgtcatccaaaaagacgtcgatatgcggaatggtgttgaaggcgatgcggtgggcgaaggcggagatttccagctcgtcctcgggagtgccgtccaggaaagcgcgagtctgatcgtacagctcggccatggccggcgcgccggcgccggaagcggcctggtaggtggacaccacgacgcgcttgatgggagagaggtcgtagagcggcttcagcgcgacgaccatctggatggtggagcagttcgggttcgcaataacgccattatgccacgccacatcctgcgggttcacctcgggcaccaccaggggcacgtcctcatccatgcggaaggcgctggagttgtcgatcatcacggcaccggcggcggtgaccgcctcgcgcatctccttggacacggaggcgccggccgagaacagcgcgatgtcgacgccctcgaaggactccggcgtcatctcctgcacggtaagctcgccggccggcacgagtccgcacccctcgaagggcaccttcttgccagccgagcgcgcgctcgcaagagcgcgaacctcactcgccgggaagtccacgtcatgcagcacgcgcagaaactcctgtcccaccgcacccgtcgctcccgctacggccaccacaggatttgccggcatttccttcgtccaggtcatttaacgtcctttcttcattttggcggcgatctcttccgctgaaagctgggtttccacgaacacgtcgtcggaatcgagcccgaaggcggtgtgcaggcactggacggcctgtactgcctgggccgcgtccacgatcatggacaggcggatgggcgacgtggagatggccacgatgttgatgttgttgtcgcccaaggtctggaacgtgcgcgaggccacacccggagaggacttcatgcccgtgcccaccagcgacaccttcgcaatgtcctcatcgacgatgaactcgcgagcgccgatctcgggcacgatgcgctccatggtctccttggcgcggggcaggtcggcccccggcgtggtgaaggagatgtcggtgaagccggcctcggacacgttctggatgatcatatccaggttcacgttggccgcggccagcgccccgaacacgcgggcggccacgttcggcgcatcgggcacctggcggatggtcaccttcacttccgacgtgtcgctggcgatgccggtgatgacggcttcttccatttcgtactcctccttgacgtaggttccctcggcctccgagaacgcggagcgggaatggatgaccactttccacttgcgggcgaactccactgcgcggctctgcagcacgcctgagccggcgctggagagctccagcatgtcgtcgtagcagatggaatcgagcttcttggcgcgcggggcgatgcgcgggtcggtcgtgtagacgccgtccacatcggagtagatctcgcagacgtcggcgttgatgccccaggcgatggccacggccgtggtgtcggagccaccgcggcccagcgtggtgatgtcgccgttggcgtcgatgccctggaacccggcgaccacggggatggcgccgtcgtccagcgcgtccaagatgcgctcgttgtgcaccttgatgatgcgggccttattgtgggtgccgttggtctcgatgcccgcctggcggccggtgaagctgatggacttgtagcccaaagcctcgatggccatggccagaagcgtcatggagacctgctcgccggtagacagcagccgatccagctcgcgggccggcggcgccgtcgtgatggcggaggcgagccccatgagctcgtcggtggtcttgcccatggcggacaccacggccaccacctcgtccccgcgctggcgcatgcccaccaggcgcttggcgacgttcttgatgcgctcgggggaggcaacggacgtgcccccgaacttcgcgacgatcagagccattgcgcttgctctccttcgatacggaactagtcgaaaatgcaagtgggcaccactatagcaaagttgcaaggtcaatgagggcgagcgcagcccgtacgggcgcatcttcggttggaatgccatcagcggccacaggcggcgagcggccgtccggccccagggatgccgaccaccccgccgaggcacccctggccaccccgccacgtggcgccgtccacctcgccaggtggcaccgtccgtcccgccacaggaacgccgtctgctccatctacccagtatgtcggttttccgacggacgacacccaccgtccgctggcggccgcaccattgtttatgatggcctgtgtacctatcatgatcgctttgcattcaacatcgggcaacgccatcggagaggagaagccatgccggccatcatcacgcacgacctgttcgggaaagacgtgtacggcgagaccttcgataccatcgggggctcccgcgatgcggccgaggccttccttttgggcaaccagggccccgatcctctgttcttcgtcgcgcccgatccgcgctaccgccgcgtgggaaagctggcctcgaccctgcatcgggcgcgcccggcagaattcctcgtggccctgaagagcgctgtgcgcgagctgccggcgcaggagcgctccgtcggacgcgcctacgcgctgggctatgtgtgccactacctgctggacagcacggtgcatccactcgtcataagccaggtgaacgccttgtgcgccgccggtgtggaaggcctcgcggccgaggacgcccatgaggtgcacgccgttatcgagaccgagctggacgagcttgtgctgacggccaagcgcggcgagaccgtggccacctaccaccccgccacctcggtgctgcgcggacgcgacagcatgctggataccgtggggcgcctgtacgccaccgccatcgacgacgccttcggcctcacgatgcccaagggcatgttcaaaagcgccgtgcgggccgagcgcgcggcccagcgggccctctactcccctaccggcgccaagcgcgccgtgctctccgctgccgagcggctcttgcgcccccatgccatgaccggggccatgagccaccgagccgccgagcgcgccacttccgccttcgccaacgacgagcgcgcgccctggcgccatccggccaccgaggccgtcagccgcgccagcttctgggatctgtacgatcaggcgcgcgcaggcgccctggacgccattaaggccatggatgccgacgacttcgacctggccgcttcccaccgcctcaccgccgacgtgaacttctacggcgagcccgtggtggccctcgtcgtggccgtggaagacgccgcggccggcgacgacgtccccgacgtgcggaatcggtaggaacgcccatgaccctcgagaccgccttcgacctccccttctggttcgagttcgccgccaccgtcaccggcggcctgtccggcggcatgtccgccgtgcgcgcccgctacgacatcttcggcaccgtggccatcgcctgcatcaccggcatgggcggcggcatcatccgcgacatcctgctgcagaactacggcctgtacgccttccaaagcccttggtttctcctttcctgcgccctggccggcgtggcggtgttctacttcggcaagctggccacctacctggatcccatcgtcgacctcctggacaacatctcggtagccctgtgggccatcatcggcgcgtcgaagagcctctcggcgggccttaccgtcatcccctcggtagtgctcggcaccatcacctccatcggcgggggcatctcccgcgacgtactcatgaaccggccgcccgtcgccttccaaaccggccccatctacggcagcgcggccctcatcggctgcatggtctactgcccgctgaaggccaacggcatcctgcccgacacggcgggcatcctgtgcgccggcctcatcatggttctgcgctacctgtccctcatcatgggctggcgcaccaagccgccccgcgactactcggacacggtggtggaaagcgtggcacgaccgatgcgcttcatcgcgcgcaaggtgcacgtgcccataggcaagacggcccgcgagcgccagggcacaaccaagttcgatcgcttcaagaggaagggcaagaagctttacgatcgcctgagcggccgctggatggacgacgacggcgagcacttccagcccaccgtgctcatggacaagctcgtggtgcccctggccgatgaggacgagcatgcctccgaaccggcccccgatccctccgatcgcctgttcgtcgaccgcgacgagctctaccgcatcatcggcctcgaccacgagccccgccgcaccggcccgcaggcggcggtgaaggattccgccgcggaaaccaaggacgcagaggatgcgggaagcaagaagagggaagacgtggaaggcgccgacgcagacacggcacgaaaagccaacgacgaaccggccttcgaccccttcgaaccgcaaacccccgacccgaagaagccccagcacaacccccgctaccagaagaagcgctcatgacgctctcccgtcaccgggtacaccaaattcgtgcagaattttgcgatagggagaggccgaggcggttctacaaccgacttagagtctccctatcacaaaatcctgcacgaatcgcccagacgcactctctctagcgaaaaatcttgcacggaaatacggcgaccgtcgccgcgcactgaacaagctcgccgcttggcctgcagacatccccgtaggggccggcctcggtcggcactcccgagccagaacgtccgccaatgcagaaagggcggcgcaagcgccgcccctacgtaggtgtaccgattccccgatcctgagcctacatattcttcaacagaatcgtgctcatgaggtcggcggtgtgctcgcaggcgtcgcagcagctctccatgaaggcgtacaggcgcgaccacttcagcacgtgcatgggctcgtcagcgtggttcacgtgcaggttgcggatgacctccacgtacagcgcgtcggcctcctcctcgttgtcggagacctgaatgaccagctgcttgaagttcttcgacttcttgaagttgcggaaatcctccatggcggcgtccacggccttgcacgacttgcggatgagggtggcgaaacgcagggcgtcctcgggaatctgatggatgtcgaacatgtagaagtactgcagcacgtcctcgatctcatccagaatctcgtccagcgcgccggccaaagccacgatgtcctcgcgatcgaacggcggcatgaagtcgttgccgacgtgcttgtagatgtcgtggttgatcatgtcgccggcgtgttcgagcgcatgggcctcatcgagcaccgcgcgcagggcagcggcatcggtgaagttctccatggcgcgcacaaggacgctcgcctcttgcacggccagatcggacagctcttcgtaggcgtcgaagtaatcgtacttgtgtttcttggccactggacttcccttctcgtgttacaggatcataaggaacaacttggcacaggcgaagcccaggatgccgcacccggggaaggtgagcacccacgtcttcaccatatcgatggcgatagaccatttcacggacttggggctcttcgcggcccccacgcccatgatggccgtcgtgttggtgtgcgtcgtggaaaccggcaagcccccgaaggtggcgagcataagactcacgaacgtggagaggctggcggcgaatccctggaacgcctcgagcttcaccatgtccatgcccacggacttgatgatgcgctcgccgcccacggccgtaccgaggcccatgttgaaggcgcaaaagatcatgagccacatgggcatcgccacgcccgacagatccatgcccatgccggcggtcatcataatggccagcatgaagatggacatgaacttctggccgtcttgggcgccatgcatgaaggccacgccggcaccggagcaaatctgcgcccacttgaagaacgagttcgccttctgacggtttacatgtcggcacagccgcccgatgagcttgtagttgagccagcccaggccgaagccgagcagcgtcgagagcaaaatgccgtagatgaccttcatccactcggcgccgttgatggcatcgaggccgccctggacggcgatggccgcccccgtgaggccggcgatgagcgagtgggactgggaggtggggatgccgaaccaccaggccgccgcgccccagacgataatggcgaccatcgccgccatgagcgccgtcagggcctgatgggagttgccgccgaagtccaccatggagaaaatggtatgggccaccgccgtggagaccagcgacacgagcaaaagccccaggaaattgaacaccgccgccatgatgatggcgtgccgaggcttcatggcccgagtagagaccgccgtggcgatggcattgggcgcatccgtcgcgccgttcacaatgataacgccgatattaagcagagtcaccaccagaaggatggggttctgcataagctcggagaggaaaaaggtccactcgatcgtcacggagttccttccaacagataagctgcacccagaaaatgcgcagtggcccaagtctaccctatgacacgccgtcaatgagacagactgctgtgtttttttgaaaaagctcctactcggggtcgccgtagagggcgaagacgcggcggcgctcggcgccgatggtggtgaggttgttgtggccggaaaggaccgccgtgtcgtcgggcagcgccgcgagcttcttcaaggaagcgcgcatgtcagccatggaaccgcccttgaaatcagtgcgcccgatggtgccggcgaacagcgtgtcaccggagaggagcaccggaagccccttgggatggttgccgaactgcgggatatcgaacaggcaaatggaaccgggggtgtggccgggcgtcgcgatgaccttccacttcatgttccccacttccacaacatcgccgtgggccacggtgcggtcgaccgggcagggcacgccccgggtggagagatcctcgtcgcagggttcctcgataagcggcgcgtcaatggccgacgcaatgacgggcgcacccgtggcctcgcgcagctcggcggcggcgccggtgtggtcgaaatgggaatgggtgagcacgatggcgtccagtttgcgctcgcccagagccgccaaaatcttgtcagccgagcagctgggatccaccaccatggtgccttcgccgtcggagacgatatacacgttgttggcgagcacgcccatgatcatatactcgacatcgacgcacaatccgctgatctcatacaaatccgtcgccatttctcaacctttcttgcttgatccttggggcatcattctacgggcatcgaagacgccgtcgatggcggacaggcgctttgtcatgcgctcgataaccgccaagtcggacagctggaagaggaagcgcatctccaccatgccatcgcggtgggtggtggtgttgcaggacagcacattggcgcccatctcggaaatgacgcgcgtcacgtccagaagcaggttcatgcggtcgagcgcctcgatgtagatctccacctgataggtggccgccgtgggcgtcccctcccattccacctcgatgatgcgctcgggatgccgcttcaaatcgagcgcgttggggcagtcggcccggtgcaccgacacgccgcggccgcgggtcacaaaccccaagatgtcgtcgccgggcacggggttgcagcagcgcgacaggcgcacgagcacgtcgtcgacgcccttcaccacgatgccctgggacgagtgggtctcgtgcttcttcgggcgcttcacggacgtgagcataggggccatgatgcccgtggaggaggccgatgtgcccaccgtgggcttctccgcctcctcgttgcccttgtccaccaggatcttcagcaggcggttcgtgacgtgctgggccttctccttgcccgtgccgatatgcacgtacatctcgtcggggtctttgaagccgagcgcctcggccaccagcttcagcgcccgcatcgactgggcgctggaaagccccagcccgtgcttgcgcatctcgcgcacgagcatgtcgcggcccatctgcatgtcgtcggagcgggtgatcttcgagaagtaggagcggatcttgctgcgggccgagggcgtcttcacgatgttcagccagtcgcgggaggggctcgcgctcttctgggtgagcacctccacgcggtcgcccacctgcagctggtaggacagaggcacgatggagccgttcaccttggcgcccacgcagtggttgcccacctcggtgtggatggcgtaggcgaagtccaccggcgtggaaccggcgcgcaagctcatgacctcgcccttcggcgtgaacacgaagacctccgtgtcgtcgaggtccatcttcagcgatttcaagaactcgcgggagtcctcggtctcgtcctgccagtccaccatctggcgcagccacgccagctgggcatccaggttgtcggcggcgccggggcgcgaggctccggtctccttgtagcgccagtgggccgccacgccgtactcggagttgcggtgcatctcctcggtgcggatctgcacctccaggggacgtccggccggccccatgaccgtcgtgtgcagcgactggtacatgttgaacttcggcatggcgatgtagtctttgaagcggccgggcatggggtgccacagcgtgtgcaccgcgcccagggccgagtagcagtccttcaccgagctggtgatgatgcgcacggcgatgaggtcgtaaatctccgagaagcccttgcccttcttcgtcatcttctggtagatggagtacagatgcttcgggcgccccatgatctgggccgaaattcccaccttccccatctcctcgtggagcacggcgatgacgtcggccaggtacttctcgcgctccgcgcgggactcggtcaccatgcgggagacctgcttgtacttgttgggctccaggtagaagaaggagaggtcctccagctcccacttgatggagttgatgccaaggcggtgggcgatgggggcgtagatctccagcgtctcgcgggacttgaagatgcgccgatcctcgcgcagggccgccagcgtgcgcatgttgtgcaggcggtcggccagcttgatgacgatgacgcggatgtccttggacatggccacgaacatcttgcgaatggtggccgcctgctcgtcggtgagcgactccacctcgatgcgggtgatcttggtgacgccctccaccagcgcccgcacctgcgggttgaaggtgcgctccacctcctcggccgtcaccttcgtgtcctccacggtgtcgtggagcagcgccgccgtgatggtctcggcgtccatgcgcagatcggccaggatgatgcccacctcgatgggatggatgatgaaaggctcgccggacttgcggcactggcccgcgtgggcgtcgcgggcgaactcgaaggcgcggcgcagcatggcctcctccggcgcgtccatgtaggcactcgtcaggcgcgccagctcggcgaagcggtcctcaggcgtggcgggcccgcgctcgatggccgaatcggccgtgggatgcgggcggcccagaagcgcgtccacggtctctttcgtggccctcccggcgctgacggcatcggccgccgcccggacggaatcgtctctctcggcgctcatgggcgcctcccttctcctgaacgcggatggtccgcggatcgttatcggttagtgcccctggcccggccagttcctcggcacgatgggatggcacagacgcaccgtgagcgcgggctcgtcggtgcccagcgcccatcggcagaagccgccgaacagcgtgcgctcgtcgatgccctcgcggtagcgcaccgaatcggtcagttccaccttcgacgccccctcgcgcacccgcacccacagatgcgggcggccggcctcgtaaacggtgcgcgtctcgatgagcccgagctcgcggaacacggccaagccgcaggccgccgaggtggggctcacggcgcggaaagcgtcggaggcggcctcggccagatcggcgtcggccacgcagaagtagtcgtcgggagtgttgcgctgcagcgagcgcagcttgcggtacacctgggccatgacgtcatgatccggcgtggcgtcggccaagatgcgctcgttgatggaagcatccccgcgcccgtagagcagatgcacccacgccggcttcccatcgcgcccggcccgaccgctcatctggttgaactccacgtcgctgaagggcagatggtacagcaccacgtgccggatgttggggatatcgaccccttccccgaaggccgaggtggccacgagcaccttcaggtcgtcgcgacggaacagctcctcgatgcgcttgcgctcgtcgcgggagagccccgcgttgtagaagccgatcatgcaggcgagctgcggcacccgccggcgcagcatgcgcgcgagcgccacggaatgctcgcgggagttcacgtagatgacggtcttctcgcccgtggccaccagggaggccaaatagtcgtcgcggtgcgggatgttgcgctggtcgtccaggtacaggttgtcgcgggccgtctcgtcgatgaccgagtcctgaatgggcagcaccgcatcgatgtcgtcggccacggcgtcgttggccgtggcggtcaccgcgagcaccacgggatctccgagccgggtcagcgcccggtcgagctgggtgtaggccacgcgctggccggccttggcctgtccgatgtggtgcgcctcgtccacgacgacgaacccgacgcgccccgaggccgccagctcgtcggtgtggaacatgaggtactccggcgtggtgagcacgatatcgaggctcccgtcggccagccccgcgtacaccgccgcgcgctcctcgggcgtcgactcgccggtgatgacggcgctcgcaatgccgaagcgctcgaggctcgcccgcagatggaacacctggtcggcgatgagcgcccgcaaggggtagatgaacaggctcgcggcatggtcggtcagcgcgcggaaggcggcgtaggtttggaagcacagcgacttgccgcgccccgtggccatgacggcgaaggtggacttccccgcccgcaaccgatcgagaatctctcgctgggccggatgcagcgggcggtcgccgatgatggccttcacaatggccgcctccaggccgtccgggtcgcggcgggccgtctcctcccactgggcgcggcggggcgccagatcgggcagcgccggctcgggcgcctcgtcggcggccgcaagatcgggttccccttccgcctcggcgaacagatcggcggtgaacgacacggcatccgggtcgaggcaggcctccaaagcgcagcagctgcgcgccggcgccacggtttccagcatggccttcaccgagcggcggccgcgccattcgtcaatctgcaccgtgaaggcggcgtccaccaccgcgtcgttcacgagcagcgcgtcgatggcggcgcagtggaacatgatgccggccaccgatgcgcgcccgttggtgagcgtgcaggcgaagtggtccttggtctggcccacggcccgggtgttcacgagcgtcacgttacgggccaggaacgtgggctgggggttctcctggccgaagggggcgagccgctcgaccagcgccacggactcgagcgtcagctcgtccaggctcacgagcgcgtccacctcggtcagcgggtggaaggccgcctccggcagcttctgcatataggcgtcgagacgctgggcgaaggccttcaaattcttggtggggatggtgacgcccacggccgccccatggcctccgaagcgcttggtgagatacgagatcgattccaccgcctcgaagaggttcacgttgcccacggagcgcccggagccgcgggcctcgtcgccgtcgatggtgaacagaagcgccggcaccccgtaggtgttcacgaggcgggaggccacgatgcccttcacgccctcgtgccagccctcgccggccaccacgagcgcccgctgtccgtggtagattctgctggcctgctccttcgcgatgtccgacagctccgcctcaatggcgcggcgctggttgttcacgtcctccagggcctcggccatggcgcagcactcgccgtagttgtcgcacatgagcagatcgagcgccaaatcggcattgcccatgcgcccggcggcgttcaggcgcggaatgagggagaacgacaggttcgtggccgaaagcggttttccggcctggcccgtggtggcgagaagcgcggcgatgcaggggcgcggattcgtgttcatgcgggcgaggccgtcggccacgagcgcccgattctcgtcgcgcatgggcatgaggtcggccacagtgcccaaggtggcgaagtcggtgtagctgcgccacaggtgcgggaagcccaggcggctgccgagcacctgcacgagcttcaaggccacgccaacgccggcgaggatggcgctcgggcagtcctcggacattttcggatcggccacgggaacgccctcgggcacgagatcggccgcctcgtggtggtcggtgatgtagacctccacccccgccttcaggatgtcggccacctcgttcttgcaggcaatgccgcagtccacggtgacgatgacgtcgggctccagagctcgggcgcgctcgaaggcggccgcggtgatgccgtagccctcctcgaaacggcggggaacgaaggggaacgcgcaggcgccgagggcccgcaggccccgggtgagcacggtggtagcggagatgccgtccaaatcgaagtcgccgaacacgacgatgcgcttcttctcgcggatggcgtcgatgagcccgtcggccacttctgccagccctgggatctccaagggattgcgccagtcgcggtcgagcgaggggttcaagaagcgcttggcggcccgcaccgtggtgatgccgcgggccacgagggtcgtcgcgatgaagcggggcagaccgaggtcgtgcgccagacgcgcgacgatctgcggatcggcctcccggatgctgaattgggcggtcataatgtgctagctaccttacgtgcgttcttcttcgtagttcggagggtattttcgcacaaagctcgcattctgtcaccgcagcacgacggcggcgcggcaatttcccacggcaccgcccgggcagctcctcgcaagccgtcaatcgacgctcggcagcgagtcgcacagcacctagcggttgtccactttctcggggtacaggtcgtgctgggacaggcgcgtccaggctacttcctcccagcgggtgccgggacggccataattgcagtaggggtcgatggagatgccgccgcgcggggtgaacttgccccagacctcgatgtacttcggatccatgagcgcgatgaggtccttcatgatgatgttcatgcagtcctcgtggaagtcgccgtggttgcggaagctgaacaggtacagcttgagcgacttgctctccaccatgcgcacatcgggtacgtaggaaatatagatggtggcgaagtcgggctggccggtgatggggcacaggctcgtgaattcggggcagttgaacttcacgaagtagtcgttgcccgggtgcttgttctcgaaggtctccagtaccgacgggtcgtagtcggtcgggtactgggtatgctggttgccgagcagggtgacgccgccggcgcgagtctcattctcatcgcggccagccgaggcagcggcgggagcagtcgctggcgcggggc

SEQ ID NO: 10520 - DNA, 1752 bp, Unknown
  gut microbiota DNA sequence
cctatcagcttactcccactcaatagtcgcggggggcttgctggtgatgtcgtagactactcggttcacgccggggacctccgctacgatgcggccggagatgcgggctaggacgtcgtagggcaaacgcgcccagtcggcggtcatggcatccgagctttccacagcacgcaggatcaccggacgggcgtaggtgcgctcgtcgcccatgacgccaacggacttgatgtcgggcagtacggcgaagtactgccagacgctgtgctcgctgttgcgctcgcccgtctcggcgaacaggcgctcgttgtaggcgtccagctcctcgcggacgatggcgtcggcgttcttcaggatgttcagcttctcggcgtccacgtcgccgatgatgcggatggccaaacccggccccgggaagggctggcggtgcacgatgtagtcgggcagcccgagcgcggtgcccagcgcgcgcacctcgtccttgaagaagtgatccaaaggctcaatcaaatcgaaatgcacgccctcggggaacggaatcaaattatgatgcgacttgatggtgctcgccttcccgccggtcttgcgcgcgccgctctcgatgatgtcggggtagatggtgccctgggccagatacttcaccgggcgcccgtcctgggccaggtcctccgccacggcgaagaactccttccagaactgcgtgccgatgatgcggcgcttctgttccgggtcggtcacgccgcgcagaagctccaggtagcgctcctcggcgtgcacgtggatgaagtccacgtcgaactgcttcgtgaacacctcttccacttcctcgggctcgcccttgcgcagaaagccgtggttcacgaacacgcaggtcaactgtttgccaatggcgcgggcgcacagcgccgccaccacggacgagtccacgccgcccgaaaggcctaaaatgacgcggtcgtcccccacctcggcgcggatggcctcgatggagtcgtcgatgatggagtccatcgtccaatcgggctcaagctcgcacacgccgaacaggaagttccgcagcatggtctggccgaactcggtgtggcgcacctcggggtggaactgcgtggcgaacaggcgccgctcggggtattccatggacgccaccgggcacacctcggtgcgcgacgtgatggagaagccctcgggcacgcggctcacagcatcgcggtggctcatccacacggtctgttcgccgggggtgccgtcgaacagcgccgactcgcccgcccgcgtgatgaccgccgggccgtactcgcccttctcggtgtggcccacctcgccgcccagggccacggccatggcctgctgcccgtagcagaagccgagcacgggaatgcccagggcgagaatctccgggtcgatggaaggcgcgtcctccgcgtacaccgacgccggaccgccggacaggatgatggccgcgggcgcgatggctcgcacctcctcggccgtgatgtcgcagggcacgatttcggaatacacgtgcaaatcgcgcacgcgacgggcgatgagctgcccgtactgggcaccgaaatcgacgacgatgactttctgttccggggtagcggactcggccacaatgcctccttgggtcgcgaaatgttcgagggcgattttacacctccccgcgcgctgaggtatttctacgaggtgaaatatcgagaaagtgcggaatgggcggttgggagattagggcagaccaaggtctgcccctac

SEQ ID NO: 10521 - DNA, 2288 bp, Unknown
  gut microbiota DNA sequence
gcctcgggcatgcccccgatgaggacgtagcgcagccaaaggtcgaggaacatctcatgcaagaagtccggcacgggctctcttgcggtgaagcattcttttacggcatcccagagcattgggtcggttccctgggaccagcagaactcttcgaagtcgagagggaacatttcctcgatgtcgatggtcccgacgggcagggatcgaaagtcgtaggcctcgacgccgagcatcgagccagagtagatgacgtcgaaacggtcgtcctcggccagatagcgcatccaggtaatggcgtcggcgcaccgttggacctcgtcgaagaacagcagagtactctcgggggcgagaggccgttcggcaagcgcggtgatgcgcatgatgagatcgctgaggttctgggcttcgctgatgacctcgaccgctctcggctgctcgacgaagtcgatcttcaccatggcttcatagcgttcgcgtccgaacgcctcgatgctgcttgttttacccgtctggcgagcgccagtgatgagaaggccttgattggtctttgtcgccttccaagactcgatccgtttttcgattttccgcttaagcatatatgcctttcttgacgatatacaggtagtttacggcccagatggcaaaaatgcaaagttaaaaagaggcgaaatggcaaaaatgcaaagttagaaagccgcgaaatggcaaaaatgcagagttttgaagccgcaatgggtgcagctgtctccggtttttgcaaagaaaaagtccccgtgctgcgcaacggggactttgaggtatgtgagagaggctgctaattcttcagcgagttcaaaggtgcgggcatgcggccaccgcggtgggcgaagatggtgccggcgtaggggttcacgggcatgaccggggcgtagccgagaaggccgccgaagtccagctggtcgcccacttggcagccgatggcggggatgaggcgcacggcggtggtcttgctgttgatcatgccgatggcgcactcgtcggcgatgatgccgaagatggcctcctgggtggtatcgcccggcacggcgatcatgtcgagccccacggagcatacgcaggtcatggcctccagcttctcgatggacagcgccccgtcctcggcggcgcggatcatgccggcgtcctcggacacggggatgaaggcgcccgacaggccgcccacggacgacgacgccatgacgccgcccttcttcacggcgtcgttcagcatggccagcgccgccgtggtgccggggccgccgcactggcccacgccgatggcttccaggatctcggccacggagtcgccctcggctggggtgggggccagcgacaaatccaagatgccctgctgcacgccgaggcggcgcgaggcctcccgggccatgagctcgccggcgcgggtgatcttgaaggcggtggccttgatggcctcggccacggtggtgatatcggcctccttgggcaggtcggcgagcaccgcacgtaccacaccggggcccgacacgcccacgttcactacttcgtcggcctcgccggagccatggaaggcgccggccatgaaggggttgtcctccacggcgttgcagaacacgacgagtttgccggcaccgatgcactgcttatcggcggtgagctcggcggcgcgcttgatgatgccggccatcttgaaggcggcgtccatgttgatgccggcccgcgtgctgcccacgttcaccgaggcgcagacgcggtcggtggcggcgagcgccgtggggatggagtccatgagcttgtggtcggcccgggtggcgcctttgtgcacgagcgccgagaagccgccgacgaaatcgacgcccacctccttgccggcgcggtccatggccacggccacgggcgtgaggtcgtcggcggtcacggcggcgcagatctctgcgatgggcgttaccgatatgcgcttgttcacgatggggatgccgaactcgcgctcgagctgctcggcggtgggcacgaggttctcggcggccgaggtcatgcgatcgtagaccttggtcgccagcgcatccacatcggcgtcgacgcagccgcgcaggttgatgcccaacgtgatagtgcggatgtccaagttctgcttggacaccatggccaaggtctcggcaacttcggcaggggtgatctgcatggcggctcctcgctcgcgacggtcggcagggcgcgggttcgcgctccggtaattgttctggctcagtctaccaaatcatggtcgcccccgccgctgtatgggtgcggac

SEQ ID NO: 10522 - DNA, 42943 bp, Unknown
  gut microbiota DNA sequence
cgagcgcctcctcccgccaccgctgcgcgcgttttcttgctgaatacaacaatgccccctgaaacttcagagggcattgggttaccgttgatgttacgcagtcgttgagactaaaagcgtttaggcggtctgctcggccgggatgacgtgaatcttgcgcttctggccgcgcgtgaacttcagcgtgccatcgcacagggcgaacagggtgtcgtccttgccgcggcccacgttctcaccgggatggaagtgggtgccgcgctggcggacgatgatgttgccggtcttcacagcctcgccggcgaacttcttcacgcccagtcgctgcgcgtgagagtcgcgaccgttacgggtagagcccaagcctttcttgtgtgccatgagagattcctccttaacccgttactcggccttggccgtaccgacggattcgatcttcacgcgggtcaggttctgacgatgaccgcgcagcttcttgtagttcttgcgcttcttgaacttgaagaccagcgccttgtcgcccttgaactgctcgagcacggtggccacgaccttggtcttggcggccttctcggggtcggcctccaccttgtcgccgtctaccacgcagatggcctcaagttccaccttgtcgccaggctcgacgttgagcttctcgatgttgatcttgtctccgggggcgactttgtactgcttgccgcccgttttcacgattgcgtacatgtaagtttctccttgaatgtgactaaacgcaaggcgatatcttacccgacacccccgcgcgagtcaatgattttctcccgcaaaaacccgccgttcaccgagcatctacatatacaggaaacgacggagttgccttgcgaccctcgccgagcttctttcctcacccagcagcccatcgacccatcgcgcgcaactaccgagccgcgagcttttcacttggaaaatgtgcttttttgttcaggtctctgacctgggaaatctggagttataccaggtcaaactaggtgtttcccgaaaacagaaaagcacattttccaaatttcgcgagccaaaatagcacgttttccagatttgggccaaaatggcacattttccaaaacgaggaagagccaggcggaacacacgaggagggcgccccgcgcaggggacgccctcccggaaggatgacagccggcaggctgttatcggtacatcctaggctgctccaggcagaatgagcatcgcagcggtaaggatcaccatgcagacgatgccgaggaccacgaacagcttcgcgccgaacttgagccaggtcgagtactcgatcttggcgagggccaagccgcccatgatggcgccggaggtcggcgtgaacaggttcacaaggccgttgccggcggagtagatcatgaccatggtctcgaccgagaagttcagctggctggccagaccgcccatgatgggcatggacacggtggccatgccggaggaggacgggatcaggaaggacaggacgatgtagagcaggaaggacagcggcgcgaagatgatcgccgacatgcccgcgagcgcgttggccgcgttgttcaggatccacatgtccagaccggtggaggccatgagcacggtgatggagcgggccagcgcgatgatgagcacgaccgacatcatgtcggcggcgccgttgatgaacgccttcacgaagcggctctcggacacgccgccgatgacgccgatgatgagcgccatgagcaggaaccacgtggaggcctcgtcgaagtaccactggcccagaggaatgccggtgaggaagctcgaccaagccggagtgacctcctcctcggagaccgaggtggcctcgaagggagcggcaacctcggtggtggtgccgttggcctcgtcgtaggcggcaatgacctcatcgcccgcaaccgtcgtcgtcacttcctcataggactggccggccacaaagccatcgaagcccaggtcttcccaaggaatgaacgagacgatcatgatgacgaaggtaagcgcgaacacgatgagggtggccttctggcgaccggtcatcttcggagccatatcttgaccgtcagcagcctcggcctcggagtcagtcatgccccactcgttcatcatgtcctgctgctcctgcaacgacaggaaggtggagcccttgtcggccttcaccttcttggcgtagcgcatcacgaagatgatggagatgatcgtcgtcgtgagccagagaatagcgccgagcgcgatgatgatgccctggttgacggcaatgccgatgccggagagcgcatcgacggccacgcccacggcgaacgggttcacggtcgagcccaaaacgccgcagccggcgcccaaaaggacgaccgccgcgccggtcaggctgtcgaagccggcggccaccatggtggcggcgagcagcaggtagaagggcaccgtttcctcgcacatgccgtaggtggtgccaccgatggagaagatgaacatcaaaatggggatgagcacgagctcgttgcccttgagcttgtgcaccagcgcggcgatgccggcatcgagcgcaccagtctcggtgacgataccgaggaaaccgccgaggatcataacgaacaggcacacgccgatggcgtcctggaagccgaagaccggcgcggtgagcacgccggagagcgtggcgccctcgatgccctcgacgccgcaggcggccatgataacggtaatgaccgcaagcgccaccaggatgatcagcaaaatagtgaacgaagagaggctcgcgcgcttcttctttttagtatcagccatgggagtttctccttaagggagaggcggccgataagggagatcggccgccgtttggacaggaagaaagcctagatagcctcgcgccaggccggcatggacatgcagcgcgggccgccacggccgcgggagagctcggccgacggcatgaccaggcagttgatgccgttcttgtacagcacgtcgttggtgacgttgttgcgctggtacaccaccacggtgccggggcgcacgcagagcgtgttggagccgtcgttccactgctcgcgctcggccgcgatgcggtcgccgccgccgcaggggatgagcttcacgggctggccgacgtactcggtcaggatggactccagatcctcgtcgcgctcgcggatcttggtgccgccgttgccgtccggggtgatctcgaagacggtcagcgggcccatgatgccgggatggatggtgaacttgtcgtagtcgatctgggtgaacaccgtgtccaggtgcatgaaggcgcgggacaccgggatgttgaacgccaggatggtgtcgatggtggacgtctcgtcgctgaacacgttgtgggccagctgatcgatggcgtcgggctcggtgcgctgggagatgccgatggccagcacgtggtcgttgatgttcagcacatcgccgccctcgatgtggaaggtgttctcgcggctgtagtactgcggcacgtccttgaaatccggatgatagttgaagatgtagtcgccgtagatggtctcgcggttgcgcgtctggctgtacatgcggttgatgcccacgccgttgccgatcatgttgaacggatcgcgggtgaagtacaggttcggcatcggggcgcacacgagcttcgtgcggtcggacaccatgtccacgagcaggttggtgtgctgctgcggcagctcctgcaggttgatgcccgccatggtcttcatgaccatgtccttggtgccggcgtactcgctattgatgtaatccttgatgatctgggtgtacaggtcggtgcggatgcccgcctcgtagatccactggtcgaggaacttctcgcgcagggccgggtcggtgtccagggcctcagccataaggtcctccagatagacgacctccacgccctcctcgcgcagaatgcccgcgaaggcgtcgtgctcggcctgagcgacctccaagaacgggatgtcgtcgaacagcagctcctccagcgtgttcggggtgaggttcaaaagctcgttccccgggcgatgaaggataaccttcttgaggttgccgatctcgctcttgacgtttactccttgcatgtgactctccgatctggcgcgtccgcgccactcgattgccggctgccgcggtttccctccacggccacgcgagtcccgaaggaactggctcgcgatttcatgaatccaatgtgcaggaactatgaagtttgcgaaaggtctaaaccagttgtagctcggccccatcagccaaacgctttcctgcgggcttcttctacaaccaacctaaaccgcaggtcacttacgctttttaaaaactctgattattgacttttcgtcaggtaattaagcgctgttaccgtttcgtaagctttctgctcaagagttttcgcccgggcgcgtctccacaactctccttcgagcgacgcattcggggaacgcagagcgccatccaggcccccatcgctctcgacggcttcccccggccctcgaaattccccgcgaagcgatataatgagcttaaaaagagggtttgatgcaggctggctggaacgaaggggtctatgggactggcgattttctacgagacgctcttggttattctcgtctcggcactgacggcggcggtttgcctttcctcgtatctggtaacgaagcggaagacgatgctgttcgcctgcatcgcgttcatgttctacttcttcgacgtggcctccatcctgcaggacgactatgcggcgcgcgagctggcctcggggctgacccaggagtactatttcatccgctcgctttacacgatggtcaccggagccggctttctcggcgccttctggttcatggtctgcgagtacatcggcgagtgccgtcgcagcatccgcatcacgcccatcgtcgtttatgccatcctctcgctgatcctgctcgccatctccggcgagagcaaggtgctgaggttctgctattacagctgccgcgccgccttcatgttctggatcctggcctatggcgccgttcactacctgcgtacgaaagaccaggtcgagcggcaacgacttgggcgctacaagaaccattgcatcgctctcgccctgctcggaatggtcatggtggccgaggacgcgctgttcttcctcgtgctttccaccgacacgatcacaataggaccgttcacgttctcggcggagcgaaactacgccgagaacgtactcatgatggtctgcgcagccatgacctgctggttcgccctgcgtcagcttgatattcactccaacaaggcgcctgtggtggacgacaccctccgctatcgtcagacagccgaggatctgctcgtctacgccaagcgccaccagctgacggcccgcgagcaggaggtgctcgactacatcctgcgcgatcaggacaaccagaacatcgcctcggcgatgtcgctctccccgtccaccgtgaaggtgcacgtgcacaacatcctgcaaaagacggggcataccaaccgccaggagctcatccaggatttctggaagacggtgtaagggactcctctgactgggaggtcgggaggaggtatccccagcccgctgcgcgctttatccccctgcgaacgcggcaaaagaaatagcggaaggaacgcacataggccggtaccatccccgcatcgctgctgctgaagtggaagctatttcttaacggccgcgttctccagggggcgcgcagaggtctggggatacctcctcccgacctcccggcgcatggattactcggctgactcgatcgactcgctagtgcgcttcggcccaggtggggccccagctgacgtcggcgatgaggggcaccttcaggctgacgacgccttccatgacctctttcaccatggcggccaaccgctccacttccccagccggcaccgagaagtccagctcgtcgtgcacctggatcatgagctgggcctcaaagtcctcggccagaagacggcgctgcacctcgttcatggccatcttgatgatgtcggcggcgctcccctgcatgggatggttcatggccgtgcgctcgccgaaggcccgctgctggccgttggagctcttcagctcgggaatgtggcgcttgcggccgagcatggtctcggcgaagccgcgctcgcgggcctcggcgacggtctcgtccaagtaagtgcgcacgccggggtacgcctcgaagtagcggtcgatcatctcgcgggcctcggccacggggatgtccagcgtctgggagagcccgaaggcctgctggccgtagacgatgccgaagttcaccgccttggcgcggctgcgcagctccggtgtcaccgcctccaccggcagaccgaagacgcgagaggccgtggaggcgtggaaatccgccccggagttgaacgccgctaccaagtgctcgtcgccggacagatgcgcgagcaggcgcagctcgatctgcgagtagtccgccgacaggaacagctcgcccgcccgcagcggcacgaagcaactgcggatctggcggccgaactcggtgcgcacgggaatgttctgcaagttcgggtcggatgacgacaggcgcccggtcgtggtgaccgtctcgttgaactgggtgtgcacgcggccgtcggcggcccgcatacggggcagggcgtcaatgtaggtgttcttgatcttcgagaactcgcggtagcgcaggatgaggtcgggcaacggatggatggccgacagctccgtgagcaccttggcgtcggtggagtaccctcgctggttcttcttcaccgggggcagttccagcacctcgaagaggatgtgggccagctgcttgggggaactcaagttgaagggctcgccggccagctcgtaaatctgggccgtgagaccgtccacctcggcctgggcctcgcgccccagcgcctccaggcgctccgcgtcgatggcggcgcccacgcgctccatgacggcgagcacccccacgagcggcaagtcgatgtcggcgtaggcgtcccagctgccgtccttcttcagcgcctcctccaagagccccttcagcagacgagccgccgtggcgcggatggccgcgcgctcggcgtcggtttcggcctcgggcagcgtggaggcggccagggcctccatgagcgagtcgtaggtgtaggcggaaagcgacgagttcagcacgtagcccgccacggacaggtcgaagccgtcggcagagagcacctccccatcgctcacgagagccggctcggcggtgtcggccgggtacacccgatgcagctccgccttcacatccagggccacgaacgagccttcccgaaccacctgggcgagcagcgccagcgcgtcgtctcccaccgcgacgaccgttgcctcgtcggtggcgaacgcgccggtcgccccctcgtcgaacaacgacacctgctccggatcgacgaaggcgacgccgatggtctcccccgccttcacggcccgggcgacctcggccgcgccggcgtccccctcgagcaccggcgccacttccaacttcgcctcgcgcgagggcggctcggcatcgatcatggccagcacccgggccaaggggctcgccagctggtacttgccgaacgcctcctccacgtccgccgcgtcgaaggcgggaaagctcaccgcctccaagtcgagggggaagtccagatcggtcacgatggtcgcgatctcccgggacagaaacgccgtctcgcgattgttctcaatgttctccttctgcttgcccttgagctcccccacgtgctcgtagatgccctccatcgacccgtaggtctgcagaagcttcgtggcggtcttgggcccgatgccgggcacgccggggatgttgtcggagctgtcgcccataagccccaggtagtcgatgaactgggccggcgtcacgccgtagcgctcctccacctcggccggtccgttgatggtcacgtccgtgatgcccttcttcgtggtcacaatgcgcgtcagctcgctcgccagctgataggcgtccttgtcgccggtgacgagcagggtctcgtatcccagcgcctcgtcgcgggcggcaatggtacccagaatgtcatcgccctcccagccgggcaccttcaccacagggatggccatggactcgagcagctcctgaatgacggggaactgcacgtgtagctcctcgtccatgggcggccgctgcgccttgtactgggccatggcctcgatgcggtgcaccggcttgccggcgtcgaaggcgcacaccaccgcgtccggcgaggccatctcgatgaacttgcagagcatggtgaggaagccgaagacggcgttggtgggggtgccgtccttggcggtcatgggcgtctgcactgcatggtaggcgcgatgcatgagcgagtttccgtcgataacggcaatcttttttgacatttcgagcctttcgagtcttaggcgttccacaaatagccgacgccgcgcaccgtctccaggcgctgagcgagctccgggccgagcttggcgcgaacgcggcgcacgtggacgtccacggtgcggctgccgccgtagtagtcgaagccccacacgcggcgcagcagcgcgtcgcgagagtaggtgcggcccgggtgagtgacgaggaaagcgagcagggcgtattccaaataggtgaggtccaccggctcgccgccgaccttcacctggtaggtggcaaggttcacggtcatgttgtccacggtgatgtagtcggccgagctgccctcgttgccgggccacagcagctgtcgaatgcgggtggtgcactcggcggcgctcgccccgtgcacgacgaagtcggccttgcaggacaccggcagacggaactgggccagctggtcctcgttcacgatgacgagcatggcagtggcaccttcctcggcaagcgccgcctccaccgaggccaccgtgcccagagcgtcgccccgagcctcgtagatgaccagatcgtggctcgggtgcgccgcgagtagcttcttgaactgcaccgacgagcccgcagccacgtccacgtccaacttcgagagtacctgctggaacttgtgggcgttgtcgaggctgtcggcgatgaagattaccgttttgcgctgcatgctacaacaccgccaaattgcgctcgagctcccacgcggtcacgatgccctggtaggcctcccattcctcgcgcttggtgcgcacgaggtaatcgtggatgtgctcgcccaaggtctcgcgcatcagcttgctctccgcgaagcgctccacggcctcgccgagggattccggcagcgtctcgatgccccgggcgcgatgctcgtagcgggtgcagccgatgggcgcggcctcgtcggccgggggcataagctcaagcccctcttcgatacccgcaagccccgcggccagcatgacggcgaaggcaagataggggttcgccgccgggtcggggctgcgcagctccacccggcaggccgactcgctgttcgggcgatagcccgggatgcgcaccaaggtcgagcggtttcgcgcgccccagctgatgcaggtgggcgcctcccctcccggctgcaggcgcttgtaggagttcacgtactggttcgtgaccagcgtgtactccggcgcgtacttcagaaggccggcggtgtagctcttcgccgtggccgacaggttgtacccggacggatcgtccgggtcgaagaacacgttgttgccggagcgatccatgagactctggtgcacgtgcatgccgttgccgggagcatccgccatgggcttgggcatgaacgaggcgtacaccccgtgcttcatggcgatttccttcaccacctgcttgtaggtcataacggcgtcggccatggagagcgcgtcggcgtagcgcaagtcgatctcgtgctgggaggggcccttctcgtggtgggagtactccacgggaatgcccatcttctccaaagtgagcaccgtgtcgcggcgcagatcggaggcggaatcgagcgacgtcaggtcgaagtagctgccatgatcgagcacgtcggtgccctcggcgtccttgaagtagaagtactccagctcgggccctacgataaacgagtagccgtcctcggcggcgcggcgcaccacccgctccagcacatggcgcgaatctcccgcgtagggctccccctccggcgtgcggatgtcgcagatcatgcgggccacggcgttggcctggggacgccagggcaagatctcgaaggtggaagggtcgggaaaggccagcatgtccgactcctgcgccgccgagaagccctcgatgcagctggcgtcgaagcccatgccctcctcgaaggcgctctccagctcgccgggcaccaccgcgaaggacttcatgttgcccaagacgtcggtgaaccagaagcgaacgaagtgaacatctctgctctcaaccgttttcaggacgaagtcctgctccggattcgcaaccatatctactcccatcggtcgcgttgcgttcaactccctagcattataaaaccgcgcccgctcccctttgcgggaattcacaggacggcaaaagaaaaggcccgccgcaccggagtgcgagcgggccttgcgttcaccgaatgcgatgacgtgctactcggcggcctccacggcctcggtcacctcggcgtcggtcagctccacgccgggagcctcctcggcggtgccggcggcagcggcgtcttccatggcgtcaacgtcggcctgagcctcggcgcgggcggcctcctcggcggccttggcggcataggcggcggcacgctcggccttagcggcggccttggcctcgcgctcggccttcttggcggcctcgcgctcggcgatctgagcggcgcgctcggccttcttggcggcctcgcgctcggccacgacgtccttagcggcgccgaagcggtcggcgaagcgctggacgcgtccaccggtgtcgatgagcttctgggtgccggtgtagaacggatggcaggcgttgcagatgtcgatcttcagctcgggcttggtggagcgggtggtgaaggtgttgccgcagctgcacttcacgacgcagtccacgtactccggatgaataccttgcttcattgggttctcctaacttccttggtttccgaccaaggggccgaatgcggcttggtttccgaccaagccctgagacaagcttgtctatattagcaccgttttcgccgaatgcaagaaaaaagacccgcgcaacacgggtctttctcatttcgctccgcgagcgggtgtttagatctcggtcacccacaggccgtggaggttgcagtgctcgtagaccttgagcggcgtctcgccctcggcgatgacgaactcggcgtggggcgcctcgcccggattcagcgggtgaatctggtagcccttgtcggtcaccaggcagatgaactggatccagtgctcctccagcatgggatgatccaccgagccgacgttcacgacgaccttgttgccctcgacctcgacggcgggcacgtgcttctccagggcggcgtcctgggagccggcgaccagctcaaccatcttctcgccgcagcacaccagcggcacgcccgcgtcgaagaccttaacggcaatgttgccgcaatgcatgcacttgtagaatttcacgtccatgttctacctcatatctcttgtagctgctcgttacaaagagccgcagacgcgctgtccgcggccttgaaatattgtactggaaggagtgccaccccgatttccgcaacgccgggtgacaccacgtcgttacaagaaaacccgacggagcgcctaagccgcatcgccagggacagacggcggctgaatctcctgcggtccggcctggggatgccgcgtcctcgccgcatagatgagcaacgcgatgccggccacgatgagtggcgccgagagcacttggcccatggtgagccagccgccccacaggtatcccagttgcacgtcgggctcgcgcacgaactcgatgaggaagcggaagatgccgtagagcaccagaaatgcgccgaggaaggtgccctggggcctcggcgggtacttgcgcgagagcgcgaacaggacgcagaagatgacgagcccctccagcaccgcctcgtagagctggctgggatgccgcggcatcatgccggccgcgccgccgaacaccacgccgagcggcccgtcggtgggcgcgccccacagctcgccgttcacgaagttggcgcagcggccgaagaacaggccaatcggcgccgcaatggatcccaagtcggccaacgtgagaaacgggatgcgcgtcatacgggcagctacggcgccgccgataagcagccccacgagaccgccatggaagctcatgcccccctggttgaacgcgagtatctccagcggatgggacaggtagtagccgtcgccgtagaacagcacgtatccgatgcgcgcacccagcaccacgccgacgatggcgcagaccacgagcgtgagcaggttgtcctcgctcatgccgagcttccagcgcttcgccacgaagtagatgatggcggcggcgcagacgaacccgagcacgtaggccaggccgtaccagcgcaccaccagaggccccagcgagaaggcgatggggtcgagcccctgataaatgtcgttcagcattacgatgttccctcatgggcgcccataccagcacccagctcgatagcggcaaatacaacttcctcccgcaactcgggcggaatggtcagaagcgccgagatgcgggcggcgcaatgggggcaggtcagcgtgaacagcgccaggtcggagcgcagggccatgagcgactcgtaggatcgcacatcgacgtcatcggccccgcaggccggacaggtcaccttcgctttcaccgctctcaccgccttcgctcgcgcttgaacctttaccgaaccgcattgtagcagagcccctcgacaatcacgcaaaagcaagccctctcacccaaccgccttctcgttctttgcaaaaagtcgagagaaaatggtcacaaaatcgagttctgggttcggctgaaccctaaagaaggaagcggttgcggccgctgaacttgtcgcgcgtgcgggtctccggatcgatatccggcccgttcacaaggaaatgctcgcagaagcggcacacctgcttgaccgccgcgtcgtaatcgcgattcgggtttagaagcaccccgaagtcctcgcacaccacatgggtcggtcgatggcacgccgcgtaatggcagtctgccgggcacggctcccccggcacgttgtgcggacagcgcccctgcatctcgtcatcgcacccgcgacggctccagcacccttccatacaccagcctctctcgcaaaaaagcgggcccgccagagcccgctcatcttccagatctgttgccgcctacatcgccggcaccacggaggtaacgccgggcacgcgctccttcaggatgcgctcaacgccattggcgagcgtcatctgggacatggggcagcccttgcaggcgccctgcagctccaccgtgacgacgccatcgtcggacacgtccaccagctgcacgtcgccgccgtcggcctgcaggctcgggcggatcagctccagcaccgcggccacatcggacttctcaaccatgagtcactcctatcgtgagaggttttcttatatcggccagcatcataacacagagggcgcctagccgatccagtcggtgccgatgatcaccaaaacgttggtgtcgaaggtgtagaagtcgccgccgttcaccacccgccccgcggacaggtcgctcacgatggccttggcggcgatttcgaaggcctcgtccttgtagatgacgagcgtctcggggtacaccgtgccgtcgtccacgttgccgacggatttcacgtcgtagcccgccgaggtcagaagctcgccgcagcgggccgccgctccctgaatgccgctgccgttgcgcacctccacggtgacgaggctgcgatcgacattggcaaggttgccctcgaagctctccggcgagttgcccgcattcaccgcctccatcatcgcggcgagatcctcgtcggacacctcgtaggtttcctcgccctcgtcggaagtcgtaaggcgcccgggaaccacggcagcatacaccgtcgcttccgtgagggggctgagagcatcgcccaaggaaatgagctggccgctcgtccagtccgtggagacgaagggcgcgccgtcggctatcacgctcgggaaggaaaggccctcgcccgaggtggcgcgctcggccaggttcaccgtgaacagggcccgcatcttcgcctgcgttcccattgcatcgctgtagttggccgccctcagaagcgtgagcgcctgggcgccgtcgagcgtctgggctccggcggccagcacatggataccggcccgagggtcgtccacctcctcggacagctccacgggcacgccccccaccagatcgaccagggaggcgagaccctcggcatcggtggacgcgaagtgggcgaactgaaccccgagcagcgacccggcggcccggagaagctcagcgtcgccgcccaccgacgcggcgtcgcgcagggcgtggcgctcgccgtcggaaagctccacggacaccgagggcggcagcgagatgaacgtaagcgtgcgggcgctctcgtcgatgcgcacggcgaggtaggcctcgtcagacgcggagggagccgccgtgttcttggcgagatcggcggcgagcagcgcgtaatagggcgcgccctcctcgggagccgccagcgcctctttggcgttcgagtcgcccaaggacagctgagaatcggaccaggcgaagaacgccgccgtgcccgccacaacggccaccacgactacgagcagggcaaccgccccgaagaagatcatcttgcggcggcgccccttggcctgaatctcctcggcgtagctgcgccgggcgcggcgccgagcgtaatcggagtcgctctcgccgctcgtggcgcccacgtccacctggtccaccatgccgcggtcggctcggcggctgcggcgtccgtcggagaagtcgacgcgggccggacggtcggcgccggcagcgtgccgcccccgagcggaggagccgcgctccacatgggagccaatcatggaatcgttcacgcgtcgggagacgcgacgggtctgggaggccgaaggggcctttttgccatgcagtgccatggacgcccctagcggagagaatccgcggacacgcgacggatgtcggcgccgagggaggccagcttgcccacgtagtcctcatagccgcggtcgatgtgctcgaggtgatgcacactcgtctcgccgtcggccacgatacccgcgagcacgagggccgcgcccgcccgcagatcggtggaggacacgggcgccccctccaaatgatcgacgccgcgcacgatggcgtggtggtcgtccaacgtcacgtcggcccccatgcgcatgagctcggcggcgaacatgaagcggttctcgaagacgttctccgtgatgaccgacacgtcatcggccagggccgccagcagcatgaactgagcctggagatcggtggggaacccggggtgcggcagcgtctggatgtccacggaggacaggggctcctcgcggcgcacggtgatccagtcgtcgccggtttccacatcgcagcccatggcccgaagcttcatgatggccatgcgcaaaaaagcggggtcgatgccgtgcacggtgagggggcctccggtaagcgcgccgccggcgaggaaggtgcccgcctcgatgcggtcccccaccgtcgtatgctcgcaggggtggagcgtcgagagcggcacgccctcgatctcgatgagcgaggtgccggcgccggccacgcgcgcgcccatggcgttgagcatgttcgccagatcctcgatctcgggctcgcaggcggcgttctcgatggccgtgtggccctcggcggtcacggcggccatgagcatgttctccgtggcgcccaccgaggggaactcaaggtacacgtgggtgccgcgcaggccgttcggcgtcgtggcggccagaacgccgtgatccacgtcgaacgcaacgcccagggcctccaagcccaccaggtgcatgtcgatcttgcgggcgccgatctggcagccgccgggcatggccacccgcgcctcgccgaaacgcccgatgagcggccccagcaccgagatggaggcgcgcatcttcgagacgagctcgtagggcgtctcgcagctgtcgacgtcggcagtgtttatgcgcagggtatgcccctcgcgcaccacggtggcgcccagacgcgcgagcacctcgctcataagttcgatatcggaaatgagcggcacgttgtgcaggatcgtctccccctgccccagaatggacgcggccatgagcttcaaggccgagttcttggcgccggagacgcgcacgtcgcctttgagggtatggtttccccgaacgatgatgacttcctggttcatttctagtccttttgccggaacgcccgagcgccccgcgtcatgcaaatattcacaagtgcccctattatagaaaaaagcccgcgcacccgcgcgggctttcctccttttggaaataaatccatccagttgcggctactcgcccagagcgaagcgcacgaaaccggtgatggcgatcttcccgcccatctccttggcgcactcatcggcgtactgggccaccgtgaggtcgggattcttcacgaagtcctgctcggcgaggcagttctccttgtagaacttgtccatgcggccgagcgcgatcttctcctggatggcctcgggcttgccggactcggcggcctgggccttgtagatctccatctcgtgggcggccacgtcggcgggcacgtcctcgcgggtggcggacacggggttcagagcggccacctgcatggcgatgtcgcggccgcacttctggaaggcgtcggaggccggatcgatgccctcaacgttgaaggtcaccagaacgccgatcttgccgccgccgtggatgtaggcggacacggcctgggcgtccaccacggccacgcgggccagctgcgtgttctcgcccatcacatggatgcagtcggtgaccacgtcctcgacagtctcgccatcgatgacggcggccttgagcgcctccacgtcggccggcttggcggcgagggccgccttggcgatcttctcggcgtaggccttgaacttctcgttcatgcccacgaagtcggtctcgcagttcagctcgaccacggcgccggtggtgcacgcatcgttcacgatggccatgacggtgccctcgttggtggcgcgcccggccttcttggccacggcggcgagaccgcgggtgcgcagcacgtcgacggccttctccatatcgccctcggcctcggccagggccttcttgcactccatcatgcccgcgccggtcatctcgcggagctccttcaccatggaagcggtgatgttagccatgaattcctcctttggggaatgagtatcttactgagtcggttactcggcgtcagcgaccacgtcggcaacgacctcggcgccagcgccctcagccacgtcggcggcggcctcgacggccacctcggccacggcgtcggcggcagcggcctcgccggccatctcggcggcggtcacatcggcaccggtgccggcgatgacggcgtcggccatgaagtcggcgagcaggcgcacggagcggatggcgtcgtcgttggccggaatgccgtaatcgacgtcgtccggatcgcagttggtgtcgagcgtgcccaccacggggatgttcagacgatgagcctcgtgcagggcgatgccctcgcggttggtgtcgatcacgaagatggcgtcgggcaccttcttcatgttgcggatgccgttgaggttggtctgcagcttcgcgagctccttgtgcagcaggatctgctccttcttgggaagcagcgccatgcgaccgtcggcatccatggcctccagctcctccatgcgcttcacgcgggtgcggatggtggcgaagttggtgagcataccgccgagccagcgggcgttcacatagggcatgccgcagcggttggcggcctcggagacggcctcctgggcctgcttcttggtacccacgaacagcacggtgccgcccttgcgggtgaggttgctcacgaaggtgtaggcggcatcgagcccgtagagggtctgcttgaggtcgatgatgtagatatcgccgcgattgccgaagatgtacggcttcatcttcgggttccagcggcgggtctgatgcccgaagtgcgcaccggcatcgagcagcgtggtaatgctgactttcgtcatgatcactccattcgttagtcctctgcccgaggtcatcccgccccttcgcagccttttccggtggccactcgcgaagttcggtcgcccgagcatgtgtgatagttgccgctgcccatcgcacgcctgcgaagacagcctgtctaaaatagcacaatcccccgccaatgcaagggattgcgcaaagaaagtacgcgcaattcaacccagtcgccgggtgtccccgcgcgcagcaagaaaatcctcagccgatcagcgaagtccctctatgctgcgctgcttcaaggatgcgagcagtgccgcccgctctcccgcagccgcgaggcgcccgcgatgcaggctgcgccccaaggcgcgggcgatctgccccgccagctcatccagcgccgcaagcgatgacaaatgctccgccgtcgccgtgagcaccgtcaccgactgggattccagctgattgcgcctgagcgcgtcgcggcgcaacttctccttttccgcatgaaaggcatcgctgtcgtattccaccgctatcttagcttcgggccaaaatagatcggccacgcgcacccgccccgtctccgcatcgagaggcagcacgcgattcatctgcggcttgggaagcccgtaaccaccggctgtcttcggaaggcacagcatgagcgccaacgcggtctccatgggagaggcggagccgtcgacagcgtagcgcaccgcacgggccatggctcggcccgctttcgagctagccgattgcgcgctaaaccactccatggcgcgaagacacgagaccggaactggtcggttgctgcgcgcgcattcctgcacttctacccgactgagcaatccgtcctcgctgcgactcagctgaggcacttcggcgagatcgtagtaataggtggagcacagctcgcaaatcagctcggcgagcttcggcatcggaagcttgagggccagttggagcaccgccagttcggggccggctatcagaagcccttccccagggccgcgaacgaaggagcccgccgcaggcgcggtgctgctcaggcagcatgtcaaatcagccgccgacagacgcgacgccttgttgggcaccatcacacggattggcgcgtccaccattccggcaccctgttcgagcactctctcgatcacgtgtttcgacggcttgagcgccataccggattccgtagcttctgcgtacgccagagcttcctcgtatacaacccccagccgatcgctcgccagccaccatgcacgctcttcagtgtcgggattccccagcggaggacgcagtttggggatccgatttcccatctccaagctaacagtttccccgaagaacaaaccataaaagcgatcgcatgtccagcattgcgccgccgtaagaccctcgacaatcgtagccattcctctcccccttcgcaacgaagcccagccgcgcttcttagcccgcaacaaccggcacgcagcaccgggccacgacttcccgtcggcagcaccgggccacgacttcccgtcggcagcaccgggccacgacttcccgtcggcagcgcccgacacgcaacaatgggccataatctcctgtcagcaacatccctgtcagcaacatccctgccagcaacatccctgccagcaacatccctgccagcaacatccctgccagcaacatccctgccagcaacatccgacacgcagcaacggccacgacccccgattcgacacattggacccgcagtaccgggagctcatcgcggagccgaatttggaaaatgtgccaatttggtcactttcagcgcggtcatcaatttcgcctttcagaaaaacacattttccaacttctgctgaccaaaatatcacattttccaaatctgacaaatgcgcatcatatattgctttgttcaatcaccttgttgaactggtattattccatacctctatcttgactagctcaatcgcgcaacaaaaatacttggaaaatgtgcttttttgatcgccgggaatcgtggcacggcatcctcgaccgtcccaaccgcacaacaatcccgaaaccaaagcaaacgggagcttgccgcaaaccgaagctctggcttgaacggagccctggtttgctcacccgatctgctcgcgctcccccatgctcacccgatctgctcgcgctcccgcatgctcgctcgatccgcccatgcccgaccttcgggttcttgcttgcgcgctcccgtttgtgcagccagcgcgccagatgaaaaagagcccgcacaaagcgggctctcgaggatcattgctctggcaagatagccttacttgtactggctctcgtgcttgcggaagaaatcgaagcgcggagggagctcgtggatgcgatgggcgccggcatcgatctcaatggccgggcacagctcgtcgttggaatcgaagtcgtagttccagctgaagaagtcgccgaaatcgaagctcaggtagtcgcagatcttctcgcagccgaccggcacaatgggatgcatgagcagcgtcgccatgcgcagcaggtagaacgagtccaccagtacctggcgccgcgcatccgcatcctcggacgcctcggcggccttgatgccatcggcccaccacttgttcgaccagcggatgaactcgtcgcacaccgatatcacgcggtgcagctccaccttgtgcatgcgctcctcgtagtcgagcagcgcctcgaaggcgcgacggcgcacctcgggcgtcacggcgcccaggggcatgcagccgtcgaaattcttctgcgcctcgtagaagcagctgcgggcgaggcggttgaacacgttggtgagcagcgccccctccttgagcaccggatcggcgtagcgcgggtcctcgcgcttggccgggtccgggtcgaagggcttgggagaaaagccgacggatttctggtcgagcccgagcgccaggaagtgggcgcgcagctgctcgggcgtgtagtgctccagcagctcctcgcccgtgggcggcttcaccgcgcccgacgaggaggccttcttcttgccaaacagcatgtggtggttcgccacaagcgtggtctggcgcatctgggagtcgggaccctcggcgaacagaccgccggggcgcaaagcctcccacagcgccggctgggccacaccgtagaagtacaggttgtcctggccaatgaactggtagacccgcgcgtcgtcggagcaccagaagtcgcgccagctcgtgcgcggcatcccctgctcgtcgttgatcgtgatggtgaacgagatgggcgcccacagcgattcgggccagcaccacaccgtgagcccctccacgccgtcgatgacgggagcgcgcacgccccactcgatgttgccggtgatgcggaagggcacgagcgtcttcgaggtgcggaagcgcaggccggccgcagccagcgcgtcgcgggcggcgtcgcgctcgccgatggaggcgaactctatctcgaaggattgcttgttgccctcggcgggacggaactcgtggggcggcagctcggcggccatggcctcgtactcttccaagtgctcgttcttcacgaagatcacgggcggggccagaaactcggcgatggccttggtcaccaccgggcgcacctcgtcgtcggcctcaagctcgcgcacgtagcccttcaggaagtcctcgaacccgggcaggtcgaaataccagttctctacgggtcgcatctcggggacggtgcccgtgagcgtggacaccggggcgatgaggtccaccggcgcgtactgatgccccagatcgcactcgtcggcataggcgtgctccgacttgcagccctgcacggggcagtggccctgcacctggcgaccgttcaggaaggtgccggcctcggcgtcgtagaactgcagggtggagtccagcttcaagtggccgctctcgtgcaggcgctcgatgaactgatcggagatcatctggtgcacgtcgcccgcgtgcccgatgccgctgccctcgtagatgtccagactcacctggaaggcctcaagggtcgccttctggcgctcgtggttggcgagcacgtagtcggcgatggagccctcgaactcgccggcctccttaagcttgcggtagccctcgttgatggggctgccgaagcagtcggtaccggagacgaaacggacgttctcggtgccgatgcggtcgcgcagaaagcgcgcgaaggcgtcggcgggcacgaacacgccgccgatgtggccgaagtgcaagggcttgttcccgtagggcatgcccgccgtcaccacggcgcgggcgggccactcgacccgctctctgctattcaagtccgacacggttctccaactccttcagtgtcccggaaacgtccagcgaatcttcggtgcccatgatatccagaaggcgcgacaaatcgctcgtggacgactgcagatacacggtatcagcatcggctataccggccagctcgcaggccttggccacggcggcctcaagcgttcccagctcgtcggccagcccgttttccacggcgtccatgccggtgaacgtaaggcccgtggccagcgcgcgcacgtcttccaccggcatgtcgcggccctcggcgacgaagttgatgaacacctcgttgatctgatcgacctgatcctggtaccaggcgcgctcctcctcggtgagcgggcggttgccggcgccggagtccttggcatcggccgaggtgatgttctcgacggagatgcccagcttctcgtagagccccgacaggtcggtcacagacatgatgacgccgatggagccgatggaggtcgtcttgtcagtgaagatgtagtcggcctgggacgagatcatgtaggcggcactcgcgttgatggaggcgctcgagaccaccacgggcttggagaagtcgcggatgtaggtgctcatctcctcgccggccgtggccacgccgccgccggagttcacgcgcagcacgaccgccttgatgtgcgggttctgctcggcggcgtccaactggcttttaagcccctcggggcttgaggtggtgccgtcgtactggatggtgccgctgatgttgatgatgcccacggtgtctccggtaaccgtgtcggcccaggagggcgactcgtaggagaaggcccccatggaactggtgaacaccgaggtgcacgacccgatggtggccacccccaagatgagcaccgtcagcacggcggccagaccgacgatccagccgcggcgtttgggctgctgggccggagcggattgggccggcaccgcataggcggcagccggctgggcctgggcctgggccgcataggcaccttgcggctggcccgcataggacgggcgcggctggggggctccgtagccgtagggattcgcttgcggctgcgaggtcgcccgaggggcagctcccggggccgcgggctgggaagcggccggctgcgctggggcagccggcccttgccccgccgacgcaccgcccgaggacggggcgccctcctgcggtgcgccccaggcggcgttctgccattggttctgatcgctcataatgcttctttcgtcgggccggattcgccgggcctacagttccatgccatcgtccgcacgaccctgctgagcctgcatcttcttcgccatgcgcagcaggaactcctggttggagttggtctgcttcagcgacttgatgagcatgtccatggcgcgctcggtggagttcgtgttggccagaatgcggcgcacgccccagatgagcggggcctcctgcggatccatgagcagctcctccttgcgcgtgcccgaggagatggggtcgatggccgggaagatgcggcgatcggccaggtagcggtcgagcttcagctccatgttgccggtgcccttgaactcctcgaagatcacctcgtccatcttcgacccggtctcgatgagggccgaagcgaggatggtgagcgagccgccgttctcgatgttgcgggcggcgccgaggaagcgcttgggcggatagagggccgtggaatcgacgccgccggagaggatgcggccgctcgcgggctgcgccaggttgtaggcgcgggccaagcgcgtgatggagtccagcaggatgacgacatccttcccctgctcgaccaggcgcttggcgcgctcgatgacgagctcggccacctggatgtggttctcggagggcatgtcgaaggtggaggagaccacctccccgcggatggagcgctccatgtcggtcgcctcttcgggacgctcgtcgatgcccaggtacatgaggtgcacgtccgggttgttcgccgtgatggcggcggcgatgtccttgagcacggtggtcttgccggccttgggcggcgacacgatgaggccgcgctggcccttgccgatgggagccgtcagatcgatgacgcgggccgtggtggtgttcttcccgtgctccatgagcaggcgctcgtcggggaacaccggcgtgaggtcggcgaacttcggccgtaaggccatgatctcgggggccatgccgttgacggccgacaccttctgcagggccgcgaacttgtcgttggggcgcgccgggcgcgtcgtgcccgtgaccatgtcgcccttgcgcaggccgttcttgcggatggtggcgagccccacgtagatgtcgttctcgccgggcaggtagccggaggtgcgcaggaagccgtagccgtcgcccatgatgtccagcacgccggtgacctcggtgaagccctcggccttgcagacggcctcgtagatggcgtccaccagctcggccttcttgagcccggcggcgtccacccccgcctcggcggcgcgggcgcgcaggtcgaccaccttgagctctgtcagctcctccttggagacggagggctgaggctcccggttgcgattctcgtggcggttcttcttgttcttcttgccgccctggctgttctgggcgttctgcttgttctggccgttcttgccttggccctggccgttctggccgctttggttctggcggcgctcctcgcggtcgcggcggcggatcaccgtcgtggtggtgcgctcgcggcgaggggcctccttggactcgggggcatcggcgggcgcgggcgcctcggacttgccggcgcccgctgcggacgcctcggcgccctcgggctccttggcctgcggggccttctcctccgcgtcggccgcaggctcggatgccgccttgcgagtgcgggcgcgacgcggcttgggagcctcttcggaagtctcggaagtcgcaggtgctgcgtcggtcgcggcagccatcccctcctccgccgccggctcgggcgtcttgcgggcgcgggtgcggcgcggcttcggcgcctcctcggccgtcggcgcctcggtggctgcgggagatgcggcctcgtcggcgggcttggccgcagcacggcggcgcgtcgtcttcttggccggagcggctggcgcctcggcaccctcggcagccagtgccggtgccggggcctcttccgccttcttgcgcgaacggccgcgcttcggcttctcgggggtcgcctccggggcggccgcttccgtcgtcatcgtctcttgggtatcgctcatgcgttctgcactttctcccagtccgtgaggaacgactcaaggccgcggtcggtcagcggatgctgcacgcatttcttcagaatgccgaagggaaccgtggcgatgtcggcccccatgagagcggcctgggtcacatggttggcgctgcggatggaggcggcgatgatctcgatctgctcgccgtttacggtgtcctcggagaagtcatagttgccgatggcgcgcacgacgtcgtccagctgcgccaggccgtcctcggagatgtcgtcgaagcggcccacgaacggcgagatgtagcgggcgccggcgcgggcggccaaaatggcctggggcacggtgaagcacagcgtcatgttcaccggaatgccctcgtcggccaaagcgcgcgtggcggccaggccctccaccatggtggggatcttcacgacgacgttgggggcaatggcggcgagctcccgtccgtcgcggacgatctcgtcgcgggtcatggccaccgactcggcggacaccgggcaatccggccccacgatgtcgcagatgcgcttgatgtgcgcgtggaaatcgtcgagcttcccgccgatgcgcgagtacagcgtcgggttggtggtcacgccggccaacgcgccccagctggccgcctcttcgatttcggcgaggtcggccgtgtccagaaagaacttcacgttcatcctccttcttgaggtttacaggcaaaggaatgggaatggcgctcgaatcgaccgcggtaaagcgcactacgaacccgaaccgtgagaacgttgaaaatgggcgatacgggactatgggaaggaagtggggcgccattgcgcccaagattcagagctggaaccatagtagcgcaaccgaccgcaccgcacaagaaaaagcacagactgcccgcgactcaactcggaggggagcccatcggcgttccgacggcattccagctcgctcaagccgcccccgctcactcctcttctttgcgaaactccaagtaatcgaggaagcggcgggtggccaggggaaggtggccggcgctgcgataggccacgccgatggtgcggaagaccggatcggacaagggcagcgtgaccacgttttgggacaggccccgcagcataaggcgcgacagcacgctcacgcccatgccgtactccaccatggagagaatggcccgatcgtcccacgaggtgagacgcgtggtagggcgcacgccccatcggatgaggaactccagaagctcgtcgtcggactccgatgccggcgagagcagcggaaattccgcaagacgctccacgggaaacacccccgcgcccgccagctcgtggtcgcgcggaagcacggccagaaactcgtcctcctccaaggcgcgcgcgatgagccgcgcgtccgtgcgcagcgggagcagcacgaagccgcagtccacggtgccgtcggcgatccactcctcgatctcggtgtagtctcctacgcgcagcttgtagtcgatgcccgggtaatcggcgctgaagcgcttgatgatgcgcggaatccaatgggcggccacgctcgggaacacaccgatgcggatgaggccggtctcaagtccccgcacctcgtccacagtggcttccaaggcgcggaagctctcgcagagggcgcgggcctcgggcagaagccgtgcgccatcgccggtcagcaccaccccccggcggctccgctcgaacagcgccacgccccagtcgcgctccaaatcggagaccatgtggcttatgcccgactgggaataggccagcgtctcggccgccttggtgaagctgccggcatcggccacctccacgaaggcctggtacttctggatgttggcgtccacggctcccctctcctcgttgcttcgtgcctcattgcctcatgttatgagaatttctcatgtgaactatgaaatagtttcgcttttcaggggatttgtcaagcgccataatgcagctgcatcaaaaggaagaaggcggcgcgctgagtctgcggggcgcgcgccctgcaccgagaaggagaggcttgccatgcgcacgaagatcgcatcgatgaagtaccttctgtacttcatcgcagccgtcatgatgttcggatcgtcgggcatcgtcgccagcacgctgccgctgtcggccttcgaggtctgcctcatgcgcctcataataggcgcgctgttcatgggcctcatcttcgtcgtcacccgccagcaactgccccggcacatcggccgtcgccagtacctgttcgtggccctctccggcgcctgcctgggccttgccatgatgaccattttcgctgcctaccgcctgcttggcgtgggcctcggcgccgttctggccgccacggccccggtcatcaccatggcgctgtcccctcttctgttcaaagagcacctgcggcttcccgtggtggtcgggttcgccatcgtggtcggcggtctgcttttgctgaatgcgtccgccctggagggcacgctgtcggttcccggcatcctcatgggactcgccgcggccgccggcaccgctggcatggtcatcttcaacaagctcgcccgcgacatcaccggcatcccctgcaccaccatccaacttgccacggcggtggcggtggcccttgccgtggccgcggctggcgagggcttcgccttcatcggccgtattcccttgagctcgtggcccaccgtcattgccctgggcgccgtgttcactgccctggcctacttcctctactaccgggccatcgaccagctgcccatgcagaccgtgtcggtgtgcgcctacgccgagccgctcacggccgtggtgctgggggcgctcgtgctcggcgaggtaatgacgccggtgcagctcgccggcgcctgctgcatcatcggcggcgcgctgctcggcgaggcgcgcgtgaagatgccggccgcccagcgacgccggatgcgccgcgcctacgtgcgcctcgtgcgcgcccagcgccgcgtcctgcaccacgcggcctaggacctgtccggctattcccccagcattgagcgataaaagcaggtgcgctctcccgtgtggcaggcgggaccggccggatgcaccagcgcgagcagggtatcggcgtcgcagtcgtagcgcagatcgaccagcttttgggtgttgccactcgtggcgcccttgtgccacagctcgcgccggctacggctccagaacacggtttcgccgcgctccagcgtgagcgccagcgactcagcgctcatccacgccatcatgagcacctcgcccgtatcggcgtcctgcacgatgcaggggacgagccccgcctcgttgtacttcagctcgggaagattcacctctcctccttagggcagcgtgacgagcatgaccttgatgtcggccttgcggaaggccggacgcatgtactccggatcgcacagctcgggcagcacctgctgcagcgcgaggaagatatcggcggaaggcgcgcgcgaggcgtcctccagcgcgtaaatcgtgcgctccgagatcttcatgcccgtcttctcctccaccgcatcggtgagcttcttgccccgcgagtacccgttggccagccgcgccgccttcagcaacgtcccgtaggcctcccaatcgataacgctgttctccttagccattcaaatctcctattgcacgagagcttacatcgcgttaaaacatgagttgcatgatagttcaactttaacgtaaaggcaagcccctgccctacagccgcacggggatgccggcgtcacgcatggattcctttacttggcgcacggtgagctcgccgaagtggaagacgctggcggcgagcacggcgtcggcctcgccctcgatgatgccctcggcgaagtgctcgagcttgcccacgccgccgctggcgatgacggggatgtccacggcccgggccacggagcgcgtcaggtgacagtcgaagccgtcgcggctgccgtcgcgatccatggaggtgagcaggatctcccccgccccgcgccgagccgcctcgcgagcccattcgatggcgtcgatatgggtgttcttgcggccaccggccacgtagacctcccacttgttgggattgccgggcaccgctttcgcgtcgatggcgcacagaatcgcctgagtgccgaaggcccgggccgcatcggtgatgagctgagggttcgccacggccgccgagttcaccgacaccttgtcggcgccggcggcgatcatcttgcgaatatcggccacgctgcggaagccgccgcccacgcagtatgggaggtgcagctcggccgaggcgtggctcgcgagctccaccgtggtggcgcggtcgtcgctcgtggcggtgatgtccaagaagatcacctcgtcggccttctgctcgtcgtaggcacgggccagctcgatggggtcgcccgcatcgcgcagccccacgaagttcacgcccttcacgacgcggccgtcctttacgtccaggcaggggattactctctttgtcagcatcttttgtcaacctgtccgtcagcgaaccagacggtattgcgattcgctcagacagtcctcgctggtatcgaaggcgtcagggctaaccgctccccatcgtttatcgccttcgataccatctgcggaactcgctcggtcgcaacaccgtctgtttcgccgactactctcactctctcgataagattcgctcggtcaaggcacccgacgtcgcccgggctgctcttccttgcttgctagctttccaactcttcgatggttagggggcgctcctcctcttccagccgatcggacaggtggaaggtgccgtcgcacgccgcgacgccgtcggccacggtaagggtgccctcgtagatggcccgaccggtaatgacgccctccacggcgtcggcgatgggagccagcgcccggatgtcagccgcggtggcaatgccgccggaaacgatgaccgggttgccgaaggcggcggccatcttcgcgtaggcgtcgttctccacgccggtctgcatgccgtcgcgggcaatgtcggtgtagacgaggtgctcgtaccccatcgccgccatgcggcgggccaggtcggcggcagccacgcccgagccctccgtccagccggccacggcggcctcgccggccttcgcatcgatgccggcaaccagggcatcggggccgaacttctctatgaccgcctgggcgaaatcggggtcgcgcacgagcgcggtgcctagaataacccgggttgcaccggcgtcgagcaggcgatcggcagcctcgagcgagcgcacgccgccgcctacctccactttcaggctcgtgcgcgccaaaatcgcgcgcaccacttccaggttgtcgggattgccggacttcgcgccatccagatcgaccacatgaagccacgtcgcaccggcctcctcgaacagctgggcctgatacgccggatcgtcgttgtacacggtgacggcatcgtagtctcccttggccagacgcaccgcgcgcccgtccaaaagatcgatggcaggaagaaggtacatggctactcctttgacgcgacggggttttccgccaccttatcagcgtgcgcgctgtcggcgcgcgcggctcgtgcaatggttgcgaagttggcaagcaggcgcgcgcccgcatccgagctcttctccggatggaactgcacgccgaagacggggcggcccggcacctgcacggcgcaggggaaggtcaccgagtgcaccgtctcggcaatggtggccgcgctcggcggcgccacgaagctgtgggtgaagtagaaaaactcgccgggcgcaattccgtcgaacagcgaattcggctcggaaaactccacggagttccatcccacatggggcactttgtaggcgcggccggcagcgtcggtgcggggcatggcgtccaccacgccctcgatgaagccgaggccgcgcggcagcgaaccgtcaacgggcgcgtgctcggtgcccgcctcgaacatgaggtgcatccctaagcagatgcccaaaaacggcgcaccgccggccaccgccgcgcgcaccgcctccatctggcccatctcctccatggacgcggcggcatcggcgaaggcccccacgccgggcagcaccacggcgtcggccgcgcggatgacatccgccttatcggtcacgacgacgtctgcccccgcgcctacaagtccccgctccaccgagagcaggttccccttgtgatagtcgacaatgacgatgctcacagaacccccttcgtggaaggaaccgcgccgcccaaagccgggtcgacggccacggcctggcgcagggcgcgacctgccgccttgaaggcggcctcgaagatgtggtgcacgttgtcgccggcgagctgccggatgtgcagggtgatgcccgcgttggccgcgagcgcgatgaagaactcccgggcgagctgggtgtcgaaatcgcccaccatgccgaagggcgcctccacatcccagtgcagctgcccacgcccggagatatccagggccgccagcaccagcgcctcgtccatcggcacgaacgcgctgccgaaccgctcgatgccggccttctctcccaaggcctcggccaaagcgcgccccagcacgatgcccgtgtcctccaccgtgtggtggccgtccacatgcaagtcgccgcgcaccgacaccttcagatcgaagcggccgtgacgcgcgaaggcgcacagcatgtggtcgaagaacccgatgccgcttgccacgtccgcgcgtcccgcgccgtccaggttcaccgtgacctcgatgcgcgtctccgccgtctcgcggaggatggtggcctctctcgtcattgctctccttccctattgcatagcccgcgcgcgccgctcgcggctctcggacagaaagtcgcgcagcccgcggatgaacgcgtcgttctgctccggcgtgccgatggtcgcccgcagacagccctcgagcatgggggcgctgctgaaatcgcgcacgagcacgccgcggtcgtacaggtactgccaggccgccccggcatcttccatcgagaacaggatccagttggaatccgacgggtaggcggtcacgccgggcagggtgcgcagcgcctccatgacgcggccccgctcctcgatgatctcgcggatgcccggctcgaagcgggcgcggttctcgaagaccacctctcctatggcctgggagacggcgtccacggaatagggctggcgcaccttgcacagctcctcgacgaccggcgcgttcgccaaaacgtagcccagacgcacgcccgccagcgagaacgccttcgagaacgtgcgcaggatggcgagattctcatgggtcgccagcaaggggcgcaccgtggcgcgcgagaactcgaagtaggcctcgtccaccagcacgagcgcatcggtggcgtcgagcagctcttcgatgaacgccgtggacgccctctggcccgtggggttgttcgggctcgtcacgatgacgaaatcgatgtcgccctttcccacgcgctcaagcaccgccgcttcgtcgatggagaagtcggcccgacgcggcacatccacgcagcgggtgttcgtgagccgtgcgttggccgcgtacaccgagaaggtcgggggcaggttcaggaagctgcgccccggtccgccccaagcgagggccacatcgaacaaaagctcgtcgccgccgttgcccagaaggacattggcgcggtcgagcccgttggcctcggcgatgaggtcgcgcaggcggttggccagaggatcgggatagcggttcaggggcacctgggcaatgcggcgcgcgatggcggcgcgcacctcggcgtccacgtcgcgcggattctcgttggccgacaggtacgcctcggccggcaggtacttcgggtcgtagggaacgagcccctcaagctggggcgccgacgcgcgaaccttattcaccgcgcgcctcgccatcttccacgcccgccgccgccgagccggccacgctcgcctgctcggcgtccagcagcgccttaagacgcagggccaccgagcgggcatgggcccacagcccctcgtgggtggcgatctgtaccacggcgcgcgcgtcgttcttcagggccgcggggctgtactggatgatggaggacttcttcacgaagtcgtccacggaaagcggcgaggagtagcgggccgtgccgccggtgggcagcgtgtggttggggccggccacgtaatcgcccacggcctccggcgtccacgcgcccaagaagatggcgccggcgttgcggatggctcccagatactccatggcgccctccacgtgcatctccaaatgctcgggcgcgatgacgttcaccgcctccagggcctgatccatggaagtgcacacgacgatgagcccgtgatcgtcaagggaggtgcgggtgatgtcggcgcgggtggaatcggccaggtgcacctggatggccgcctccaccgcgtcggcataggcgtccgagaaggtgacgaggtagcaggccgccaaaggatcgtgctcggcctgggccatgagatcgatggccaccagccgcgggtcggccgtctcgtcggccacgacgcagacctccgacggcccggcgatcatatcgatgcccacatcgcccgagacgagcttcttggccgcggccacgaaggcgttgcccgggccggtgatcttggccaccgggcggatggtctcggtgccgtaggccagcgccgccacggcctgggcgccgccgacggtgtagatctcggtgacgccggcgatcttgcaagcggcgaggatggccgcatccagcgtgccgtccttggtgggcggcgtcacgcagacgatgcgctccacgccggccacctgggcgggcagggcgttcatgagcaccgttgaggggtacagcgcccgtcctccgggcacgtagatgcccacggattcgagcggcgtcaccttcgagcccacgatggccccgtcctcgcgggcgaaaaaccagctctgctgcttctggcgctcgtggaagtcgcggatctgggccgcggcgtgcttcagggcctcgagggtgtccggatccacttccgccatcgcggcgtcgatggcctcgcccggcacgcggaagttctcgatggccacgccgtcgaacttctcggtaagcgcgcgcagggccgcgtcgccgtcccggcgcacctgctcgatgatggcggtggccgcctcaagggcgccggggttgaaggcgccggtacggtcgatgaagtcgctcgtgaagggctcgaggggttgcaggtcgattcgtctcatggtcatggggcgcactccttaggacagggtcggttgaacagggttggaagcgccggcgatgggcgcgtaagtgtgcttgggggcattttcggcgaacacgcgggccagcgccacgatgcgctcgtcggtgcgcagggcgcagccgttggcgaagaagcgggccgtggaggcgagcacctcttccacgatctccaggttgttctcgcgcagggtggttcccgtggcggtgatgtcgacgatgcgctcggccatgccggtgatgggcgccagctcgatgttgccgtgcaggtagacgatctccacctgggtgccggtgcgcgcgaagtgggcacgggtgatggaagggtacttcgtggcgatgcgtatgctgccgagcttgcggtagcgctcctcgatggccgcgctcgtgccggccgactccgccacgacgaagcggcaaccgccgaagcgcagatcgaccagctcctccacggcagcgcccacttccaaaagcgagtccttgccgcagatgccgcagtcggcggcgcccagggccacgaagacgggggcatcggagggccgcacgatgatgtagtcgaccccggggttggagatgacgagcgcgcgcccggggttggcaagccccgtcacatcgaggccggcctcttccaaacaggcgatggcctcggcattcagggagcccttgggcacggcgatgcgcagcgggcgcgcgtctgcgggcgccgcgtccacttcggcagaggcagcggccatggcctgctccagcgagaaggcgaagcccgcggcggggcgatcggccccgaaggcgcctatcatgcggtcgtagcggccgccggagcccagaggcgagcccagatagggcgagcaggcctcgaagacgaggcccgtgtagtagttgaaggagctggccaccgagaagtcgacgagcacggagtcggccaggccggcctcgcccagaagatcgtaggtggcctggaagtcgtccaggtcggccacgcacccgagcggggtcacgagcgcgcgcaccgcgtcgatggcgtcctgggcgccccggatgcgcgcgagctgacggatggcctcggtgtaggcgggcgcggcagcccccgcatcgacggcctccccttccacggcgcgtcccatggcggcgtcgcacaaacggtcgagggccacgaagtcggagccgtgataggcatccagcaccgcggccttccacggctcggcggcccccgagcgctcgagcagggcccggagcacccctaccgtggccatggcgagcacgaactgcgtcgctccggccagccgcagtgcctcggcgaacagcgcgacgatctcggcatcggccgccggccccacttccccgatgcactccacgccgcactgggtgagctcgcgggcctgcacctggttctccgtctcggcctcgcgaaagacccgctgggtgtagcggaagcgcaaggggccggggacgttggccaggcgcgtggcgcacatgcgcgcgatctgcagggtgacgtccgggcgcatggccagaaggtcgccccgggagtcgaagaacttgaagggagtggccggcacccgtccgccggcccgcaggacgtccatcacctccagggtgggcgtctcgatgggcacgtagccgcgagaggcgaacaggtcggccacggcccgggtgatggcctcgcggacgcgcgcctcctcggagagcacgtcgcggaagcccgatggtgtcacagcgttcaacgcacattcctcactggcgcaaacgacacgcgaacggcccaagacctgtgacccggcatacatgcagccggagctttcgccctggctcgcagtcagccgaggccatcgcctgactcgtctcgtcgcaagcgccttcgattaccgagattgtcatgttacacgccctctcccctcccggcgcaccgggacggcaaacggcgaattatcgacagagttcccgcgcaaagaacgcacgaggatctcgcatcgatgttagtactttatcacagtagagtgctaaagcaatgggattttcgcctacggttggaattactccgcaggctcgatgatcatggcgcggaggatgccgggagtgtcgtaggcgcgtttgccggcgcccatgccgatggccttgatggagaagcgctcgggaagggcggcttccgtgcgcagagcggcggccgcggcggcgcccgtgggggtgacgagctctccttccacgtccaccggggaaagcgtcaatccggcagcttcggcgatgaacgccgtggccggggcgggcacggggatgaggccgtgctggcagcgcaccgtgccgtacccgcagggcagatcggacacgacaacgccgtcgggcgccaagtcgtcggccgccacggcgatggcaataatgtcggcgatggaatccacggcgcccacctcgtggaagtgaacttccccaacaggtacgccatgagcccgcgcctcggcgtcggccacgaagccgaacatgcggtgcgcgatggccttggcgccgtcggccatggcggcaccgtcgatgatctgcgctatttccgcaggaccgcggtggtggtggccaccgggggcaccgtgggcatggtcgtgatcgtgggcgtgaccatggtcatggtcgtggccgtgctcgcttgcgcccccctgcccgtgcaggtaggccatatcgtggtcgtggttctcgtgggcggcatccagcacgacgctgaagtcgcagacgtccaagcccgacttcttcacccgggatatctccacagcgaaaccttccacaggcaggctctccagcgcccggcgcaccgcttcctcgctcgcacctgcatccagcagggccgccgcgcacatgtcgccgctgataccggaggtgcattccaagtagagaagtttcgtcattgcatcgcctttcatgatggtgccgccctcgaggcgcccgcgttcggcgggaaccgccgcaggtttatccctgtcgggaattcaagtgattgatggcgcttgcctggaaggcggcgccgaagccgttgtcgatgttgaccaccgacacgccgctcgcacacgagttcaacatggcgagcagggcggtcacgccgccgaacgaggcgccgtagcccaccgaggtgggcaccgcgatcaccggcgcggagacgagaccccccaccacggaggcgagcgcgccctccatgccggccaccgccaccacgactcgggccgcgcgcagctcgtcggccacatccaagagtcgatggatgcccgccacgcccacatcgtagaagcgccgcacctcgttgccgaggaactccgcggtgagcgccgcctcctcggccacgggcagatcgctcgtgccggcgcaggcgatggccaccactccgtccccgtcgggcgcgggcatgccgccgaacacgacgagccgcgccgtctcgtagtaggcgcacgggacgatcccgccgtcgtcgccccatagagcggccacggcatcggccttcttcgcgtccacgcgggtcgccaaaacgcgcggttgaccggcgcccatgagcgacgaggcgatggcggcgatctgctcggcggtctttccctcgccgtaaatcacctcgccggcgccctgtcgcatcgcacggtcgtagtcgggccgcgcaaacgcggctccgccgcaaaggctctcagaattctcgctctggtgaaaggccacggccaccccgctttccgacgaacgccctcactcgttctcagttggtttctcggaaagccatgataaatgttggagtcagctccaataaaagactcgagggcaacgcccacggaacaaacgcattcgcggcggttactcccccgtgcgcagagtccgctcggtggccgtcatgacctcgtcgtagtgctcgatcttgtactcgagccgcgccaaggcccgctccaggccggcaatgcgctcccggatctcgtcgccctgcctcaaaagaagctccttgcgggccgccgtcgtctcgtcgccctgctccagaagctccatgtactccaccaaagactcgatggacatgccggcatcgcgcatgcatttgacgaactcgacggcattgcagctggcctcgtcgtaatcgcgaatgccgctcttgttgcgaggcacatggcgcaacaggccaatgcgctcgtaatagcgcagcgtgtcggtggaaacaccgtagcgcttgctgacttccgcaatcttcatgccgtcccctttgaaacgcgccgctgcgcatctcacgttcgcgcagcctgcgtgtccattagaccatatggagtatgctataagtcaatagatcaaaataatatcccacggaaaagccccgcacacagcccatttttaccgttcgtcaacgctttgggaaagggcctttttgagcacgcgcaaggcatttccccgatgagatatgccgttcttctcggcctgggagacctcggccagcgcccgcatgccgccgtactcgtcgggcaaaaacagcgggtcgtagccgaagccctcgctgccgcggggttcgcgcccgatggaaccctcgatggtgccgcgggccaccgattccgtgccgtcctcgtcgatgaacacgagcgtgcacacgaaccgcgccgtgcgctcggcgtccggcacggcggcaagctcggccagaagcttcgcgttgttggccgcatcgtccccgtcgggtcccgcgtagcgcgccgagaagacccccggcgcgccgtccagggcgtccacctccaaaccggagtcgtcggcgagcaccgccacaaagcgccccagcgactcccgtgccgccgcacgcgccgcccgggccttgatgcgggcgttgccctcgaagctgtcggcgtcctcggccggatctgatgtcacccccgcctcggccagcgtcgtgaacgtccagccctcgaagttcagggccgtgcggatctcctccaccttgcgggcgttgttcgtggcgatgagcacttccttcacgggctcctccttgcagacgggcacctcgccggtgcgggcagttgcttacagtgcgggcagatccacgtgcgcgacgacgtccatggggcgggcgagcacgcggccgccgaagcgccggaactcctccacgtcgtcggccgtggtgaaaaacgagtggacgggcacgttgcccgagcgggcgtgggcgcggcgccggcgcaggatgtgatcgacgtcgcgggccgtctcgtcggccgagttcaccagcgtgactttgcgccccaccacgcccccgatgagcgccttcagaagcggatagtgggtgcagcccaaaacgagcgtgtcgatgtcgcagcggcgcagcggctccaggtactgccgggcgatgtcctcgaactccgggcggatgtagaccttggtggtgtcggccatgtagtcctcaatgggcccgtcggagagcttcagccccatctcggcgatctccacgaaccgaggcgtcgccgtggagaacacggtgatgccggcgtcgatgtggcgtatggcgtcgctgtaggcgttggaatccacggtgcccttggtggcgatgacccccacgcgccggttgagcgtcgtatgggccgccgcccgggcgcccggctccaccacgccgacgacgggcacggagaagttctcctgggcatgggcgaggccggcggccgtggccgtgttgcaggcgatgacgatcatcttcacgtcccggccgacgagccacgtgcagatctgctgcacgaagccgtccacctcggcctgatcgcggggcccataggggcagcgcgccgagtcgccgaagtataggatggactcctccggcaggcgcttctgcagcgcgcgggccaccgtgaggcccccgtagccggaatcgaacaccccgatggggcggttgtcgaaatgctccgtatccacagcgccctactcgtgcacgacgacgacgtcgcccaccgacagaagcccgtggagctcttcggccttatcgggaggcaggttgatgcagccgtggctgccgtgctcgacgtaccagtcgccgccgaacttctcctgccaacccgcgtcgtggaagcccacggagttgtccttgaagggcatccagaactccacctcggtctcgtagtccttggtgccgtcgggcttgtagccgcgcagcaccgacttgccgtcgttggtcttgatgtagtaggtgccctggggcgtgtcgcgcccgtcggcgggcttgccgctgacgatatcgctctcccagataatggcgccgtcctcgccgtagaagcgcgcgtgctgctcggtgagatccacgtcaatgtagcgggtgccgaagtcgcggccgccctcgtcgggggtctgggccgcgttctgcttcatgatgatctccagcgtgccgcccgccccggaggtgagcgcctcgcgcacggcgtcggcggtggcctggctgtcggtgatccagccgtagtcgccgcccttcaccgtgacggccttgccgtcgggacgcgtgaacgtgcgggtagcgcccgtggtgtccatggcgttcaccttctccttcaccgccgccaccaaaggctcagggtcgaaggtcacggagagatcgtcgcccaaggtgatgtgctcggcgatctcgtcggcggtgatggccatcttctcggcgcccgccatggtgagggaaagcgccccgccgaggtacttgttggccgcatcgcgcgcctcggccagcgcggggtcgtcgcgcgtcaccgtgggcttggccagcacggcgtcggagagcgtcaccttcggcgcgaagttcaccgtgccccgcgtcacctcgtcgatgacgacgtcggccaaaagggtgttgccctcctcctcgggcacgacgacatagccgccctcgtcggcgtcataggccacggtggcgttcttgggagcggtgccgcgggcgttggcctcctccacggcggcggtcagcgtgtcggccagcttcgagttctccagagtggagaccaagtcatcggtgtcgtcgtggcgctgaaacacctcgtagggccacgcccaggggttcatctcggccagaaggccgtcggcgatagattggctgtcgagcgccatgcccatgtccgtggcgtccagcgtgagggaaagacccgggccctccaccttgaaggtgtagtcgcccagcacctcgtcgagcatctgatggacctcttcgggcgtcttgccggagatgtccatgccgatgatggtggactgcgggaagaagcgcccggagaacacgatgacgccggcgaagtagacaagggcgatggcgcctagaatggaggccatcacgatgccgaagatcttgagcccccgatgcttcttgggcggccgggcattcacctggtagccgggcacgtagccgccggacgtcgggcccatggggggcacgacgggcatggcgccggtgccgctgattgcggggcgcgaaggctgagggggcatcgcggcggttccctggtcgtgctggggcggcatcgcgcccgtggcctggggccccacgggcctcggcgcgccgaagcggccctcgggcatgacgaaaccgcgggtcgcgcttgcgcccgcttcggaaattcgattgtcagatgtgctgtgtcgtggcatagtgcgcttccgtggtgcgattcaacttactttggggccgccgcgcaagtcggcggatgcgccttaggcccattataagccaaggagcccgcggccgtcggcggatacgtcgttcggcgctactttcccacagaccgcgccccgcgcgccaccctgcacgccattccccacgactcccccacagaacttaaaggattttcagcc

SEQ ID NO: 10523 - DNA, 10243 bp, Unknown
  gut microbiota DNA sequence
acatcggcacctccgagggctggctctacctggcagccgtcatcgacgcatggcaccgcaaggtcgtcggctggtctatgtccgagcgcatcaccgagaaactcgtggtggatgcgctcgagcaggcggtcggcagggaggatccccctgccgacttcagcctcgtgttccatgacgatcagggcgtccagtacacgtcccgcgcattccagcgctgcctggagtcccatgggatagcccaatcgatgtcgaggcccggcaacccatgggacaacgcgctcgccgaatccttcttcaagaccctgaagcgggagctggtgaagggaagggagtacaagacaagagacgaggcgcggcaggatatcttcaagtacatcgagctctactacaacaggcagaggatgcattccgccattggctacaatgctccttgcgacttagagcgcgaagcagcctaaagattcttaaataattgtccaagaagtcttgaccactccaaggtgcctagaggcacggaaaaacgtccgcatcccccaatgtctggaatgatgtcgactctgacggtgtcatgcaagaggatgaggagcgcattcctggcaccgtcgtccgcctgcagcgctactggtacgacgagaccggcgccggctactgggacgtggagcctggcgacggcagctataaggattccggcctgaccgaggaggaatacagcgagatcgtcaagctgtgtgccgatttggctcgcacgtgggatgtcaagaacgatgaaggaaagacatccgatactcctagcggaggaactgacgcaggtaagacgaagggtgccaatgataccgaggaaggcgacgagcttacctacgaggctgccgtgtctgaaatgctcgcatacctgaatggcatcgagagcgacatcgaaagtcttgcggatgccaccagcgaagagaaatatgagggctaccacaaggctaactggaagcttgacgctctgcgaaaggaggagaaggctcacaagatcactattaacgccgttgtgaacaacgataccggtgaacacgagctatacaatgcgttcgaggcttgcgccgctctgcttgacgaacacacgcctgatgccgagcgtggtgtctggcgtcgcgactggacgttcacccaggatgaagtctatggtttgaagggtgttcatgatttaagcagggagaacctgggctggcatgattacgatcctctgaccgagcgcgaggcattcgctttggccgacgagagtgatatccgcactcggtgggccagcgcggatgagcctagctatccctatgcgcctggctgcgcgttcgacgtgactgacgagaatggctactgggaattcatgtcctatggtaccggcgagcatcaggcactgggcgagccgttcaaggttctgttctcctacaaggccgagatcgtgagctacccggatgccgatgtgtgggcgcctacgctgcaacatgtggacgatacagtgaacgattgggtgaactccgacttcgacgacgacacccagggcctgcggccgaatgtgaaggatcagctgcatgccggcgacttcgtgctgccgtcgcttctggaagaggcgggcaagaaggccggcgacctcattatcctgagccgcccggccacctccaccgagtcgtcgcacacctccggtgcctacgtcaactacggggatgcgcccgaggagcccgaagagccggttgagcccatcgagcccatcgatccgaccgacccctgcgagcatgaggatctgctcactaagggcgaggacggtgccatgaccgacggcgctgacggcttctgcgacaagtgcggcgattgcctgcatgagaaggattccgagacgggcctgtgcgccgatcccgactgcgaccacgcaggcccgtgctgcaagggtgagccgactccgggcgctgacgtcaacgtgaacccgggcgaggaggagacgttctcgacccaggtgtttactgcggcggcagcagccgcctcggctgctgccttcgcggccgacgccacgaccggtgctggcgccaacacgaagccgacctatcccgagagcttcatcaaggaagtgacggattggctcgacacggccacgatggacgatctcgagaacatgagcgacgggtaccgactggcgatcttcggcaaccagaagaagaacgcggccggcgaattgctctacctcgacgagaacgacgccgagaagacggtgaccgatggcggcgatccgacccgtccggtctacgatggcaccggcgaccctgagctcttcgatgcctacgaggcgcgctacgccgagctgactggcgacaacctctggtccgatttgaactggaagagttcgctggcccacggctacggcctgttccgcatcgcccaggcgcacatcgccggtgtggtatggcaggacgacaactacaacggcatccaggacgccggcgagaacgtgcgcatcccgaacgtgccggtgagcctgaagcgctactggttcggcaccgatgcgacgggcaccggctggcatctggacgagacgttcagccagactaccgtgtcggacggtcagggccactggatcttcgacaacctggacgtcgccggcaagcgcatggtgggcggcaaggagaccacggtgctctacggtttcgaggtgacggtggacgacctgccgaagggctacggcgtcacccacatgaaccgcgggaccgccaccaccgactccgacctgaacgaggacaccaagctcatcgagccgggcgatccgcagggcggtctcatcgtgctggcccagccttccgaccgtcgtgatctggtgggcaacggtgccgcctacatcctggggccgaatggcaccgtgtgggtgatctcgctgtccgaggattccgactacaacgacacgggtctggtgccctacgcgctcgcggccatcgccggcgtggtcttcgacgacccggaggccgacggcctgcaggacgagacggccgttgcggtgcccgggcagaaggtctacctcgaccgcatggtcatcgacgtggacgccgtcggcttcaacggcgcctcctacgcccccacggccctcgcggccgtcgagggccagaaggtgcgctccgacgacggctgggccgaggtggcctccatggagaccgacgtcgacggcgcctaccgcttcgacggcctgcccatggtggacggcaatgacaagccctacctgtaccgcgtccgctcctacatgcccgacggcaaggagtgggtggccatcaacgccggctccgacgagaacaacgactccgactggggcgaggcggccaactccgtgatcggcgccggcggccgggtcggcatcacgccggccatgtccgtgctcggcgcgttccagacggtacgcacgacgcccaacgcctacggccagaagttcaacctgctggtgccctacaactgggtgccggaggacgggtgctcggtcgacctcggcatgaccggcgacgccgacgcgtggcgcaccctcgtgttcacgacgccgtggggcacccgcctgttctacgtgaagctcccgcagaccggcgacgagctcctgccgtggatggtggggctggccctggtcgcggccctcggcctcgttctcgccgtggccgcccgccggcgcgacgatgacgacgaggaggaagaagagacccctgaggagtaggggagaccgccggggcggacggagcgccctccgccccggcacctgagacctttccgagtaggcagactgcttcgcggaaccctgattacccgcgaagccacctgccgaagcccgccggccgccgccgcttatgcgcgcggcggtggccggcacatcatatatgccatctccgatgaagcagacggccccgtggaatcctgattacccacggggccacctgctatttaggggttgtgaaatcgggggaagggtctttcaaaaatctgtgagtcgattatcataggcgtcatgttttctcgcgagcacatactttcggcgttctccgccgccgttcccatcatgctgggctatgtggccattggccttccctgcggtatcttggggaacaccatcgggctgaatcccttgcaggtggcgctcctgtccatccttctgtactcgggcgccgggcagttcatgatccccaacatgttcctcgccggctcttcggtggcggccatcacggcatcggtgtccctcgtgaacacgcgccagatgctctacgccgcctccttcgcgccccagtgcgcgacaagcccccggtggctttcggccctgttcgccgcgtcggtgaccgacgagtcctacggcgtgaacacggcgcgtttcgccgagggcaactggtcggtggaccgggcgctcatggtgaacctgttctcccagagttcttggacgatctcgaacatcgtgggctgcgcggtgggggcggccgtcgacatccccgtgcccatcgccgccttcgccatgacggccatcttcatctgcctgctcgtcacccagaagttcacctccgccaatatcgtcgccgtgatcgtggcgatgctcggcgtgtacctgtgcaaggcgttcggcctcaccgggccggccatcctcatcggtgccgtcgccggcgtcgtgtgcgccctggcattctcggcgctgttcccgcgccgtcccgtcacggcaagcgctcccggtactgatcccgtagggggcgaccttggtcgcccctcctcgagtggggacacctcgcctgatgagggcggtgagcgccgatgagctgggagcagttctggttcgttctcgtcgggtgcgtgctggccatgtgggcctgccgcgtcatcccgctgtttctgctgaagggccgcgagctgcccccgcgcctcgcccaggccctcggcttcatcccgcccgcggcgtttgcggcgctcgtggccaacgacctcctgaaccccggcatgttcgacgcgggcgtgtggccggcggccatcccgctcgtggccgctgtggcatcggcgctcgtggccgtgaagaccaagtcgcttctgtggaccgccgtggccggcgtggccgtctacgcggcgctcgccttctttgcggtgtaggggaggggcagccttgggcgtgatccggtttctcgggcagcacaagggggcggtggcgctcgtcatgctgcttctgctcctgaaggccggctgcgagctggccatcccggtgctcacctcgcagatcgtcgatgtgggcatcgcccagtcgggcgtggaggacctcgacgtccttgcgggctacaaggccgccggcgtcgatctgttccccatccagatggcctatctcctgcgcatcggcggcctcatgctgctcgccgccgccggctccatggtgctcgatgtggccgccggcttcgtgtcgacccgcaccggcgccaagatcggccgcgacttgcgccggcgcctgttcgcgcgggtggtggccttctccgatgccgagatcaaccagttctcggcggcctcgctcatcacgcgcggcaccaacgatgtcaccctcatccagaacgtgtgcaccatggtgatgcgcatggtgctctacgcccccatcctcgccatcggcggcgtggtcatggtcatggtcaccaacccccagttggggtggatcgtcgtgctcgccgtggccatggtcttcgcggtcatcgccgttctgttccgcttcacgctgccgcggttcaaaatcatgcagacgctcatcgatcgcgtgaacctcgtggcccgcgagatgctgaacggcctgtcggtggtgcgcgccttcaaccgcgagggcttcgaggagaaccgcttcgacgccgcctcgcgcaagctgcgtgatacccagctgttcaccaaccgcgccatggccttcatgatgcccaccatgatgctcgtgatgaacctcacctcggtggccatcgtgtggttcggcgctcagggcgtggccgcgggcaccatgcagaccggcgatctcatcgcgttcatcacctacgccatggtcatcatcatgggctgcctcatcatggggatggtgtccatcatgctgccccgcgccgacgtggccgcccagcgcctgagcgaggtgctcgcgaccgagcccaccgtccgcgatcccgaggcgccgactcgcgtgcgatccgatgccgcagcgggcgcgcgcatcactttcgacgacgtctccttccgctacaccgacgacggcgacccggcgctctcccacgtgtcgttcacggccgagcccggcaccacgctggccatcgtaggccccaccggttcgggcaaatccaccatcgtgaagctcatcgagcgcttctacgacccgacggagggctctgtcaccctcgacggcgtcgatctgcgcgcgctttcccaggccgacctgcgggcgtgcttcggctatgtgccccagaaggccttcctgttcgagggcacggtggaaagcaacatcgcctacggagacgagagcgccgacgaggcggccatccgcggcgcccttgaggtggcctgcgccctggatttcgtggaagcgcgcgagggaggcctttccgctcccatcgcccagggaggcgacaacgtctccggcggccagcgccagcggctttccatggcccgcgccctcgtgcggcggccgcgcgcctacctgttcgacgactgcttctcggcgctcgactacgccacggacgcccgcgtgcgcgccgcgctgcccgcctgggccgccggttccaccgtgattatcgtggcccagcgcatctccacggtgcttgcggccgatcgcatcgtggtgctcgacgaggggcgcgtcgccggcgtgggcacccatgccgagctcatggagagctgccccgagtaccgcgaaatcgccctgtcgcagctttccgaggaagaacttgtggaagggggtgcgcgatgagcgggcatccctccttcattcccaaggccggcggcggctctcggcggagcctcggcggccacggccacgggcacggccccggcggccatggcccggcggcccgcatgatgggcggcgagaaggcgctggccttcggccccaccatgaagcggatgctctccttcatggggcagttcaagggccggcttctgctcgtgctcctgttcgccatcgcttccaccgcgttttccatcgtggggcccaaggtgctctccgaggccaccacggtgctcttcgacggcgctgtggcctccgcagccggcaccggctcgatcgatttcgacgccatcggccgcatccttctggcgacgctggccctgtacctgctgtcggcggcgtgctcgtgggtgcagtcctgggtcatgagctacatctcgcagcagacgtgctaccggctgcgcgacgccattgcgaaaaagatcgaccgcgttcccttcgggtatttcgagaagacctccacgggcgataccctctcgcgcatcaccaacgacgtggacacgctgggccagagcctcaatcagggcatcacccaggccatcacctcggcggtcacggtggtgggcgtgcttgtcatgatgctctccatcaactggatcatgacgctcgtggccctggtcatggtgccggtttccatggcgctcgtggcggtggtggtgaggctctcacagaagcacttcgtggcccagcagcgcctgctcggcgcgctgaacggccgtgtggaggagacgttctcgggccatgccgtcgtgcgcgccttcgggcgggaggacgagaccgtgcgcgcctacgaggccgacaacgaggcgctctacaacgccggctggaaggcgcagttcctctctggcctcatgatgccggtgctcgggttcgtggggaatctggggtatgtggccgtcgccgtcaccggcgcgttcttcgccgtggcgggcactatcacggtaggcgacatccaggccttcgtccagtacgtgaagaacttcacgcagcccatcacccagctggcccagatctccaacgtgctgcagtccctggccgcggcggccgagcgcatcttcgccttcctcgatctgcccgaggtgccgaaagaggcttccgccgtggatcccgcggcgctttccaccgacgtggaattcgacggcgtgcgcttcggctacgcgcccgatgcgcccgtcatccgcaacttctccgctcgcgtggccgccgggcaaaccgtggccatcgtcggccccacgggcgccggcaagaccaccatggtgaagctgctcatgcgcttctacgacgtggacgcgggcgccatccgtatcggcggcgccgacatccgcgagctttcccgccccgatgtgcggaatctgttcgccatggtgctgcaggatacgtggctgttctccggcaccgtgcgcgagaacatccgctacgggcggcttaatgccaacgatggggaagtagaggcggccgcgcgcgaggcctgcgccgaccatttcatccgcatgctgcccggcggctacgacttcgagatcaacgaggacgcgagcaacttgagccagggccagcgccagctcatcaccattgcccgggcccttctggccgaccgccgcatgctcattctggacgaggccacctcctcggtggacacgcgcaccgagctgcgcatccaagaggccatggatcggctcatggcgggacgcacgtccttcgtcatcgcgcataggctctccaccatccgcgcggccgatctcatcttggttatgcgcgacggcgacatcgtggagcagggcagccacgaggagctgctcgccgcgggcggtttctacgccgaactgtacaactcccagttcgcctcctgcaacgaccgcttcgaggagtagcctctccctcctcccgtaacctcttcgtaggcgctggcccatccgtaggggcagaccttggtctgccctccgcaagcgaggccaccgcacctgaacagggacgatcatggtcgccccctacgggagcaggcgcgaagccgttcttcgacgagacggctccattccttcaattccgtaaaagtttcctgcagaaacgtcgcaggacgggcggggtcgtgccgggtcggctatcataggcgaggcaaattttgacgaacctgaccgcacagctggaggacgagcgagtgattatgccccaggcgagcacctatgtgagaattcccgacgacgcggcttttcgcggcgagaccgggccgcttcccgccggggtgcgtcgcgtgacccccgacgccttgggcgccgtccgactcatggacgggccgattgcgcgcaacgccgaggggaaagtccaggtggcggccttcgatttcgatggcacgtgcatccagggcaactcgccggtcatgctcgtacgctatctggtgcgccggcgcatgctgtcgccctcggtggtggcccgcattctcagctgggccttcgcctacaagacgcgcctgccccagaacgaggcctgggtgcgggggctggtgttccgcgcgttcgcggggcggccggtcgcggaggtgaacgggtttctgcgcgacttctacgaccaggtcatcgaccggcgttttcgcgccgatgccgaggccgagatggcggcccacgaggaggcggggcatgccgtggtgtgcgtgtcggccaccttcgagcccatcatcgccgcggccatggagcgccgccccatccagtacgccatcgccacgcgcatgagggtcgacttccagggcaactacaccgacgaggtggagggcgagcccatcgagggctccgagaaggtggtggtgctccgtcgcctgtgcgacgagctgttcggcgcggacggctgggagctcgcctgggcctacggcgaccatcattccgatagggccatgctggccgctgcaaagagcgcctacgcggtcacgccggatcggccccttacgcgcacggccaacgcccagggctacgatatcttggaatggtagggcgcgcgaggatagttgcgaagcggggatggcagcggtcgcgcggcggcagcggcggtggtgcgcggtagcggggcgcaatggtggcgcggcggccgataaattttctcccgcgaaatacgaaaatactcttggcaatcgtacttatgtacgataaaatggcggcagaacacgatcggggccctgaaagcccccagcatttgagaggtaacggccatgttagagaatatcaacacatcccctaattcccgcgacgacggcgcgggcactccggaaaactacctgtcccgcgc

SEQ ID NO: 10524 - DNA, 10473 bp, Unknown
  gut microbiota DNA sequence
caagaggtgctcgtccgtgccgacgagctgcggacgctttccctggaggtgcccttcgcctgccgtctctcgctcgagctgcaggccgccggcgtgcccgtttccacctgcattaccgacgacgccctgaaggaggagctatgcgccttgcgttcgaagatgtgagctactcctacgagggcggcgaggcgaagaagaagcgccgccgcaagaaggacgccgcgcgccaggccgactggggcaacgcccccgacgccgtgtgggccttgcgcgatgtgagcttcgcggtggagccgggggagttcttcggcgtcgccgggcataccggaagcggcaagtccacgcttatccagcacatgaacggccttgtgcatcccacctgcggccgcgttttggccgatgggcgcgatctggccgagaaggggatcgccgcggaggtgcgccgacaggtggggctcgtcttccagtatcccgagaaccagctgttcgccaacaccgtctacgacgacgtggccttcgggccgcgcaacatggggcttaatgccgaggaggtcgaccgccgcgtgcgggaagggctggccctggtggggctttccttcgacgagctttccgagcgcagccccttcgatctgtccggcggccagcagcgccgcgtggccttcgccggcgtgctcgccatggagccggaggtgctcgtgctcgacgagccggtggccggcctcgacccgctttcccgcgaggagttcctggggctcatccgcgagctgcacgccgggggccgcaccatcgtcatggtgtcccattccatggaggatctggcggtcttgagcgaccgcatcctcgtgctgtccgagggacgcgtgttccgcctgggcacgccggccgaggtgttcgccgatgcggcggcgctgaaggccgtgggcctgggcgccccggcgcccgaggccttcgccgcttccctgcgcgaggccggcttcacgctggggcgtgacctctacgacgagcgcaccctggccgccgacatcgccgcccagctgagaggcggtgatggcgatgcctgatcgcgccatcatcggccagtactggcccgaggactcgctggttcacgccatggacccccgggtgaagttcatcctggccttcgtgctcatggcggcggtgttttgcgcggcgacgcctttgtcgctggcggtggcggccctgttcgtcgtgggcctctacgccgcgagccgcaccccgatgctccaggccatccgcgccatcgggcccttgctcgtgctcgtggtgctgacggcgcttctgaacgtgctcttcgtccagggcggacaggtctacttcgaattcggcatcatctgcgtgagcgagaagggcctgcagtcggccgccttcatcggctgccgcctgctgcttctgctcatggggatgagcctgctcaccctgacgaccacgaccctcgatatcacggcggccttcgagcgtctgatggcgccgcttgcgcgcatcggcgtgcccgcccacgagctgggcatgatcctcggcatcgcgctgcgcttcctgccccagttcatgaccgaactcggcatcatctaccgcgcccagaagagccgcggcgcccgcttcaacgcgaaccccttccgcggcggcatccagtcgctcacggcgctcctcatcccgctgttcacgagcgctttccgccatgctgagactctaagcgccgccatggaggcccgctgctaccacggcggcgtcggcaccacgcgcctcgatccgttgcacctcacctggcgcgacgccgtcggcaccggcgccctcctcctgatgatcgccgccgtcatcgccaccaactacatcccgctttcgttttgagttgagtagcgtgggactggaggcggtggtgccgcgcgcagttcattcaatgacaagaggggaacgatgcgacccccatcgagcaatgccattgaatgctgtctgagcacggcacttccgcctccgggcccacgcggacagcaatgaaccatcaatctcgagaaaggaccacaaatgaccggaaacgagcttatcgtcgactacctcacgagtgtccccgcctggtatctcgctacagtggaggataccccggaaggcgcccagcctcacgtgcgccccttcagcttcgccgcgttgcaggacggcgagatccagttctgcaccgctaccaccaaggactgctaccgcgaaatgcaggccaacccccgcgtggagctgaccgcctggaagcccggatgcggctgggtcatcctgcggggccgcgcgaacctggaagaccgcgccaacgcggcggtgcgcgaggagggtttcaagcatatggtcgccctcggcgaggactgggacgacgcggccgacccgcgcctcaccttcttcactatcgacgacgccgaggcctggctttgcgacatcgacggctcctggaaccccatcgagctgtagaggtcccgcccatcactttgttgacattcggcgcattgcgcgcggaaggcccctcgatgcagtacaatcgcacccatgattgaacttctcacaactatcgattctgtcgtgtggggcccggcgatgatcgcgctgttgctcggcacgcatatctacctgacctttcgcacggggttcatccagcgcaagttgccccaggctatccgcatgtcggtgcgccgtgatccgtctggcaagggcgacatctccagcttcggggcgctggccacggcgctggccgccaccatcggcaccggctccatcgtcggcgtggccacggcgctcctcgccggcggccccggcgccatcttctggatgtggatcgcgggactgttcggcatcgccaccaagtacgtcgagacctacgcggccgtgaagtaccgcgttcgcgacaaaactggcgccatgctgggcggcgccatgttcgtgtggaagcgcgccttcgcgcggccggacggcagcgtgccgtggtgggcgacgctgggcgccgtgtccttcgccgctttcgccgtcatcgccaccatcgggactggctcggcggtgcaggcggcggccatctccggcatcgtcacctcgtcggtgcccgccattccggccgtggccgtgggcgttgtgatcgtcgtggccgtggcggccgttatcttcggcggcgtgaactccatcgcgcgggtgtgcgagtggctcgtgcccatcatggccggcgcttacgcgctcggttgcctggtcatcatgggcatgaacgccccggtgctcggcgaggccgtcgggcttattctggaatgcgccttcacgccgaaggcggctttcggcggcgcggtgggttccggcatggtgatggctctgcagttcggctgcgcgcgcggcctgttctccaacgagtcgggactgggcaccgcccccattgtggcggcggcggccaagacgaagaaccccgccgaccaggcgctcatctccatgaccggcgcgttttggtccacgggcgtcatctgcctgctcacggggctcgtactcgtgtccaccatgatcgtgcacccggagatcggcgcggacatcctggccaacccctccatcttcaccggggcggccttggccagtgccgccttcgccgagatccccgtgttcggcacgccggtgctcgtgctcggcatgtgcgcgttcgcctactccaccatcctcggctggtcctattacggcaatcgctgcgtggcctatctgttcggccccaagggcatcaagccgtaccaggtgatctacgtggccgtggccttcttcggcgccatcggggtgggggacgtggtgtggacgatctccgacatcggcaacgcgctgatggccatccccaacatcatcgtcatcctgcttttgtcgggcatgatcgcccgggagaccaagcactacgtctacgacgggcacctcgacgaggagtatgccgagcccgtgccccgcgtggacaaggcacagctttagaaggccccgccgccgcttacggggaattcttccattgttaacaaagacgctcaacttctccctctataatgcggctactttagcacgttaaagtgcgaaggcccgatgagcgcgccttgcctcgccgggaccgccgcaccaagccgctggctttgaagtcccgccgcactgcgctcactgagaggagaaccgccacatggacatgattgttgacgttatcaacagcatcgacgccttcgtttggggtccgccgatgctcgtgctgctgctaggctcgcacatctttctgaccttccgcaccggcttcatccagcgcaagctgcccacggccatcaagctgtcggtgaccaaggaccccgacgctcccggcgacatcagccagttcggcgcgctgtgcacggcgttgtcggccaccatcggcaccggcaacatcgtcggcgtcggcaccgccatcatcgcgggtggtccgggcgcggtgttctggatgtggatcaccggcgtgttcggcatcgccacgaagtactccgagaccttcgctgccgttaagtaccgcgtgaaggatcacaacggcgacatgctcggcggcgccatgtacgcgtggaagcgcggcttcactgacaagaacggcaacacgccctggtgggcgctgctcggcgccggggcttttgccctgttcgcggccatcgcgtccttcggcatcggctcggccgtgcagtcctccgccatgaccgaagtcatctccacgaacctgcccggcgtgcccgcctggggcatcgggcttgccatcgtcatcatggtgtcggtcgtcatcttcggcggcgtgaaggtcatctcgaatgtgtgcgagaagctcgtgcccttcatggccatcgcctacatctggggctgcgttgtcatcctcggcatgaactgggagctcgtctggcccgcgttctgcctcatcgtggagagcgccttcaccgccaaggcggccttcggcggcgcgctggggtccggcctcatgctggccctgcagttcggctgcgcgcgcggcctgttctccaacgagtcgggcctcggctccgcgcccatcgtggcctcggcggccgcgacccgcaacccggcccgtcaggcgctcgtctccatgaccggcaccttctgggacacggtcatcatctgcctgctcaccggtctcgtgctcgtgtccacgatgctcggcaacgccgatttgcagtccgagatcatggccggcaacatcaccgccggcgcggcgctgtcctccgcggccttcgcgagcattccctacatcggcacgcccattctcatcttcggcatgattctgttcgcctactccaccatcctgggctggtcctactacggcaaccgctgcgtcacctacctgttcggcaagcgcgccatccgcccctaccaggtgctctacgtggtggtggccttcctcggcgccatcggcgtgggcgaggtggtctggacggtctccgacatcaccaacgctcttatggccatcccgaacatcatcatggtgctgctgctctccgggctcatcgcgaaggagacgaagcattacgtctacgagggcaacctcgacgagcgcgacgaggctcccattccgcagctggacagcaagtaggttctagcgacatagtgtgtcatgagcgagcgccccgccatgcggggcgctcgtgctagaatggccagatgaccgacgggccgtaagtcctgagcgccaggcggtgccttcttttgcgaaaggaggtggatcgcttggacgtcttcgttttcgtcgtgcgcctggcgactgcggtcgtcgggttgctgagggaggcggttgcgttctccgagacgctcaggaggggccgacataggaaggaccgctagcgccaactagcggtcccgactaaacgacggtgccgcctgcatccacctcaggctggtccgttggtcgtattctagcatatattgcattgggaagcgagcggatggaagcagcatgggcgaagcgaagacgattgcagtcataggcggcggggcctcggggctggctgcggccgtggcggccggggaggctctacgggatttggagggtgccggaggtgcggccggtgaggtcgtagaaggtgacgcagacgcggcgcgggtcgtggtgtacgaggcgtccgatcgcgtggggcgctccattctggccacgggcaacgggcgctgcaacttctcgaacgcgcggcccgacgagggtgattatcgcaacgccgcgttcgtcaggcgcgtgcttttcgagttcgaatgccaggcgcatcgtcgcgtgccgtcccaggcaaagacgagcaccgcgtatccgaacggtgtgctcggcttcttctccgatcacgggctgatgtggcgcgaggaaggggaggggcggctgtaccccttggctaacaaggccgcatcagtgctcgattgcctgagagcggcctgcgctgcggcgggggtggaagagcgcgtggaatgcgaggtcgcagccgtggagccgccgcgcgccgagggcgccccgttcacgctgcgcctggccgacgggcgcttcgagcgggccggtgtggttatcgtggccgtgggaggcaccgtcgcgcgcgagcttttgcccaagggcctttccttccgcgagctggagccgacgctggggccgttggccaccgatccgcgctggccgcgtcgcctcgacaacatccgtgtgcgtggggcgctcgagctgtggcgccccggcgagaagatgacgccccaagagctcaaccgccacggcttcccgatgggcacccacgaaggcgagcggctggtgtcccgcgaggtgggcgaggtgatgttccgcaagtacggcgtttcggggatcgctgcattcaacctgagccgcctggtcgagcgcggcgacgtgctcgccgtggacttcgtgccctgggtgcgcctttgcgacatggaggcgttcctcaaccgtcgccgcaagctgctgcgcgcctcgctcgggcgcgatgtgacctgggacgatatgctgcgcggcatggtgctcgcgcccgtggcagacgtgctgctggaggcggcggagctggacggtgcgcgttcggtggcgaagggcgagacggccgtcatagcgccggtgctcaaggggctgcggcttcctgtgacgggcctcggcgatgtgcggcagtgccaggtgcaccgcgggggcgtgagcgtccgggcggtggacgaccgcacgtgcgaggtgcggcgcgtgccggggctctacgtcgtcggcgaggcgctggacgtggatgcggcgtgcggcgggttcaacctgcactgggcctgggcttcggggctgctcgcgggctggtcggcggctgaaaggttacgtgcatgattcaggcttccaatgttccggtttctcttgatgctctcctgccagaaaacgaatcgctcttccgccgagaaatcgcgcggacgctcggggttaagacgagcgctatcactgaggtgaagctgctgaagcggtcgatcgatgcgcggaagaagtcgaacgtgcatggcgtcgtgaccgtggcggtcgagcttgcggaaggcgctgatccgcggccggtgaagggcgtggcggtcaaggcctacgagccccctgagcctctttcgataccgcacgtggaaccgactaggctgcggcccgtcgtggtcggggcggggccggcggggctgttctgcgcgctgtatctggcgcgggcagggttacggccgctggtggtggaacggggcgcttctgtagacgagcgtgtggaaatagttgagaccttcaacgccggcgcgccgctcgatacgcgcacgaacatccagttcggcgagggcggggcgggcacattctcagacggcaagctgaacaccggtatcaagtcgccccatatccgccatgtgctggaggccttcgtggaagccggcgccccggaggacattctcgtggacgccaagccgcacattggcaccgacctgctcgtcggcgtcgtgcgcaacctgcgtcgggccatcgaggaggccgggggagaggtacggttcctcacgcgcctcgacggccttgtgcttgaggacggagctgctgatcgtccgggcgtcgctggtgctgcgaagggggctggtggcgaagatggcgaagcgcgcgtcactgccgttcgcctcgtcgatgagcgcacgggagcggcagaagtcttcgccaccgattgcgtcgtgctggcctgcgggcactccgcgcgtgacaccttccaaatggtttgcgaggccggggcggacatggcccgcaagcccttcgccgtgggcgtgcgcattgaacatccccaggctctcgtgaacgaggcccagtacgggccagccgctggtcatgcggccctcggggcggccgactacaagctggcggtgaagaccgacgacggccggggcgtctacagtttctgcatgtgtccgggcggggaggtggtggcggccgccagcgaggaggggctgctctgcgtgaacggcatgagccgccacgcccgcgccggggccaatgctaacgcggcgctgctcgtggaggtgcgccccgacgacctgcccggcgacggtccgctggccggcgtcgccttccagcgccagttggaacgggatgcgtatcagctcggccgcggcttgacggctggcggcggggaagatgctagcgcactttgtcctccgtacacggccccggcccaaacggtcggtgacttcctcgtgcacgccagcggcaccccgagcgccgcggtgacgcccacctacccgcgcggcgtggcttggcgcgacctgcgcgattgcctgccgccgttcgtgaccgatgccctcgccgaggcgctgccggccctcgatcgcaagctgcacggattcgccagcgacgatgccgtcatgaccgccgtggaggcccgcagctcaagccccgtgcgcatcgttcgcgacgatggcttccaatcgaatatcgcgggcttgtacccctgcggggaaggagccgggtacgccggcggcatcacgagcgccgccgtggacggcctgcgcgtcgccgaggccatcgtcgccgcacgccgtccgctcgcgctggaagaggccacccgtgctctggctgtcggcaatgccgtcatcttcccgaccgacaccgtcttcggcctgggcgtctccgtgagcgcggctccgggcccccagctcctctacgacctgaagcaccgcgacgccggtaagcccgtggcgtggctcgtggaaggccccgaggcgctggatgtctacggaagggacgttcccgcctatgcgcggcgcctcgccgagaccttctggcccggcggcctcacgctcgtggtgcgcgcctccgatgccgtccccgccgccttccaatcgcccgcgggcaccatcggcttgcgcatgcccgccagcgaggcggctctcgggctcatccgcgctgccggctgtcctttggccgtcacctcggccaacctctccggggccgccgacacggcccgcgccgaagatctcgatcgcgcgctggtgggccgcaccgccggcgtgtacctttccgatgattccctgtcgcattcggccgcgaccggaaccgctggcgattccgatgccccttccgcgtccgctcgcttcgcggcgggcgatcgactggtgccaccgcccgcatctggcaccgcctccaccgtgctcgactgcaccggcgaggccccccgcgtcctgcgcgcgggcgccctcaccctcgacgacctgaaaggatgcctctcatgagcgatgccgccgcgaccgccggtcgcaccgagttcaccttcgactccgccgacgggaaaagccaagtccgcgccgtcctctgggtgccgctgtccatggaacgcgccgatgcggccttcggcgagccggagcttggctgtttcaagccgcgcggcgtcgtgcagcttatccacggcatggccgagcacatcggccgctacgacgacttcgcccgcttcctcgccgatgcgggctacctcgtggccggccacgaccacatcggccatggggacaccgccggcgcgcccgagcgccgcggcgtgatcgatgccgagggcggcgccgatgccatgatcgaggacgcgcagatgctgcgcctgctcgtctcccggcaggtggcgcccggcacgccgtacttcatcttcgggcattccatgggctcgctcgtgctgcgcagctatctgccgcgctacgggcaggggctcgccggagccatcatctgcggcacggccaacgagcctgttgccgtctcccgcgtcggcaacctggccgcccgggccatcgcccgcgtgcgcggcgacgactaccgcagcaagctgctgcacgccctggccgacggcgcctacagccgcgccatcaaggacgcgcgtactcccttcgactggctctcccgcgacccggccgtggccgacgccttcatggccgacgagacgtgcggtttcatgttcggcgccggcgcctacgccaccctaaccgagc

SEQ ID NO: 10525 - DNA, 5262 bp, Unknown
  gut microbiota DNA sequence
tactcaatttcgagtctattttacacacatattctattttgtccgtagataggggttctttcccctgcgatgatagggatgcaaacaaacgaaccgcccgaccaaccacttgcatgaaaggagagatgctccgatgacagtcaccgagaagctcaacggttacggcccgctcgccggcatcaaggtcgtcgagatgtgcacctacgtggccgccccggccaccgtccgcgtcctgtccgagatgggcgccgaggtcatcaagatcgagtccttcgccggcgatacccagcgcacccagggccccggcttcggctgcgagctgaccgatacggaagatcccaccatcgatttgaacaacaccaacaagaactgggtgtcgctcaacctgaaggatcccgagggcctggccatcgcgaagaagatgatcggcgaggccgacatcttcatgaacaacatgcgcaccgccgccctgaagaagctcgggctcgactacgagaccctgcacgaggagttcccggggctgatctggggccagatgcgcggttacggcgagttcggcgagttcgcccatgcccccggctacgatgccgtgtgctgggccgcccgcggcggcgtggccggcaccttccccgagaaggacacctcccccgccattcccccgcaggccttcggcgactacaacaccgccatcatgatggccgccggccttctcggcgcgctcgtgaacaagctgcgcaccggccagggcgacaaggtggtcgtgaatctgtaccactccgccatctggggcggctccatcggcctttgcgcgcagcagttcggcgccgactacccgaagtcccgcaccgacgtgcccaaccccttcaacaacacctacaagacggcggacggcaagtggctctacatctgccagccgcagcacaaccgctactacaacgacatgatgaagatcatcggccgcgacgacttggtggacgatccgcgctacgcgaccatcgagaacgtgaaggcgaaccacctgcagccggagctcatcaccatcctggacgagggcttctcgaagaaggacctggaggagtggctcaagatcctggccgagtgggacgtgccgagtcagaaggtcttccgcttcaccgacatcctgaaggacgacgaggcctacgtcaacgacgccatccgcaaggtgaagtacaacgccttcggcgagcacgcgctgcccaccacacccatccgcttcggcggctacggcgacccgccgatcatcctctccaagcccatcggctaccacaccgccgagtacctggagcagtacggctacacgcccgagcaaatcgccgagctggaggagaagggcgctgtgaagtgctaccacggcgaggaggtgccggatacgatcttcaagtccgagcgccaggagaagggcgaggccccctgcaactggtaggccctccccccgccaaacacgcttcctatctcgagaaggagcccctcatcgtgaggggctccttcttatagggcgtcgaagcaatcgcgccgaatgaggtcgaggaactcctcggagaaatagatcggcagcagctccaaggtcttctcgttgcgcaatgggcgcgccggatcgtggtactccacccaagcgttgcagctccaggtgatgcccaccagggcgttgaccatgcgataggccggaaagcggacgtcgaaggaaccccgggggaagcggccgcccaccgcctcccagtaggccttaaggaactgcgcccgctcaggagcgctgaaaatgacatcgctgtcccaaatggtggtggtcggcgagaggaagtaggcgagatcctgcgccacctctcccagcaccggcttctcccaatcgacgatggacgcgcgccccgtaccgtcgatgaggaaatgggacggcaccgcttccgtgttgaggatatgggagcactcgcagggcgacggcaccggggccgcatcgacggcccgctgggcccggacgaacagttcgtccacctcgcgcatcacacgcccctccgcgagatcgctcgcctgatagccgtcgaagagcctccggcagctctccaactgggagcgcaaggggtcctccgcccgaagaagcgcacaatcggggggtgccgccacgctgtgcacgtcggcgagggcccgggccgcctcccgcacttgccgcgagtcctcaaggtcgatccaggcgccctccacgaagctctccaccagagcgccgcgcccgatgcggcttcgggtgccgtccacgtagagcggctcgggcgtccgcccgctggacgccaaggcgcgcagggccgcgaactcgtagcctatctgatcgtcgagccccagctgactggcgtagttgacgcgcagcactaagcgtcggccgtcgcgagcctcaaggacgaagttggcgttgtgctcgccttgggccaaaggaagcaccgtaagctcgccgggcccgtccacgccgagggcacgcgcaagcgcgccgtttccctccacgaagcgccgtgcctctcgaagagattcagacgacggcgcagccgaatcgcaagctggctccatgacgccctcctcctttcggcatctccacctaccgcttttagttgatatgatctaatatatgcgagagtatactacaagttacttcgcagcggcgacgggacgagaggtctcgacgcgccgaactcgacccttgcgtgcctcggcgcgcggaaaggagctgtcatgagcgcatcgacgccggcagcgcagaccccctcggcaaccgcgccgacggccccctcttccggccccgccctcacgttcctcggcacgggcgcgggctgcggcgtgcccgccttcttctgcgaatgccccgcctgcgaggaggcccgacgcgatccgcgcgcccgacgcggcgactgcggcgtgctcgtgcgcaacgagcgcacgcttcttctggacacgccgcccgatttgcgccaccagctcgaacgcgagggcgtgcgcgcggtcgaccgcgtgctttggacccatgcgcacttcgatcatctggggggcctcggcgagctggagtacatggtcaggctggtcacgggagccccgcttccctgcgcggcgagccctgcggcgcgcgcgggcatcctcgccgagttccattacctggacgacatcctcgatttccaagagctggctcccttcgatgaattcgccttcgacgacgtccgctacaccgcccttcccgtcacccacgccccgggcacgtacggctacctcatggagggcccctccggtcgccgcaccttctacgcctcggacaccggcgcgcttccccctgaaaccgccgagcgggtgcgcggcgcggacgcgctcatcatggacgccacgttctggggccgcaactggagcccgggcgcccaccacagcgtgcaggagaccatcgaggaggggctggcgctcggagcgggcaccatctacctgacgcatttggccatgcactacgacacgccgatcaccttggccgagttggaagcgcgccttgagccctacgacggccgggtgcgctgcgctgccgacggcctcaccattttgctgtaaaggggcgcggcctctgacgcgcatcgttaggagctatctgtgaagaacatcatcctcgatttcgacaacaccatgggagttcgcggctgcgacgtggacgacgggctggccctgctgtaccttctgggcaaccccgagcgctgtcgtgtgctcgcggcgtgcaccacgtacggcaacgcgggcatcgatgtcgtcgacgccaacacccgcgccctcttcgagaaactcgggcttaatatccccgtctaccgcggcgcggcgggcccgggcgacaccgacaccgaggcggcgcgcttcctcgccgaggcgtgcgcggccgcaccaggcgagatatcggtcctcgccacgggatcgacgacgaacctcgccgccgcggccgcccgcgacgaggcgtttttccgaaacgccgccgatttcacgctcatgggaggcatcacggaaagcctcgtcatcaacgggcgcatcatggacgagctgaacttctcctgcgatgcggatgccaccttcgcgctgctcgcctcgggcgcgcccgtgaccatcgccacggcccagaactgcctgcccgcccacgtcacgcgcgagcgtctctcagaggcgttcaccgacgatgcgtggcttatgggcgccatcgactattggttcgccgatatgggagagcgctacgcctgggacggcttcgccgtctgggatcaggtggccgccgcggccctcatcaaaccggagctgttcgccaacgagccgctcctcgtcgccctcaacccgaggcttttgtttgcgggctacctggaacgggcgctgcccgggacgccgcaggccgtcgtgtccgcgcccgtcatcgcgaacccgtccgcctacctcgccgatgccgtcgccggctggcagcgcgcctgcgagatgctcggccttgaaagatagagatatttgatcttgtctaatagttggccgtgtcgtatactatgactcgtctgaagcacaaaggccgggagcagcaaagcccccggccttctgttgctcaaacgccttcggacgaagacgctaggcggaaaatacgaagcagcctttgccgtcgatgcgcacaggcacgatctcgccgggatcgggcaggctggccgtgggcaccgtgagcgtctgacctgccacatcgagccgcgtcaggtagcccgctccggcatagacgccgcaacgcacgacggcctctcctgcgggcaccgtcccatggccctcgccaacggggctaagcaagcaatcgccttggcgcaccacggccacagccggcccgtcgccgatgccgagagcgggcagcacaatgccgtcgaggatgaaccgttccgactccacgcagcccttaagcaccgagcagtcgccgaagcaggcggctatcttggccgtggcgggccttcggtacagctcctcaggggtgccgatttgcgaaatgtggccgccgtcgagggcgacgatgcgatcggacatcatgattgcctcatttgcatcgtgggtgaccatgagcacggtcaggccgtcctctcgatgcaggcgcaacagaagcgagcgcatatcgtcgcgcaggctctcatcgagccccgagaagggctcgtcgagcaacagggccgcgggcgccgccgcaagagcgcgggccagcgccacgcgctgcgcctgaccgccggaaagcgtctgcacccg

SEQ ID NO: 10526 - DNA, 6102 bp, Unknown
  gut microbiota DNA sequence
gagaaaccgggacaccgccacggtttctccacggttcgcgcgagaacgctcccgcgaaaccataggggtcggcgcggacgtcaggcgagagcacttccgcgaaaccgcggcggtcggcgcgggcataagaaaaagacccctccgccattgcggaagggtctcgcttctcggagcgcgccttgcgcctcttgcctttctgcgcgctgccgcgccggcccagtcgcccgtcgggctccctcggagctttaagcctcctcgccctgggtcgcctcgcggccgagcagcttggcgatgcgatcggaatactgcaggttctcgagccccgcctcggcggccaggtcgatcaccggcgcgtcgttccacagcgcctccaggcggtagtactcgcgggtctcgggcatgaacacgtgcacgacgatgttgccgtaatccagaagcgaccagcttccgtcggcggacatctcgcggtgcgtgggcttgatgcccgcatcctcgcgcagcttgtcctcgatctcgtcgatgatggcgtccacctggcgggagttggcggccgtggcgataacgaagtagtcggtcacgccgatgagatcgcgcacttcctgcaccatgatgtcggtggccttcttctcgtcagcggccttggcggcaatgagcgcgcactcgcgcgagaaggcggcctgctgctctacagcatcggtcatagctatcctcactttcgggaacatcagattttgcttgcataccttagcacaagtcccccgggaagaggcccgggagggggcgcgcggagacctctgagcgcccccttccggagctcttccctccattgcctttgtcgtgttaaggcctaccgtagggaatggggtcggggttggcctcggcgcggtagacttcctgctcgggcatataggagttccaaatttccgtggtcttggaatagatggggtggcggcgctccatgatgagctggacccaataggcgtacacctccaagaacagctcgcgcagctcgatctcgcctatcttctcgcgcagcttttccacgaccttgcccttgcgccccggctccagcgcatcggcgatatagacgatcatgtccaagtcgctcatgcccgcatcgcccagcgtatggcgctcgacggcggtgagcacctcgggcggcagctccgggaaggcgcgccccaaggccacggcggcggtgaggccatgcaggacgcggggcatggcgacaagctcggcgtccagttccatccccagctcgtcggcccgcgcgagaatgcccgggtcgtcatagcccttgtcccagtcatgcagaaggccggccacccgggccgccgtctcgtcggcgccgtagacgcgagccagcttttcggccgtctcggacacaccgaggctgtgcttgaaacgacgcgggcccacccgcttctccagctcgtcacggcgcgcctcgtagaatgcatcgctacgccacccgtccaccatcggtctcccttcggtacaacgattcctcttcaatgatctttcgcacggcctcaggcaccagatagcggatggtgcgccccgagtacacgcgccgccgcagcgcactcgaggaaatgtcgaggcccggcacggcgaagggacgcacatcgaatccgtgctcgcgcagatcgcgcaaggcctgctcccccagctcgaaaccgggccgtgtggccgccgcgaacgccgcgaggtgtgccagttcggcgctctttcgccatcggggcagcgtgagggccgcgtcggcgccgacgatgaagacgagctccacccccgacagctcctcgcgcagctcgcgcaacgtgtccacggcgtaggtgacgccggggcgctctacctccagggcgctcacggcgaaggcggggttgccgaccacggcggcggccaccatggccagccgcacctcgccggcggtcacaagacgatcctgcttgaaggcgggacggcccgtgggcacgaacagcaccgcatcgaggttcgcagcctcgagggcctcctcggcacagacgagatgccccaggtgaggggggtcgaaggtgccccccatgatacccagccgcacgagcgcgcccgcccgtgcccgctgcgccagcgaatccacggcgccgtccatcgcccttaggccctcacctggcccgcgccgcgcaacacgtacttgtaagaggtgagcgcgtcggcggcaaagggcccgcgggcgtggatcttctgggtggagatgccgatctcggcgccaaggccgaactggccgccgtcggtgaaggccgtggaggcgttggcgtacaccgccgccgcgtccacctgggcgaggaaggcgtcctgggccgcctcgtcggaggcgacgatggcctcggagtgcttcgtgccgtagcggttcacgtggtcgatggcctcttgcaacccttccacgcacttcaccgccagctcgggccccagatactcggtctcccagtcggcctcgtcggcgagcacgacgtcgggtgcgtcgccagccgcggaaagcccggccgcctcggcgatggcgagtacgcgcgtatcgccgtggacgagcacgccggcctccttcatgtccgcgagaatgggcggcagcaccgcatcggccaccgccgcatccaccagaagggtctcggcggcgttgcacaccccgtagcggcggcacttcgcgttcttgatgatgtcgcgggccatcgcggggtcggcggaggcatgcacgtacacgtggcagttgcccgtgcccgtctcgatgaccggcacgcgggcatgctccacgcaatggcggataagccccgcaccgccgcgggggatgagcacgtccaccaggccgtgcaatcccatgagcacatcagtggccgcccggtcggtggtggtcacggcgcagatagagccctccggcagccccgcttccacggcagccgcggccagcacgtcggcgatgacctcgttggagcgggccgcaaggctgccgccccgcaggatgcacgcgttgccggacttcacgcagaccccggcagcgtcggcggtcacgttgggccgggcctcgtagaccatggccaccacgccgaggggcaccgacacgcgccgaagctcgatgccgttgtagagggtcgattccagcgacacgacgcagagcggatcgggcagcgccgccacctcctccaaagcgtcggccatagcaaagacgcgagactcgtccagcatgagccggtccagcagcgcctcggtggtgccggccgcccgggccgcctccatgtcctcgccgttggcctccacgatggccggcgcctgcgcccgcagggccgccgccatggcgagcagcgccccgttgcgctcctcggtcgtcgcctgagccaacttcacgctcgccgcttttgcgaatttcgccagctcgcgcacctcctcttccaaagtcatgggcctctcctattcgaatagaaccagttcgtcgcgatggatgacggggcggtcggccagcacggccaggatggcgttgctcgccacctcctcgcggctgcgcccgcaggccagcttcagaaggtcgctcgccgccgcggcacggccccgcgcgaacacgtgccccgtctcgtcggccacgtccacgatgtcatccaacccgaagtcgccctccacggcgcgaatgcccacggaaaggagcgacttgccgcgcatcaccagagcatcgcgggccccctcgtccacgacgacggtgccgtgcacggagtccccgagcgcgatccacagcttcttggccgtgatctcgtgggggcggtccggcgccgtgaacagcgtgccgactgcctctccggcagcggcctgaacgatgcagtccgcgcgcctcccctggcagatgaccatgggaatgcctgcggccatgagcacccgggccgccttgatcttcgtgatcatgccgccgcttcccacgccggacaccgcgcccccggccgcagccagaatgtcgcggccgacgcgatccacgacgggaatgagcgtggccgccggatcgatctgcgggttcgccgtgtacagcccgtcgatatccgagaggatcaccatgaggtcggcgtcgatgaggcaggccacgagcgccgccaaggtatcgttgtcgccgaagcggatctgctcgacggacaccgtgtcgttctcgttcacgatgggcaccacggacagctccagaagccggtcaagcgtatcccgcgcgtgcaggtaggccgagcggtccgccgtatcgcgccgggtgagcagcaccacgctcgtcagcatgtcctgcgccccgaaggcctcggcataggccgtggaaagggcgctctgccccacggaggccgccgcctgcaggctcggcatgtccgtcgggcgcttggcgatgcccagtgcctccaggccgcaggcaatggccgccgacgtgacgatgaccacgtcccatccggccgcgcgaacccgcgccacctgatcggccagatcgttcagaaacccgtagtcgatggaactctcggaggtggtgagggtggccgagccgatcttcaccaccaggcgcttgcgcctgtgcgtcgcgtcactcatcagatatccagctcctggtagacatccacggcaccggccgtgggagattcgaaagcgaacgagaagccgaggatgcgcacctcgtccccgtcacgggcgccggccttctcgagggccgtatcgacccccatgcgcttgaagcggtgctggaagaaggccacggcctcctcgttctcccagtcggtctgcaccaccatgcgctccacctgcacgccggaaacgcgccaggcgccggggccctcggagatgatgtcgaagcgcttctcgcgggcctcgcggcgcagctcccacacgtggtcgtactgcatgtcggatgccgcctgctcgcgggccgcctcgcgcagggcgtgcaccttggtggcgatggcggccttcagcgagtccacgccggcgcccgtcagcgcgcttatgcggtagagcttcggatcgatgggactttccacgaactcgttgcccccagccgcggcaatggagtcctcgcgcacccgggcggccagcgcctcgcaggcctcctcggtgccgggcacgtcgatcttgttggccacgacgatgcggggccgcgccgccagctcgtcggcgtacagggccaactcgttcttgatgatctcgtagtcctccaaaggatcgcggccttcccagtcgccggtcaaatcgacgacctgcacgatgagggccgtgcgctcgatatggcgcaggaactcgtgtcccagcccgcggccctcggaggccccttcgatgagccccgggatatcggccacgacgaaggagaggtcgcccgaggtggccacgccgaggttgggaacgagcgtggtgaacgggtagtcggcgatcttcggccgcgcggcgctcatcttcgcgatgagcgagcttttgcccgccgacggcatgcccaccaaggccgcatcggccatgagtttcatttccagctcgatccagcgctcctcggccggctcgcccagctcggcgaaggccggggcgcgacgcgtggaggtgacgaagtggatgttgccgcggccgcccatgccgccgcgcgccacggtgaccgactcgccgtcgtgggtcagatcggcgatcatctcgcccacttccccctcttcctcgaaatactcgcgcacgacagtacccacgggcaccttcagcacgagatcctcgccggtagcgccgtgcatgcggctgccgcggccatgggtaccgcgctcggccttgaagtggtgcttgaagcggtactcgatgagcgaggagaccgaggcgtcggccacaacgatgacgttgccgccgtgaccgccgtcgccgccgtcggggccgcccttaggcacgtgggcctcgcgtcggaacgacatgcacccggcgcccccattgccgcccttcacattgatgcgaaccttatcgatgaacataggagcctttccttactagtcagtgtgcagattatcgcacactctgcccagaattcctctcgggcggtggcgggaggaggcgctcgccgcccgctgatcgctttatccccttccgaacgcggcaaaagaaatagcg

SEQ ID NO: 10527 - DNA, 27105 bp, Unknown
  gut microbiota DNA sequence
gacacgcgggctctcgtttctcttacaacaatgaaagtcgattcgtaaggcgtggggggcggagaaggggctatactggcagcatgacatttcgaaacaggaggtatctcccatgactgaccagcagaatcccttcagcaccatgcccgagccgcccgctgcgcccgatccggcccaggctttcgacaacgcgcagggccaggccgcgcagtcctacgacgccgaccaaaccgctcagcaggcttacgacccctaccaggcccaggcgcagcaaccctacggcgccggccagggctatgacccctatcaggcccagcaaacctaccagcagccctatcaggccacctacgagcagccgcagccggcctaccagcaggtgtacgcccagcccgtggccccggcggcccctgcagctctttacccgatgaccgacaccgaccgcaatctgcgccttgtggcgttcatcttctgcatcctgtcgctggtgggctcgtgttggctcatcatcccgctggcgtggatgattcccatgtcggtcatctcctggggcatctacaagggcaccaaggccaacaccgtcgccttcgacgtatgcaccctcatcttctgctcgctcgtggccggcatcttgctgctgtgctcgaacaaggatcggtaaggcgctctctgcagagcttgtcagttcgcaagctggtgagtctgggtgccctggcattttgtgcgcacagcttcatagcccacgatttcgcgcgtacgcagcttcgcggcctgcaaactgcgtagtcttgtgattttgaaaacgcgtcgtcgccaaacacgtggccgctcaaaggcgcgccgggctagcagccccggtgcgccttattttgttccacgtctctttcgtttccacggtctccgccgtttccgtgacaaaacaaggccttctcgtgcacaaaaatcgacttatatagacattcggggatgcggaaagggagaaagaacgctatataagcctcaaaatgtgctccccgctgtttcaaaagtctatataagtcgattttcgtgcacgaagctccctcattttgtcaccgttggagctgggtcggcagcgcgctgggcaggtttctccaacgagtacggaaagattttccgagtacttcatctacctatggatttggccgcacggccgatgcaggtttggaagcgctcgctgcgctacgcggccttcgggggcttgatgaagaaggaaaccgccagggccgcgatggccacgccgaagaagacccagaaggcgccgaggtagctgcccgatcccatttgcgagagggcgagaatctgcggacctacgatggcggccgggatcatctggcaggtggcgatggcgtagttgatgccgtagtacttcggcccaaagaaggtgcccaccatggccgacatcgagcacatattcccaccgtacatgaggccgagcaacatgaatccggcgacgagcagcgggaagttgctgcccatcatggcgaaggcgcagcagagcatgcccgcggcgaaggccacggcgatccaagtgaggcacacgcggtagccgaacttgtcccagatgaatccgttgatgaggcgcccgagtccgttcatggccgacacgctgcccatggccgcggtagccagcataagcgcctcggcctcgggcagcgcggcgctggcgccaacgccagccgctcccgcgccggccgctgctgcgccgctcgctcccgctcccgcgcctgcgcccatgagcaattccatagcagccggcactgcctggctgatgagcgccagaccgccgcaggtgacgagcatcagatacaccatgaacacccagaacgtgggcgtgcgcaccatttgggagccggtcatgtcgacggctgccacggtggcgtcctgccgcgccttctcaagcaggggtttcacgtactccggcgtcggcagcttcatgatgaaggcgccggcccccaccagcacgacgaaaacggcccccagcgcgccgaaggtcatgcgccatccgagcgcgcccagcatcgtagtgacaacgggggacagcagcatggtgccgccgccgaagcccatgagcatggcgccagaagccaggccttgcttgtcggggaaccatttcagcgtgacggacatgaccacgtcggtgccaaggcccacgccggctcccaccaacacgccgtaggtggcgtaaatgaagggcagcgattccgtgaaggccgaagcgataagtcccagtcccaggcaggcggccgtgatgagcatgaccgtgcgcggggatgtgcgctcttccagcgcgcccgctacgagcatgccggcgcagaaggtgatgatggagagcgtgaacaccaccgaggtggccgagcgatcccagccgaattccgcctccagcgggtcgacgaacagcgaccaggcatagatgagcccgaagaacatgagcaggacgaaggcaacgaagaagtacagcagacggtgcggcgttgtttgagtcgctgtggcgtgcgtctgcgatgctgcatgggacatggctcccccttggaattgcgtgggtcgggattccagtgccagccactgctcagtctatcaactgcacaaaaaagagcaagaggaaaatggtgcagcaacagcttaaaaagctagccgcaaaatcacgtcctttacgtaaaaagggtgattttgcggctattactataatgaaaagcgataaattcgggaagaaggtagccacaaatgaacggttgtcacggcaaaaccgttcatttgtggcttaaggccgaggaaggggacgcgtatcctcgcggagttaccccagtgcgcacgctcttgcaaggagttgccctgtgcgttcattcttgcaaagagccagttgcgaagcggagcttacccctcgacagcgagaaatcgtccctgctgacggcttcgggaaacacccagctagaacttagaaaatcagcggaaaactaatctataacggcgcagcaacgaaaaccgcccccgtcaccaaaacgccgagcgagagcgcaggatatgaaacgaatccgcgagttcgtgcgttgaagctcgctcgcggggcggctcgaaaagaacggctccgcacgcccgactgccccggcgcacctggaaaggaagacgacaatggtcactcaagagcagcaatcgattatcgatcgcgcccagctgcagaagatcaacggctggcagcatatcaaggtgaagggcaccccctacgagtgcggcttccaggagggctaccttctggccgacgagtaccaagacgccctgcgcgtgtacaagttcatgaccctggaaaccttcggcatgacctacgagtggttcgccgagcaggcgctgaaattgcatcgcgacaagatacccacccgctggctcgaagagctgcgcggcatggccgagggcctgacggcggcgggcattcccaccaccaccgacgacatgatcgcctggaacgactggatggagatcaccggctactggtggccgcaaaacgccggcaaggtcatgagccgcccgctcatgaagacccaccgcaaggagcactgctccgccatcgtggccactggctcagccacggtggacggcaagccctacctgggccacgagagcttcgacgagttctggagcggccagtacttcaacgtttgcaaacgcgtggagcccgatgacggctacgccttcatcatgcaagcctcggcgccgtgcatgctgtcgtccatgaccgacttctacgtgaccgccgcgggcctgaacatcaccgagaccacgctggccggcttcgaccgctacgacgatgcgggcatgcccgagtgggtgcgcatccgcgacgccgtgcagtacgcggccaccatcgacgagttcgtcgagcgcctgaacaaaggcaacaacggcggctacgccaacgcgtggctcatcgccgaccacaacaccggcgagatcgcccgtttcgagcagggcttggaattcacgagcctcgagcgcaccttcgacggcgcgtacttcggctgcaacgccgtgttcgatccgcgcatccgcaacctggagtgcaaggacaacggcttcaacgacccgcgccagcagaccggtgcccgtcgccagcgctggatggaactcatcgatcagtactacggcaagatcgacctggaagtcgtgaagaagatgctcgccgacacctacgacgtgtatctcggctacaactgcccgtcgagccgcgacatctgtgcccactacgacgtggatccgcagtactacgccgacgaccccgatgccgtgtggaacatcccgttctacccggccggctcctgcgacgccaaggccgccggccccgacgatgtgaagcacctgaagatgtggggccgctacggccgcgccgacggcgtggagttcgtggtgaaggacttcatggaccagcacccgctgtggaagtggatggacggctacctggaagatcgcccgactcagccctggacgctcttcgactaaagggaattcgaaccggcgcttttccacggcgccgcgttccttccatatagatcaacgctaaccaatcgaggataaggagcatagattatggaaatctcaaaggaacaaatcgcgaagatggccgaatcctacaagaaggccgaaacccagcacgtggcccagcgtgcggtgaccaagaacggcattctggagtcggcggaaagcgtggaggtgctcaagcgcatgagccccaagaacttcgcgttttccatcgacgtggacgaccaggccgtggccaaccagaagatgtcgggccgctgctggatgttcgcctgcctgaacgtgctgcgcttccacattgagaaggagctcgatctgccgaagggcaccttcgagttgtcccaggcctacctggcgttcttcaacaagcttgagcgcgctgcttggttcctcgagcacgcggtggccacggccgacaagccgctggatgaccgcgaggtcgactggctgttcacgacgcccatggccgacggcggcgactgggatatggtgtgcgccctggtgaagaagtacggcgtggtgccgcacgaggcccaggccgagacccactgcaccaacaacaccgccgagctgaacacggtgctctcgcacctgctgcgccaggacgccctgaagctgcgcaccatggcccaggaggacaaggacactgcgtccgcccaggaggaaatgctcaacgaggtgtaccgcgtgctggccgtgtgcttcggtgagccggtgcagaagttcgacttcacctacaacgacgccaagggccactaccatgccgacctcggcatcaccccgttggagttcctgaagaagtacgtgcccatcaacttggacgactacatcggcgtcatcaacgtgcccggcgacgacaagccctacggccgcatgtacgccatccaggattccgaccagattcccgagcgtcgcaacctgtacctgaacgtgccgatggaggagctgaagggttacgtcatcgactcgctgaaggacggcgagcctgtctggttcggctccgatgtgctgcagcactgcgatcgcaacgccggcgtcatggacttcgatctgtacgacctcgaggctctgttcggcgtgaagttcaccatggacaaggccgagcgcttcgccacccacgagagcctgccgacccacgccatgaccatcgccggcgtcgatatcaaggacggcaagcccacgaagtggaagatcgagaactcctggggcaccgagaaccacggcatgaaggccggcaacaacggctacttcgtctgcagcgacgagtggttcgacaacttcgtctacgaggtggccatccgcaaggatcgcctgagtcccgagatgcagaaggcgctggactccgaccccatcgtgtggccgttctggaacaccttcaacccggtttccgcctaggcggcaatcgggcgccggccgcaggggttccgcacgggatgccccaaggtcggcccctgcgggcggcttgtgcaagtcgcgcgcggcaactatccgctgtccggcggggtgccttttccgggaatgacgtcccgggaaggaaagcccgccccgccgggccctttcgtgaggggtaactatgagctcccaaactacaactcatgcggccaaagcgccggcgaagggcgcagcgaaggccagcagtggaacctatatcagcctgatggctctggtcatgatgaacgtgaccatcatcggcagcgtcgccaacgacgtccagcaggcttattacgggctgtcctccgtcacgctcttcatcatcggcgctctggtgtttttcctgcccaccggtttggtggcggccgagctggcttccggctggggccagcgcggcggcatcttccgctgggtcggcgaggctatgggccctgggctggcatttacgtgcctgctcattctgtggttccagacctccatcaacttcggtatgggcgttgcctcggcatcggccaccatcggcttctacacgcctgattgggactgggccgtgcagttcatgaaccatccggagaaccagttcttcatcattctggcgtggctggcctactactggggcctgaccttcctgtccactaagggcgtgaaggccttcgcccgcttgaccaagtacggcgtcatcatcggcacgttcatcccgctggcgttcatcgtcattttcacggtggtgtggctcgcccagggcaacgtgtccaacgtgacccccacgcccgaggcgttcaatcccttcgctgacggcttcagcctcaccaacctggccttggccgccggtgtgttcttcagcttcgcgggcatcgatatgaacgctgcccatatcaagcagctgaagaagccgcagaaggaattcccgctgtccatcttcatcgccatgatcctgacgctgatcatcttcatcgctggtaccgtgtgcatcgccatcgtcacgccgaaatccgacatgaacttggtctacggcctgtaccagacctataagatcctcggcgccacgttcaactgcccgtggatttacgtggccttcgtgtgggtcggcctcggcgcttccatggcgtcgctcgtcaccaacatggcaggtccctcgttcatgctcggccaggccggccgctccggctttttgccgaaggtgctgcagaactccaataagcacggcatgccgagccgccttatgtacctgcagatgacgttcatgaccctcattgccttcctttgcttcctcattccgaacatcgagggcttcgtcgtgctcatcacccaggccatcaccatcctctacatgatgtactacgtgttgatgttcgtctcgttcttgaagctgcgtcacgaccagccgaaccgtccgcgtctgttcaaggtgcccggcggcaacgtgggcgcgtggcttgtggccggccttggtcttctggcctgcctgttcggcatcgtgctggccattatcccgccggcccaggtagccgaggaagtgggcagtccggtgacctacgtggtggttatcgtggccatcatcgttgtcaccttcgccatctgcttcggcgtgtaccaggcctccaagcgccatcattgggccgacccgaacaatgtgttcgcgccgttcacctggcagatcgagggtttgaagaagccccagaaggttctgtccaacgtgccgtccgagctgatgagcgagggccagaaccccatgggcatgcccatcaagaagctgtggaaccccagcgagcagatcgtgcttcccgacgagtacgtgccgggcaagcatcatccgtcctctccggctattgaggccggcgacgatcctgcggccatgaaccacccggtgaagaccagcggtacgtccatcggcgcgctgggtgccatccccctaagccagccggcgatgatttcggagaaggccggtatcggcacgtcggccacggtgggtctgaagaaggcgactcagacggtccccgtggaaggcgccgaacccgtgcggcttgatgcgaaagtgccggcggcgcctgctgatgaggtggctgccgaaccggtgccgcgcgacccggcggccgacgccaagcgagcggctgctgccgaagcggcagccctggcggccgagaagtcctcgcaggacaaggcccatgccgaggcggtggctgccgaggcgctcgagcagcaggtggaagccgacagcgatttggcgtccgctcgccgcgaggtgaaggaggccaaggccgcggccgaccaggcgcgcaaggccgcgcgcggagctggtgccgaggcggcggctgcgcctgagaaggccgctggttccgccgcggatgcgggcgcgaccaagggcggcgatgctgccgacggcgctgccggtgcggcaggcgccgacggcgccggtgctgccaaggggtcttctaagtaagtagttcggaagggggccgcgccgcaggatgtgcgggcggcgcggccccctcgagggtaaaagaggtgttctcaatgagtgcaaacggaaagacaaacgcgggcgcgccgccgaaggctcccgtagccgtagccacggccgcgtccggtgcggcgaagggtgtctccgatgacgccacgaccgctcgcctctccatgccggaaaacaacgggaagaaagtgacgaagccgaccgtggccacccagcagaacgccggcgacgacttcaaggcgacccttaccgtgaaggacatggtggtatggggcctcatcaccatggtgcctatctcgcccatggccgtttacggcggcgtgttcgccgactccggcggcatgcccacgctcgcgttcctcatcgggttcgtggccgtgctgttctcggtgttctccttcggcatcatgattcagcatttcccgtcttcgggctctatctttacttatgtgagccacgtgttcggcaagctgcccggcttcatcgccggctggctgatgctgttgcagtacttggtaagcccggccatggtgtacctcatcgccgctatcgccatccacagtatgctgccggatgtgccgattttggctctgtgcttcgggttcctcattattgtggccatcgtgtcgcttatcggcatgaagaccgccatggtggtgaacaaggtggcgctggtagcccagctggcgattctcgcgctgttcgtcgtgtgcggcgtgatgttcgtcgtgcagcatcccgagagcgcgaatttctcgccgaccaacctgttcaaccccgccaagttcgagttcggcggcaccatgtccgctgtgtcgctggccgtgatgtcctacgtgggcttcggcgccatcgccacgctgacccaagaggcgaaggatcccaagcacgggccgtcgcgcgccatgatgatcatggccatcgtgctgtgcgtgctgtacgcgctgcagtgcttcatcgccacgtgcatcgatccgtcgggcgcggcctttgccggcaacactgacaacgcgttctacgccgtggccaagatggccgccggtccctggctcatgatcgtgtgcgccgtgggcgtggcgctggcccagggcgtgttcaccgctatcgcgcagcagaactccatcgccttcgtcatgttcaccatggccaatggcggctgcctgccgaagttcatggccaagatgaacaagcgcacgaactcgccgttgaacgccgtcatcttcatcatcgccctgtccgtggtgctgacgctgctcttccatttcagcggcatcgacatgaacaccgtggtgaagatctcgaacttcggcgcgctgtccacctatgtgatgctgaacgtgtcggtcatcgtgttctgctggttccagctgaagcagcgttcgggcgcaaaggccgtgttcatgcacctggtgttcccggcgctcggcgcgctggtgtgcttcgcgattctgatgtccgtgggcaccgtggccctggtgacgggcgtggtgttcatcctcatcggcatcgcctactacctggtgctgacccgcgtcctgcatcgccagatcaacctcgggtaggggattgccaatcgcgcaatcagaggcaagctgcttgtccggaaacctcaaaggcggggcgttcgcgcgagattgcgcggccgccccgccttttgctgcctgggcgctttgtatcctgccgacgtccgcttggctggtcgcatccgcttagcgagtcgcacccgctcggctggtcgcgcccgcctagcgagccgcatccgtttagcgagctgcaccccttggcgagcctcacccgctcggctggtcgcatgtgcctagcgagcctcacccgctcggccgcatccgcctagcgagcctcacctccttggcgagcctcacccgctcggctggccgcatccgtttggcgagctgcgcccgaagctctggaggggccgcgtgcaattttggtcttctctttatggcaagttttccgagggtttcgacgttacaaggcgatggcagatcaagctatcctagtaaactgtcgataaacgatagcattaggctcttcccggagcgagcttcggtttttcaagggaatacggccagctataaggtcgaaatcctcaaaaaacttgccatttttcgggctgcagcaagtatcgatgagcaggtatggcagcgtgggctaatgcgctggtgactatctcgggcagtaggcggcgatgccttccgatgggcctcttcggaagctggtcggctggattgacgccggcgtctcccgttgcgctggtgccggcggtgatggtcggcggcgacccttcccgactgcgttggtgttggctggcggtgccccgttgggctgcctggcggcgctgttccggaagctgggtcgccggcattcttgcgatattcttcccacagacgctctattcttcgtatggtctaggcgcaaaggtctcataggggtaaagggggagccctagctgtcggcgcaatctcagcttgcgggcatggtaattcccgactgccgtgcgaaatcggacgccttgcgctttgcggacagtctccacgatgacatccgtggcctcaacgctttcgagttcgttgttggtcagtccgacgacggcgatgcccatagcttgcagggcgttcgtccgtcgcgaatcgcgaatgcggcataggtcgcccgagtggaactcccggctctggtattcgacggcgatagaggcctcgggccagaaaagatcgcaccgaagggttcgtcgtccggagattgcggtggcttggggggtgcaggaaatttcgtagttcatggagggcatgccgagcccgtatcctccgtagaatgcgggcagtcctaggagaagcgcggcttgagtttcgcggggagaagcggagccgtcgacgagatatgaagctgcggcacgtgctcgctgggcgccaaaaagacgggaattgcgctcgaggaacccacgaattttacgcacgctcgtaagcggttgtgtgccatatacggtcgacgttgccagggtcttctgctggtatgtgccacatagctcgaatccgagaacaagggtgtccacgaaagaacgcagggaggcttcttggataaaagcaagtgaggggctggagagaagaatgctctcgttccagcgctgcagggcgtttcccgaaagggggagtctgcagaggtgaggcttgcggaattcagcggatcttggagttgacgtgcttgacgaaacgcagtggagcggcattggaatgccggcaggcaagtacgggtcgcacgtgcggatggtgaggtcgtttgcctgatcgcgactggctgcctttgacggaaagtggcggtggcgtgttgtggcgagggcgattccgcggcgtctgcagaaagcgtggacttggagagcggaaagatacccgaggcaggtttccgaagaaaggcttttctgggtcatggcacactcctcttgcacccggggcgaagaggatcttgcgaatctggtatgcggaaggtcgggcacggcttccgatcatgggctgcgctggcaggattcgcactggctcgttatcgatgacagcatcttatcacgatggtgcaacaaagtgtagagagctgcgttattttgagggcacgttttaggcaagtttttcgggggtttcgacattgcgaacccatagagtaggcgcaaaaagggcgaaacaccaggatttgcctttggaaaagagtttctgaagcctgctttgccacgaacgtgtcgcaaactttggaaaacttgccagaaagcaaggcgcttgaatgcaaggagcgccgatcagctgaggtgcttggatgatcggcgctccgatggctgagtcgtttaacggtcgcgaggctttgcgcttgacaggggtggaagtgcggcgctattccgtgtacagcgagaagtcgtccttgccaacgccgcatacggggcaaacccagtcttcggggatgtcctcgaaggcagttcccgcagtgatgccgccgtcgggatcgcccacagctgggtcgtagatgtagccgcatatgtcgcagatgtacttgtccatgagttcctctattctcgcactggccgcacgatgcgtcttggcggcccgacgaacaatgcgcgactatgatgccacggattgggacggcacaccctcgcccagcgcaactcgaaactgattcgtgaagaatgcttcgaatgcgccggccgcctgatcttaagcgggctgcgggctcgccatgggtgcacgaagtggagacggcgagagcatcgaggcggcaagcagaggcgtcgtgagctactgcatcacctcgtgcagggccgcttccagggccgcgaggtcgtcgggggtggtggaccagctggtgacgaggcggatgacggtgcggccgtccccgagcttttcccaggtgctgaagcggatgcgctcggccagcgcctcgacctgggcattttccagaaccacgaactgttgattggtggggctttcgcggaagaaggtgcacccggcctcgcgcaggatgcggcgcagctcgtcggcggctgcgatggccacacgtcccacttcgccgtacaagttattggtgaacagcgtgtcgaactgcacgccgagcagacgccccttggccagcagggcgccgtgctgcttggcgtgggtgaggaagtgccggggcatgccgccgcgcgggaacacgaccgcctcgccgcagagcgctccgcatttggtgccgccgatgtagaaggcgtcggcgaggcgcgcgatgtcggccagggtgacatcggtgtcgggagcggccaagccataggcgaggcgtgcgccgtccaggtacagaggaatctggtagcggcgacagagtgccgagagctcctccaattcggccagggagtacagcgtgcccagctcggagggatgcgcgatgaacaccatgcccgggaacaccatgtgagtgtagctggcatcggcgtagaaggcctccaggtaagctttcacgtcggcggcgcgcagcttgccgtcgcattcgggcacggtgagcaccttgtggcccgtggcttcaatggcgcctgcttcatgaacggcgatgtgccccgtatcggcagcaatcacgccttcgtgcccggccagcagagccgaaatgaccacggcgttggtctgggtgccgcccatgaggaagaacacgtcggcggtctcgtcgtcgcaggccgtacggatgcgggccgccgcgctttcgcagaaacgatcgccgccatagcccggcgccggctccaagttcgttgccgccaacgcttcaagaatgcgcggatgggcaccggtggaatagtcgttctcgaacgagatcatgagtcctcctcagggcttcccggagatgtgtgccgtgctattattccacaacgtcgaagatggtgtcgaaaggcggtaagcgagatggcgatcgacaaggtgaaggcgtattttgcggaattcgggcgcgagggggacgttatggaattccccgcatccagcgcaaccgtggagctggcggctcaggccgtgggctgcgaaccggcgcgtattgccaagacgctgtccttcgccgtgggcgaccgggtggcgctcgtggtgtgcgcgggcgatgctcgcatcgcgaatccgaagttcaaggcccagttcggatgcaagccccgtatgcttcccgccgaagaggccgaggaacgcatcggtcacgcggtgggcggcgtgtgccccttcgcggtgaatgaggggtgcgacgtgtacctagacgaatcgctgcgccgctttggcgtggtgtacccggcctgcggcagctccaacagcgccattgccctcaccctcgacgagctggctgcgtacactcccggtagcatctgggtcgatgtctgcaagctgcccgagtagggtcaggtggatacgcctacgacggccgcgcaggttagccaagccttttccgcaatgcgagcggcggcgattcgagcggtttcgccgatgggcttggcttgatgtgtcgcttgcggaacgagctagaattcagttaccgtccgagtcttcttgatcagagcatttcatgcgctatgcccgggtgagttggtcgtcgaggtcgactagctcttggcgggagtgaatgtcgagtttcttgtagatgcttttggcatggccgcgggtggtgttttccgagatgaacagcttgccggcgatggccgatacggtgtggcccttcatgagcagctcggccacctcgatctcgcgtggggagaggccgtgctcttcgaggtagctgtggatgcggcgctgttgctcggaggggccgtcgctgggcgccgggccggcttctgtactcgcaagagcatccaaagagcgtggctcgctttcagtgcgggctgtgccgttttcggtcgaggaggcgtcgcgtcggccatcgcgtcggccccgtcgcaaagaagcgccgcggttcagcagttccgcgtcggtcatggaggccagcgcctggccctttccgcgcgtgaccagaatgagcgcgaccgacagcagcaccacgcaaagcaggatgacgttcgtccaatgggcgaggtcgtcggaaagcgccggccccagaagttcggccagcccgctgcccacggccatggaaagcaggacgggcccgatgcacagggcatacagcggcgaagagggcagcccgtttcgaatggtgtacacggcgcaggtgatgatgagcagcaggttcaccacttcgaagccgaacatgagaaacgccacgagcagcgtcgtgtactgctgcccgaatagcgacggcagcaggaacacgacggtgagcgcggggaagagcacctggcagatatgcaggatgtcgaagcccttcgagagaaacagctcgagggccaccaccaaaagggccgccgccgcgaaaccgacgagcaccgcggcgccgccggagctttgggccggctcgatgccagcgatgagcttccacgaaaacccgaggatactgacgcagagcacgggccgccataggtcgcccacggcgcgtcttagggcagggcgcgtgaggggcgccgtgacgtcggcctcaatctcggcgaggctcttctgaaggcaaagaagcgccagaaacggcagcacgcagacggcggtcagagccacagcgattgagggcaggaggcaaatgagcaagtagaggcccaccgacatggccgccgaaaggggaatgcagatgagagcgcgctgctggccttcggttacgtagaacatttcccaaagcaggaagaacaaggcgcaggagccgcccatgagaatgcctgctgcagctgcgatcacgccgtcgccttggccgaaatggaatgcgaggaagtagagaagcgcggctccgctgagcatgaagctcgccgccgaggccgtccagtggggaagctcgcaacgacggaaggcgcacagggtgcccagggctcctacggccaggggcatgagcgtctgttcggtgagaatgtagatctgccaatagtcggcgatagcgcccgcgccctggaaccctgcgagcacaatgaaggtgacggtccagaaaaagccgaaaccgaggtggtgtattcgcagaccttccaaaagccttttggcgcgttgcatgtggcatccttcctccccgctgcattttagcagccgcaaccggtggcgagaggtggagcgcccaacaagtttgcggtgacgatcggctgtgaactggggtttctcaaaaacaacccaaaatatgtccccctcaaaagcgtgatgccgcgccacgtttcgggttcccgttgctgtgaatttacccaatttggtggcttgcgcggaacggcagaagggggcatagtacttctcgcgttccgccaatgagagggccggggcgtcggttccaacttcccgcggacggctcgggcaaagggctcgggtagctgccgcggaaggttcgaaaccgttcagtcaccgagactatggagggaaaacatgactggaatttctcgtcgcaacttgctcaagggcgctgctttcagtgccgccggtgtggccgcactcggcctggccggatgcgcgccgcagaccgaggccaccaaggctgaggccggcctggccgagacgggtgagactgccaagcacacctgggaagtgaagcccgagcccatcgcggccgaccagatctcccagaccgtcgacaccgaggtgctcgtcatcggcggcggctactccggcagctgctgcgcgctgtccgcggcccagaacggcgccaagaccatcctcgtggagaaggacgccgtgctcaatggccatggcgtgggcggcaccggcgccatcgcctcgcgcgccctggacgacctgggcctgaagttcgacaagtccttggagatggagcgctgggtctccacctgcggcaaccgctgccgcgagtcgctcgtgggcaagtggttccgcgagtccgagcgctgcatgaactggttcctcgacatggccgaggccaacggcgccaactgcatggtcaccgtgggctccaactccacggtgcacccggagatcgcctgctaccacttcatgtccggcggccccatcttcgaagagcacaccatggccgacttcgtcgagtacatgttcgaggccgaggccctgaaggccggcgccgagttcgtctacgagatgcccgctgtgcagctggtgcaggacgagtccgggaaggtgaccggcgctatctgccagaacaagtccggcgagtacgtgcagtacaacgcttccaaaggcgtcgttttggccacgggcgacatcagctacaacgacgagtacatcgatgcgttcgcgccggtggccaaccgcgtgttcacccgcctgtgctccgaccagggcaacgtgggcgatggccacaacatggcggcgtgggccgggggcgccttccaggaaggcccctggccgaccatgatgcatccccaggccgcggccgtgttccacgggcccttcctgttcgtgaaccccgacggcaagcgcttcatgaacgaggccacctgggtgcagggcaagtgcctcggcgtgatgtacaacggcggttccgatcacgcctggtccatcttcgacgccaactggcagaacgacctgaagagctcgctggagcacggcggcggcatgttctgggacaccttccgcccctacggctccgactaccaggtggccgtggacggccatactaagaccgtcgagaacggcatcgccgagaccccggactactacaagcgcgccgacaccctggaggagctggccgagctgatcgaggtggatccggccgagctgaaggcgaccgtagagcgctacaacaagctgtgcaaggaaggcgaagacaaggacttctacaaggagaaccacttcctgttccccgtggaggagggccccttcaccgcgtgcatggtggcgccgggtctgctcgccgtgtgcggcggcatccacatctcggacaacttcgaggtgctgaacgagaacgacgagccgattccgggcctgtatgccatcggcaactgcgccggcgacatctacgccgtggactacccgatcaacatccaaggcaacagccacgggcgctgcctcgtgcagggcaagtgcctcggagagcagctggccggcgtgtaccaggagatctagtggctgcggaagctacgaaattcggggcagtcgctgttgcggcggctgctctgggggcggtggcgatgtcggtggaagctgcggaagctgtggaagctgcggaagtcgtggaagcggttgacgcggagcaggcgttcgggcggctagagcgcctgtacgcccagctgccggcgatggaagagaagggcgcggccttggcgcgcgcccgctccgctgccgaggtggacggcctggcgaaggcggcggcctatcgggcggctgagctcgcccgggccgatgcgctggtggccgaggcagaggcttgcgtgtgtgaggccgaagcggcgctggcccgatcggaggccgccgggggagatgctgccgagaaggcggcgcacctgggcgacttgcgcctcgcgctgatggccgctggcacccagcgcggcctgaaggtggggccggcgcaaaacgccgagcgcgccctggcccgagcgttggaggcgagtcccttcgacacagtggaagaggcccgtgcggccctgctgccggcggaatcgctcgccgctttgtctgccgaggtgcaggcctaccaggccgactacgccgaagcgctggcggtatgccagcagttggaagacggcgaagagtcggagggtcttccgcaatcggccacctcctagtcgttagaaggccgcgaggttccgggggctcttcgatctgcgaaggcctgaggaacctcggttcgccaacccccgaacaatcccgcgcgggcgcttccctccctgcgcccgctccttttacgagccgcccacctcccgggcggctcttttgcgatcggtacgacctttttgctcctttggcatcgccggtttcggtggcacctatgtggctaccttccccgaagcttccgagtctccaacatcacctagctctccaatgctttcgtgagggagcagcttgtcttgtcggatcctgcacgaaataccgctctgctatggagcagtgcaagatggtataaaagagtgtaaaagagtgtaaaaaggtgtaaaagagtgcaagagcgccttcccgaaaaatgcgctgataatctggcagtcatagagctgataatcttgcagtggagcgtccgataatctggtaccccatcatcccttccccgagtttacccaagtcggcggcggctttcctcctgcggagggatgaggcccttcgtgcggaacagctcggcggcggccatgtcgcggttgcggtaggggaagggacgacctgcgatgaggcagcctatgaactcgcgcaagaaggtcggatcgggctcgactccgagcggaatgttgcggtagttggcccgcacgagcgcgttgcggaactgcagcgacgagcggtcgaaggcctcgctgcagtcttgggggaatccgtggaagtgcagcagctgctggaggaacacggcgacggtgcgcgtattcccttcggcgaaggggtgaatctgccaaatgcgcgcgatgaagtcggccaccgaggcgatgtagacggtgtagtcgcctccctgcgcgggagcggggctgaactccgagaaggcggtttccaaatcgtcctcgagggaggcgtagtccccgtaggccaccgattcccgtgcgaggacgaactcgcgcttcgagatgttgtagtcgcggtagtgctgctcgtagaagggctcttccataaggccgcggaagaggcgcccgtggatggcgcgcagggtggcgggggagaaggtgaacccgttggagtccagagcgtcgcagatgcgggcgctgacgaggtcggcctcctgggagtagcggttgatgccgcgttcgaccttctggttgtagtagtcgtccaccatatcgctcagctgacgggcgttgatgtcgccggcaacgtagcgttcggccgcatcgtcgaagacggcgctggtggtgaggccgtcgacggcttgcagtcctcgggctccgcgcacgcgtcggtcgcgcacctcgtaggaataaggctctttgtagcgctcgtattccgattccgtgcccacgggcctccttcctgctgacgacttcgagctattgtagcacgatccccgccatgcgccgcttctgctcaaaggctggcactggtatgctagaaaagcgcttcgaagaggactttcatgcacattcgccatgctcttgaatccgtcgtttgctggtatttcgactatttcatgactggggtgtcttgtgcgcatgacagacgacgcattctccgcgaacgggagaacttgggtcttcccggtctgggtgatttaggctgggggctcggcctattttcgttggcggcttcgctcaggtagaattgcggcgtgcgacgaacgaaggagggcggctatggatttgaagagcttgcgggcgttcaagaaggtgtgcgagacgggcagcatttcgaaagctgcggacgccctttacatcacgcagccgggattatcgaagtcgatggcgcgtcttgaggcggagtgcggccatcagctcttcgagcggacaagcaagggcgtgacgctgacgccctacggacgcgccctgtatgcccgcatcgatcagctggtggccattatggacgagatagagagcgaaacgctcagtcttcagcggagccggaagctgaaggtggcctccacgatcggggtgcttttgtacacgggcatggcctttacggacgacttcgaggcggcatttcccgaaatcgagctgttcgtggaggaggggagcgatcggcgggtcgaggagtggctatcctccggtgccgtggagatagggtttctggccgggcccgttgatcgagctcgctacgatgcgtggctgttcagtcggcaccgtcatgtgctggatgtgcgcgagggcgattcacttgccgggcggcctttcgtcgagcatcgcgatttggacggccgcattgtcgccctcctttcccgcgattaccgtccttacgaaaacaacgtgcggtggctctcatggcggcgcgcgagggagccagcgtcattgtgctggagagccagtctggcacctcgttctcgtcgaccgcggtgtgcaagggcaactactgcgtcatcggttccgacgagcagaaagctgcgggcatcgaggacgacgtggagctgttcgtacaggatgcgctggcttacggcgtggatgacgacgcgcttcccggcaacaaggaggaggtcattcgcctctatgcggaaaacagcctcgagtgctacgaccttctgaaagagctaggcgtggaattctcagctccctacatgctggccggccactccgtctttcgcgtccaccgtgtggacaacgccgacatgcagagtcgtctgacggcggccgcacaggaggcgggcgcgaacttcctgttcaacactgagttcgaagaactcatcgtagatgcgacgggcacagtgctgggagctttcgccagcgatgggggcaagaccatcgccgtgaaagccaagcgaggtgtcgcgctgaccacgggcagtttcgtgcgcaacagcgccttagtggacgattgtctgccggggctgtcgaaggtggagctttccaccggcgctggcgccacaaggcaaagggcatattgcggcgctgaacctgggcggccagctttatgggcgcagcaagctgcacgccaccgagggcttgtaccccgaaagcggccacggcgactgcgagattccccagtacggcgctattgccgtggacatgaacggcacgcgctacatcgacgagggcagctactggtccaacatgcgcacccgcacgctcatctcgaagggcactcatcccgagttcggctgcttcatgtcgtggtacgtcatcgaccggccgggctacgatgcggcccgcgaggccggcgacaacaacgccacgacgggcatcaacgaggaagaggccaagatggtggtgtccgccgataccatcgaggagctggccgagaagattaacgcgccctatctgccggccacaatggcgaagtacaacgaggacatggctgctggcaaggacacgcagttcgggcgcacctcgaacaatggcgagggaaccggcgagccctatgcgcttaccacgcctccctattatgcttgggcctctaagatgatgctggaatacgccccgacgaccacgtttttggccaacggcgagtgccagattctcaaccagtacgatgagcctatcggcggcggtcggcttctggcttgcggcgagctgattcaccgctccatcgtgggtaaccactatctggttggcacctccatcggctcgtgcactaccctcggcatggttatcggccgcaagctcgcccagatggacgcctgggaataatcgatctttgcctgtggaaagcgcttgagatacgcccccctccctgggatcccgccagttgcgcgctgggggatcccgctatgatggtcgtgaaagcggtaccgagaggccgcggaaaggaagtaccccatgaagcacgaatgcaaggtgacggttctggagacgaaggtgttccccgacctgcagcgcgagtacctggccgatcccgagagcgggccgtgcccgtgctttgcggccgggcaggagttcctgttccgccgcgaggccggcgccgacgatctggcacttcgggcgcgacttggccccggcgttcccctgcgccgaggcgtgggactgcatctcgcgctacatctacacggcgctgcagggcggctccatcatgcacggctggacgcgcgacgaccgcctcatggtcgcctgctgcaacgacggcacccgcccggtcgtcttcaagctggagcgcatcgacatccccgagaccctcgaggaggaggcgtggctcgcgtcccaggacttcgccaacacccccgaggatgcctacacgggggaggagtagaagaaggatgcatctttcttctgggggcaagttgattttcattgttagccgaacgcttgcggcatcaatgacgttttcgcagttagccggacgggcgctcgagcgcccgtcctgtgttttcccgggccgatatggctcggaccgcggcaaaacggggtgttcggctgagttcggggcatggctccgccggcccgtccgggtcggatttcggactcatccggacggctaatgtgcgatggcgaaatggggctcgcgaggttttcccggccgtgcttcccctcgccctcgcccttgtgcccgggctcgccttcgacgccgcgggctttcgcctcggctacggcggcggcttctacgacaccttcctggccgatttccccggcaccaccgtgggcctgtgccgcacctgccagctgtccgccgtccctctgccccgcggcccctacgacctgcccgtgggcctcgtcgtcaccgaggacggcgacattattctctgagccagcgttgctctctcgctgaaagagaggccccgccgcagcgcggcggggcctagggagggctgctgattgaggtgactactcgtttgcgagggcgctcgcggcggctatgcgaccgaaagcgaggcactccccgagattgcctgcgccctggtagtgtcccgaccacacggagccaaactcgccggcagagtacagatgagggatggggttgccctccagatcgataacctcggccttggcgttgcgcacagggccgccgtcggtgttgagcatctgcggccgctgcatcatgatgtagaagggggctgttttaatgggagtcagggtgctgggcggtcgaaagaaagagaggtccttgccgttctcgcagtaggtgttccaaacggtcacggtctccacgaattcctcgacgggcaaattcgcttgggcggccaggtcctccaaggtatctgctttgtagccgaagccctcggagacagggtcggttccctggaaagcgtaggcaccgttgtccatggcggcttggtcgcacacgaaccagctgatttcgggcatgggaagcaggtgccagtcgccgccgaattgcatatggccgtggcgcgatcccacggcggcattcatgggggtgccgtcgtagaactcctcccaatcaaaggtgcagcacgcatcccaatccatataaaaccggcgtccgttgctggcgacggtgatgccgaggttcttcagggggctacccgagccgttgtatttaccccagcctgagtcgtcgagtttccggatggtgttccagaaaccggctccggaattcatatgccacatgtcagcgttgaggagtgcgcagattcgatgaccgtcaccggtgttctcctgggcggcgatgggcgtgacggtaggttgcgagaagtaatttgccatcatctgggggttgctctcgaatccgccgcaggtcatgatgacgcctttcgtggctcggacgcgcacttcggtgcttccgtcggtgtagatgcccccaagtacggtcttggtgtcggggtcttggacgagggctttgagggggcactcagttttcagggtgatggaggggaggctcccgagtacttcgttcataaacttcgtcacatggtcccagcggccctccgcgctgaaagcggcatagtcacaggccgctgagtgctcgagctcgggatattcggggaagcaggcatagtctgtcgtgcctgggacgatggtcagatcggcttcagtcgcgcccaattccagtacccaatcgagattcctcgtgagttcggcggcgtaggcctccaggacgtcgtcgggcgtgcccgtatcggtatggcggagctccttaagatagctcagggcgtcttgctctcgttccgaggatgtatgcatgaaccagccgctcgagaacgggctgtttccgttgccgagggggcttgcccctttttccagtagcaagcagcgggcttcggggtcgctcttggcaattgcgacggcggcgcttgttcctgccaggcccgctcccaccacgagaacgtccgtctcttcatcccacgtgaaatcagcggcggaagacgcgtccatccccgatgccttcttggaggagtcgcatcctgcaagccccatgcccgtcaaccccgctatgaggagagtcgtacctgcggctttcataaaagatcgtcggctttgcgtttccatgttgggctcccttactcttcgaccttacaggctgcatggcatgtcaagttttgttaccatgcagtgggtcgatagtggaccgcggtcggcggtggggaaactcccgttattgggtattttctgggaaaaggggagttggcttctctcccaaaagtgggcaagtttgttccttgagcaggaaaaacgctaggactgcatgagtgagttgtctaggtttacagaggaggggctgtggaaggcgcgagggatacgaggggctggaagaagtgctggtgtcttctcgcggtgctgttttgggcttcctatttgcagcacaatctttaccacaccactctttttgcagcgttcggggcgaagggtttctggatattcgcccttttttccgcgtcgctggccgttgcgttggtttctgctgttttgttccataccgctgtcttaggctggtttcggctgcgtcgcacggccctcattgcggcggccgtgtcaaccttgggaacggctgcgctgtttttggctcctcgtttggccggggagacgattggggttgtcgtgggattggcgggggccgtgtgctatgcggtgggctttgctggaatttcgttgcgtgccttcgtgatgttggacttctatagccggcagttggggctcaaggcgtcgctgcgcctcatctccatcgcctttttggccgcgctcgtgttgttttcctcttccgttccgagccccttttatgcttttgctgccgtgggcggcttgggattgagcggagcaatgcaatgcctgtttggcccccttgacggtacggcgcgctttcccgctgattcatcctctcgtgactttggcgtctataatcgtggatggcgcttgttctatgtggccgttttctctgccgtgtttcttcatagcattttatatgcagccgacccctccttggagtttctgggagacgccccgctttctctggctacgtctttccttctcttgcttgcgctcgccgtgtctttgttggcttcttcctcctcaaaggaggggcactactggcgggtcgtctatcttgcagggaacggatttctcgccgtcttgcttgtcgggctgctcgcagtgagtttcttctcgtttgtcgaagaggacttttctgtcgctgcgggaatcgttctagcgctacttcgcgtgttcgacgtgcttcttcttgtagggcttgtgataagttcctattcgaggaaatcggattacgttcgttccgggtctctctacttgttggcgctttactggctcccgaccctgttttcctatgtgttgctccctctggcagtgggcgaacgcagcttggacgtttcggcgttgcttggtccgggctcgcttctgatagcgggcatgcttgccgtggcgctcctcgctcttctcgcatggcttgttgcgaagtcggttcctccggaggggccgaagggggttgccccgggtcctgagaatcgtcgagaagtctgcgaggcgcttgcgcagaggtttggccttacattgcgcgagagcgacgtgctttactatgcgtcgctcggctactcgagcaaggcaatcggagaaagcctctttgttgcgcccggcaccgttcaatcgcacaccaagcgcgtgtacgcgaagttgggagttcattcgaagcaggagctcatcgagctggttaacgatgctcagacctcttcgacttgaggttttccggtctcactgccaagagcggcctgttctgcggcacgcgaatcgaccttggctgcagtgcccccaaggagggggaggcgagcgcgtcggaggcaccgacgggcgataaacgatcgccgctaggcgaagacgccgctaatgagtctctagaagctcgcgggcacggcgtcgcacgaagctgcccaggcgctcgagtcgattcctgctcaccgttttgccctctgggtgcgactggcgatagcagcct

SEQ ID NO: 10528 - DNA, 17903 bp, Unknown
  gut microbiota DNA sequence
gggggggggtctctgtgcttttgccctccggcgtggcgaaggcggccgcgggcgccagcccgcccgccagcaccgccgccagcccgaagcgcagaagcgaccccgatcgcttcccgttcatagtgggtctccttctctcgttgacgtagagttacggcgaatataccgcttccggccccgcaacgcaaccatgagccgcccgctcaacggtaccgagtgagatgctccgatcttctagacgaaatctggggaatcggaagtccaaaggcattccgtctttttggaatgatgctggcgaaccttccaaaatagtgaaataatagtgaaattggaatttcactatttgggaggtgcccgtgatatcggtctcgctcacgacgcccatgctcaacagcattctcgctatcgagcagtgcaagaccacattccagggcgatcgcgtgccgcctcggctgtccagccgcatgcgcaagaactccaggaagaagtcctcctacgcctccaccaagatcgaaggaaaccctctcacagaggagcaggccgagcaggctcttgaagacgtccatcgccactttctcaagccggaggaagaggtgcggaactactatgcggcgcgccagatcatggaggagcgcctgaagcaagaggcgtcgctttctctggagctgctcctggaaattcagcgcacggtcgtcgccggttcgagcgctgagaagatcggcctgcgcggtccgatgccgccgggagtgctgttcgctgtctacgacagcgtgaccggagtgcccgactacatcccgcccgaggcgtcagaggtgccggcgctgctcgacgagcttttctcctatgtggaagactccgacgaccatcctctggtaaaggccggggtcatccactaccaaatcgcgacgatacatcccttcgaggacggcaacggccgcacggcgcggctcatgtccggctactacctcgacctctgcggctacggcttcggcggcatggggtcgctcgaggagtactttgcctacgacgtcgacgagtactactcgtcgcttcagatgggccttcccgccctatactacagcgggcgcgagaggccgcctcatccggaaatctggatggagtactttctccgcatggtgcagctttacgcccagaagaccagcgagctggtcaacgaggcggccgcaagccagctgaacgcctcgctctcccatctgtcgcccaaggagcgggccttctacgaacaccttctcgacgagggcgtggaagagtttgcccccatcgatgcggcgcgagccttcggcgtgaccaaccgcacggtgatcaactggagcgccgccttggcggaggtcggcctcctcgagccccagctggtcaagcaacgcataaggagctaccgggtcgtgcgaccgtagagtgcatccgaggaaatgctatagggcaattggctgcttggtgcatttccgatttcgtgtacagcttgtacatgaaaatccggaattttgcgtacaggttgtacacgaaattggatatcgatggcagttcccgcctggatgagggatctaaaatacgaaatagtgaaacaatagtgaaatcgaatttcactattcagaaggtctctctaccgcagtttcttcaggagggcccaggcgcgttgcttgtcggcgggggtgttcatcatgccctcgaagtcttggaagatgacggcggtgcggcccatcaggcggttgtcggcgtccagagtcacgggcgtgcggtaggcggccgaaagcgtctcggcggcgaaggcgtcgcaggccacaagggccaccgggtcgaggccttccacgatagttcgcacgtcttccgcgcccagcttgccctcgtcggtttccacgaccacccgtgccagcggggcggcgccgaattccaggctcgccgccgacttctccagggcctccagggctgcgtcgcccaagggggtctcgctcagcacgagcagcgtggaggttggcgcgccggtcaggtggctgccgtacagcatgagtaccgattcgcccgttacctcaaaaatgttactcttcacggaagaaatcacactccctcttgcgctgcgcccgcactcgcgataaaacattcctgtacatagtagcaaattccaaggaggcgcccatgtgcaccaatggagtcaacaccggccagctggaaatgatgatcgaccagatcgacgaccacattaagctcgagcgccgccatgcgcacgatctggggcacctggcctccgacgccgggttcgccacggtgggggggaagctgcatgatgtgatgcacctgctcgacgaggtgcgcgccgccctggacgaggccaaagaggccatggaagacgacgcgaaggatgccgccggcttcaccgtcgcccgcgtctaggcggcgcgaccgatgagcaacgacctcgttcgcttctccgtggccatgcccgaggggctgctcatggagttcgaccagctggtggctcgccgcggcctggcgaagaaccgcagcgaagtggtgcgtgatttggtgcgcgacgccctcgtggaagaagagtgcgcaacgcccgggggccttgtcatgggcacgctcaccattatttacgaccaccactccaacgatctgcaggagaagctgcacgccattcagcacgactacttcgacacgattatctccacgatgcacgtacatgtggacgagcacatgtgcctggaagtcatcgtcatgcgcggtgaaacgggcctcgtgcaaagcgtggcgaacctcattttgggcaccaagggtgtgaagaacggcaagctggcgctcaccaccacgggaaggtttatgtaatggcagacgagaaggtaatgctggggcatggttccggcggttccatgatgaagcgcatcatcgacgaggtgttcttcgaggcctacggcaccgacgagcttctgcgcggcgatgacgcggcggtgctgccggccctcgcgcccggcgagcgactggcttattccacggacagcttcgtggtgacgccacatttcttccccggcggcgacatcggccgtttggctgtgtgcggcaccgtgaacgacgtggccacctccggcgcccgtcctctctacctctcctgcgccttcattttggaagagggctttcccatggatgacctgcgccgcatctgcgcttccatggccgaggcggcgcgcgaggccggcgtgcggttcgtcaccggcgacaccaaggtggtgaaccggggccatggcgacggcatctacatcaacacgagcggcgtgggcgcccttgccgagggcgtgaacctcggtggcgcgcaaatccgccccggtgatgcggtgctggtgagcggcaccctgggcgaccacggcatcaccatcatgagctgccgcgaggggctgaacttctcggcgaatatcgaaagcgacgcggcgccgttgaaccacctcatcgccgatgtgctggccgcggcgccgaacacccgttgcttccgcgatcccacgcgcggcggcattgcttcgacgctgaacgagctggccgagcagtctggcaccgacatcacggtggacgaggacgccattcccgtgaaggacgccgtgctgggcgcttgcgagatgctcggctacgacgtgatgcaggtggccaacgagggcaagatggtctgcgtggtggccgctgacgaggccgaggcggcgctggccgccatgcggaagagcccctatggcgccgatgccgccattatcgggcgcgtgaccgaggccgacccggcccgcggccccaaggtgttcctgcgcaccgctttcggtagcacccgcatcttggacatgctcgtcggcgaacagctcccccgcatctgctagttcgttacgcactccttagccgccccctgaaaagttttctatttctacttgcgcttcggctctttcatggtatcttgcgcagtgaagtaaccgggggcggaaagtccctgcttcatagacgaggattatcacccgagaacgaaggagcttcccatgtctcatcccgtaattgaagctgacgagtgcatcggctgcggcatctgcgttgacgcgtgcccccaggaagtgctcgaggttgtcaacggcgttgccgatgccgtgaacgaggaagcctgcatcgcttgtggcgattgcgtcgaggagtgccccatgggcgctatcccggagatcgtcgaggactagctctcaatttccggtaagtgcgattgagcgcggagtcttccagagtctcttttatcgaaatccattgaaagcccgttgctgctgcagcgggctttcttgcgaattgagtaaatgaacacgcaaaatgaggtagcctgtcgtaccttaaaggggtaaaattggcaaaatgaaaatgagttaccccgcgagaagcaacattcaggagtcacgtcgtatgcgaaagagcaactggatcatagccgctgtgcttctgctggcttccgttgccttcctctggatttggcatgcgctgcagttcgatctcgtggacaaccccctcgatattgtggtgacggttgtctggtgggtcgttattgccgctgcctgcgttgccattcactgggccgaaaagaagcgtcaggaacggatccgcacaatcttcgttgcgccggggctgctctacaacagcgagatgggagtggtgcgtctgagccccgatgacgaggtggtcgacgcgttgcaggcgattctctcgaaccttacctatgggttcgaattagccgagctgcctgccaactcacgggtgcgcttccagcgcatcgtgcattcctcgaagttcggtgacgcgggagccacctgggagggcgatgtcgtggaggtttcacgccccgatcgccccagggagttccatgatcgcaatgaattggcctctctggttcgcggcgccgtttagcaaatttctctgaacgactttctttatggcggcttcggccgctttttcttgcctgtcatttccatttcagaacagaagaatgacaaattcgtatcaaatgcaatgtcattactctatcaatatcctatcaacttgcggtagcgtcccaaacgttggtgtaggcgcctagaatctggtctgtattctataccatcatttacgccgctctccttccgatcgggttgtcggcgaccacaacttccatgatgcgcctggcgtgttctccggcggtgccgtcgtaggacggcgccggtgcggccgacttcgccgaagatacggccaaagctatggattcctctgtgaaccaccttctcgacgcccagtcctcgtccatttcggagaacacggcgcccagcatcctgatcagcgatttcctggacgggaagacctgcaccacgcggctgcggcgcttgagctcgcggttggcccgctcctggacgttgttggtgcggatgcgcctgtggtgcgcataggggaagtccaggtaggccagggcgtccgcctcggcatcctcgagcagccctgccgccctcgggcatatgccggcgatctccccgcaggccagatggtacagctcgcgcacgagggcggggtcccgctcgtcgaagaccgcgtgcagaatcgccagcaccgccgccctcttctgcctggtcggcgcgcacgacgccgcgttgcgcatgaggtgcacgatgcagcgctgccacgcggcgccggggaagacctcctcgatcgcgcgcctcagcccctcgtgggcgtcggacgtcacgcagaggacgccggaggcgccgcgctcccgcagggagcgcagaaacgccagccacccggcgcaggactcggtgtcgatcgcgtccaggccgagcaggcgccggtagccgtcggcgcccgcgccgatcgccgtgacgagcgcgcatgaggacacgtggccgccgtcgcggcacttgacgtaggtggcgtcgacccagatataggggaaggatgtgccggacaggtcccgctcctgcaggtcggccacgacatcgtcaagagactcgcatatcctcgacacctgcgaggcgctcatgcggtcgatgcccagggacgcggccacgcgctccaccttcctcgtggaaacgccgcaggtcaccatttccgataccgcggcgacaacggcccgatcgacccgcgagtagcgagtgagcaggtcctcggggaagtagcttccccggcgcagcttggggatgcgcaggtttatcgtccccacactggtgaccagcgcgcgctcgcggtagccgttgcgccggttgccgtccgcgcaggcgtcctcggcctgcgcgtccattatctcattgacgagcgactcggccatgatcctgattagctcctggatgttgaccatgccgtcatcgaatctgggaatctcggcgcactcgggcgcccgctgatctaaactgtccattgcggccattgcctttctgttgaatccatcaatctcgacaattgaagattctaggcgatggccgttcttcgcgcattgggagaaacgacgcttacaccaacgttggggacacgatccaacttgccgcaaaaagcggcttccctctttaaagctgcgtagaattctcatcgatattgaaatcactctgcattacgcgtatcgccggtgttttcggtatcgcactcacagcccgaaatgtgaggatgcaaggcggcgaaaaagccgccagggttaaggagaagttggtggaaatgaacacaatacagcgactcgccgacgcgcgtaactgcctcgagggaaagatcgtggcggtcgcgctctctctgcttatggcgctctcgttcctgaacgtctcggtgtttgccgatgctgcgctggccgtcgaaggcttcgatggcgaagtgggcgagaagacgacggagcaaatgccgcttgaaaatgatccggagaagacgtccgagagcgtttcgacgccgacgaatgatggcgccagcgagacgcccggccagaaggacgacggctccctcgattcctcgacgtccgatggcctgcaaaacgatgcggctgccctgatcgtcgataccgatgatgtgacggtgaagctgaccgctgcgggcgcgcttcccgaaggagcgcggctgacggttgatgtggcggaaaacgacgaaggcaagaccgccatggagaaggccctggaagaggggtacgggctgtaccgcatctatcgcctcggccttgttgacgagtcgggcgacccgctcacgctttctggcatagattaccgcgttaccgtgacgtggcgcggcacgtttgcgggcgaaatgaaggcgtaccgcattgatggccccgaaacggtcactgaaataacgctggaaaagccccttacgactcagggcgatatcaatcccaacgctctcacgttctccaccgagttgctcaatgctccctttgcgttcgccatgccgacgtccgaaaaggagggcgatgagccgagcgagcctgccgatccgaccaatcctgagcagcccgtaattacgggtgatgagaacatcgatgaaggcgatggcgacaacgctgaaaacggcaacggttccggaaaagaaggtgaattgcctggcaccgataacggcgatgccggtacaggcactgacgctgacgtggacgctccggagcagcctgcgccgtccgagcccgccgctaacaagcccgtcgatgactcggacaacgagcatcagctcaccctgtatgtgggcgaggttcgcgatctgcaccgtttgcctcttctggcggcacgtgggcttccgaaaacccggctgtggccgaggttgccaccacgggcaaggtgacagcggtcgctccgggagacgcggtggtgcgctgcggcgaggttacgatcaacgtcacggtgcgtccggctctgaccgaagacgccgaaggcccccagcttgcctacttctacttcctgccgccctccgagaatggtttgaacggcggtgccgcggtggcagctggcagcgacatgagcggcgctacgttcctagggtcgggcgccgtgcaactgccctcgggctatgacggacacagcgccctgctcaatggcacggtgctgcctctcagcaaggatgccaacggcaacgagatccgcaacaaggttgtgaatctgaacgagcttgtcgtctccggtccctcggcgcgggaagtgggcctcggcctagctgcctactacaacggtagcctcgacgagaatcgctccaagataaagtacagcgacatcacgggatactcctacgaggtcgttcgcatcgacggcaaggcctcgtgcagcgattacgacggcaatccgctgcagcctgcctctgccgtgcgcgtctatgtgcagatgcatatccagaccgccgacctgttcacggttacgtacaaggtggccacgcctacgggcctgctcacccacggagtgctgcatcgcacgggcgatccggctatcgcgcttcccggctataacttcgaggccgacgatcagacgctcattaccgtggacggtgccacctatcaggccaagcagcatatgagcgaaaacggcgtgacctactacttcgacggctggtatgaggacggccgctatcgtcagcgcgccggtgcctcctacgacgggcacgagtcggccacgttctacgcgcgctacctctcccaggaggcatccgaagcgacgttcgacgccaacggcggggtctttggcgacggcgctcctaccaagacgttccaggccgatgagggcggcacgtactggctccccgaggcgccgagccgcttcggctacgagttcctcgggtggaccaaccagagcacgggaagcctcttcgcggctggcgttggcctggtgatgggtgccgatagcgttgcatacacggcatcgtggaaagcctctccctcctctatcgtgctggacgccgtcggcggttctttcggcggcggcgcccagacgatcacccttgagggtgaaaccagcgcgttggtcgaccatgcggcggcttccacgccggtgcgcgctggctacaagttcgtgggatggtgcaccgacgctgatggctccggcccgctgctcaccgcgctgcccgaccgtttcgccggcggcaccatgaccctgtacgcccagtatgtggaagatcccgatcagtactacacggtgacctatcgtacttatggcgtgggcgtgctttcccagcgaaattcccttgcttctgagggtcacgagatcgtcgaccgcaacctggtgggctcgcatgccgaggggctcaagggagcggtggctcggtcgcagcttccggagtactacgtcttcgccggttggttcaaggtgacgcagggggaagacggccaggctgaatcgtggcagctggtttcgagcaatccagagctgactcccgaagtggctgccaagtacctcaactgggcagacgggaagtgcgccgacaccgttttcgaagcgcgcttcgactacaaccatgctacctccattgatacggttccctactttgtcgaatactacgtcatggacgatgacggcgcctatccggcgaggccggtgcgctcctatgcctccatattgcagaacgtgcgggagggttcgctttacgacatccccgagcgcgccatcgggaagaccacggcgggatacgatctgtccttcctggagcccgggaaggccgacgctacgctgggcgtcgagcccattgaaggcttcaaggcgcagcgttacgcgctcgatgaggaacgcaccactatgcaggttacctacgaggcgggttcccccctcacgttcaaggtgtacctgcagaagcgcttgggcattcgcttcgaggcgggcgcccatggcgagctgtcgcttaaaggcgccgatgacgtggccctcgcgacccccgaggccgttgagtaccacctgctgaagggctccgatttcccgacgtgccccggcgtgacccccccatgccgggtacaagttcacggggtggactgtgggcgatagctccgccgatagctacttcacgcgtcccgttgagaccgcgctcactgtggtggcccagtacgaggcgctgtcggcctccatcgtcttcaagtccgaccgtgactcggccgtcgagacccttacaggcgtaaccgacggggtcgtggatgccgcgctgccgacccccgtgcgcgagggctacacgtttgcgggctggtacgacaacaaggacttcgaaggcgacgcactggcggtgctgccgaaggccttcccggctggcgagaccaccttctacgcaaaatggacggccaaccgtgccgccatcctcttcgatcgcaacgccagcgatgccaccggctcccagaccggcgttgagggcgtgaccgacagcaacgtgccgggcaccttccccgaaggcacgggctatgcccgcgaagggtatgtgtttgccggctggaacaccaaggccgacggcacgggcgatgtcgtagcggctttcccggcgaccttcgctgcgggcaccacgacctactacgctcagtggaagctggacgtgcgcggcctggatgccgcggcgttctccttccggggtacctacaacggacgcgagcgcggcattgcgctgccgagcgcgctgaagatgaaggacggcgaaacgctgacgctgctggcggccgatggaagccccattgagaactcccagcgttttgccaaggacgtggctgatacggccgagaatctcaccgtggtcatctgcgatgccaagggcaaggagttgagccgtatcacgggcgtttcggtggtcattgagccggcgacgctgacggtgacgacgagctcgctcatttatcccttcgacggtaacaccgccacaagcgctggcattgcggtgacaggtctgcagaatggcgagacgatcgggtatcgtgcgacgggcgcggcctcccaggtgggcgacgaggtggagaacggcttcgagctcacgtgggccgatggcaccaatggctacacggccaaggaagctaattacacggtggcagccgatctgggcactatccgcgtggtcagctccgcctgtcccgttaaggtggaaggctacgtgggcgtttacgacggcgccgagcattccatcagctacgaggtggcggctgaggaagccgagaaggcaacgatcagcttcgacgggccgaccgcctacaccaacgccggcaaccgcaccatcaactacacggtggaatgcgccgaccatggcaccctgtccggctccatcgacatgaagatcctgccgcgtccggtgaccatcgccgtggaggactcctacaagatcgcttccaccgcggatcctgagttcacgggcgccattgtggaagggcatctcgtgcagccgagcgacttgggcgccatctccttcgtgcgtaccaacgataccgaggaggttggcttctatccggaggtgctgacggccaactacctgcgcaataccaattacgacgtgcaggttgttcccggtaccttcaccatcggcccggccggctccacggtggtgccgccgcgcaatccgctcttgccgccgcgttcgagcttgggcgcgggcatgccggcgggggccacgactccggctgatgccattgccggcgtggtgacgacgatggtcggaagccagcgcgccgctgccgtggccgagcagttcggggccgtggcgggcatcattctcgacgaggacgtccccatggccgcaggcgtctccttcgatagcgaggagcccacggtgacgcgtgtcggcggcgaggtcatcgaggacgacgccacggctctgggcgccttcgacgagccccactgctgggtgcactgggtgatgctcattggcgttctgcttacggtgggctacgctgccgtggtagtggcgaaccgcctcggttacgcccgcaggattgacgacttcaacaactcgcttaccagcacggttgcaaccgagactgaagatactcgcgcggcccgagtcgcccataaggcctaagggcgcaagcggccgcagaggccgacgagtcgcacggatcaggacgcgcgaccggcggccaactccatggactgcccgcacggatcaggacgtgcgggcagtcttgtcttcagatctgattgagcaggttcgaagaagggtgcgacgggttactgaacctgccagaactccgacttgtccgagccgacgcgatcgatgagccccaagtcgcgcagacgacggaagctgcgtcgtaccgtgctctcgctgatgttgaggttcttggcaatgcgcggtgcggtaaggcgcccgtcgatatcgagcatggcgagcactttctcgtcattcagcgtgaggctcgtgtcctgctgggtcgcccgggctcgcgccgtctgctgcacttcgggtaggtcagctcgggctaccggtgcggcgttgatggcgttcgcgtgcgttatcgaggcggtcaaaaggctgtcggaatccatggggaagcacaccatggtctcgtcatcgcgcagttcgaagatgggctcgggcgtgccggcttccatgcagctcatgcggatgcgcgagaccccgttgccccagccgtcgatgatgccgagcgagcgcagggccgccacgaaattggggttgttgggccgcgatgtgtggcgtccgaggagcgcgcccgcggtccaggtgcggggcggtcggcccacgttgtcgatgcagaggcggtcggtgaacacgctcacctgcacgggggcgccgctgtcgtagttcttatgggcgagcgcgttgagcacggcttcgtgcaccgcatcccgaggcggtcgaccatggccaccggcggtgccgagacggtaggtgccgcgcggggccggctcctcttccggtaggtacttctcaaagagcagctcgacggttgagtgcacttgctcgatgagggaaccgaagacctcgtcctcgtagatgggcgtgccgccgtgacttccaaaaaacccgatgcgcaccgtggcgccggggatgtactggtgcggccggttatgcagcaaaaggacgccggcattggtgggggtgccgacgccggtcatgaggcccgcatggcgcagcgtctgctcgatggccgaggcctcgtcaaggtcgaccgtgagatcggtatcgcgggccgcgccggtgaagcgcgtgacgaggcccatgttcaagtcgtccaagctggcctgcaccacgggacgctgctctcgcttgacgtcggcctccatatcgcgctgcatgagtcgatcgagtgcctcatcgtcaaggatgtggttctcgccatctttgtagaagaagaaaataccgcggaagctgatagggtcattggccggcggaataaccacctccaaacagaaacgaccgctgtcgagcaccaattccaccgcgcaggtgaggttgagcgattgcgcgataagcccgggaatggttttcatgaggcggctcgtgcgtcgcttcacggcgccgcggctgtctacgtcggcgtccaggatgaggcgacctccaccggcgttggcgatgccgcagaccagctcgaggcattccgtgtcacgccaagtggcccggcgcgcgataggaagcgaagattcggatgggagcatagtggcctctcttaccctggcagtaccgtcgcattacattatatataaacagctgctctctgttcgacggcgagaagaagggaatgccgggctcgttttgcaatgagcgatcgactcatagacataaatcgttcatatatcgcttcacgagaggcgcttaggaaagtgaagaggcacgcgctcaatttctttgaattccccctgataacagcattgttttagtttggcaacagaagctccgtgtcgtgcctgcaccatatttcggcgcgtattgtgctgggaagtgagcttgtctcactgaatgttgttgagaaaacttgacagcaccagactaaggttttatagtgcatctcaacatcattcatctatacgtgaaactgtgaaagcgaggcagtacacaatggctaagattcttggcatcgacttgggcacgacgaactccgccatggccgtcatggagggctccgagcccgaaattctggtgaacgccgagggcgatcgcaccaccccgtctgtggagggcttccgcaaggacggcgagcgcgtcgtcggcaaggccgcgaagaaccaggcggtcaccaatcctgagaacaccgtctcttccgtgaagcgcttcatcggccgctcctacgacgagactcccgaagagcagaagaccgtcagctacaaggtccagaagggcaaggacggccgcgcggtcatcgatatcgacggcaaggactacacccccgaggagatttccgccatggtgcttcagaagctgaagaccgatgcggagaagcaggtgggccagcccatcacccaggccgtcatcaccgtgccggcttacttcaacgacgctcagcgtcaggccaccaaggacgctggcaagatcgctggcctcgaggtgctgcgcatcatcaacgagccgacggctgcggctttggcttacggcctcgacaaggtcgaccatgacgagaagatcctcgtcttcgacctgggcggcggcaccttcgacgtgtccgtgctcgagcttggcgatggcgtgttcgaggtagcctccaccgctggcgacaaccacctgggcggcgacgactgggatcagcgcatcatcgactggatggccgacaagttccaggccgagaacggcatcgatttgcgtaaggaccccatggccctgcagcgtctgaaggaagcggccgagaaggcgaagatggagctgtcctccaccacgcagaccaacatcaacctgcccttcatcaccgccgacgcctccggcccgaagcatcttgactacacgctgacccgcgccgagttcgagcgcatcaccaaggatctgctcgaccgctgcaagaagccggtggagcaggcgctgaaggacgccggcctgaagatgggcgaagttgacgaggtcattctcgttggcggttccacccgtatgccggccgtgcaggagctcgtgaagcagctcaccggcaaggccccgaacatgtccgtgaatccggacgaggttgtggccatgggcgccgctgttcagggcggcgtgctcgccggcgacgtgcagggcatcctgctgctcgacgtcaccccgctgtccctcggcgttgaaaccatgggcggcgtgatgaccaagatgatcgagcgcaacaccaccatcccgacccgcaagaccgagatctactccacggcggccgacaaccagacctccgtcgaggtgcacgtcctgcagggcgagcgcgagatggccgcgggcaacaagacgctgggccgcttccagctgaccggcattccggctgcccgtcgcggtgtgccgcaaattgaggtcaccttcgacatcgacgccaacggcatcgtgaacgtgtccgctaaggacctcggcaccggcaagcagcagcagatcaccatttccggctccacggccctgtccgacgacgaagtggaccgcatggtgaaggacgccgagcagcacgccgaagaggacgccgctcgcaaggaagaggccgaggtgcgcaacaacgccgacgctctggtgaacgccacccagcagacgctggacgagctgggcgacaaggtgccggccgacgccaagacccaggccgaggaggccatcgccgaaaccaagagcgcgcttgagggcaccgacatcgacgccatcaaggcggccaccgagaagatccagcaggccggctacaagctcgccgaggtcgtgtactccaccgagggcgcagccgccggcgcccaggccgccgctgccgagacggctccggccgatgacaccatcgaggccgactacgaggtcgtcgatgacgagaacgaagggaagtaagaacgatgactgagcccgagaaggaccaggtcacctcttctactcctcaggacgtggccgccgatgtggcggccaccgcctccgccgacgacgcccgcgcggccgaggtggttgccgacgccgaggtgatcgaggccaacgaggccggcgagctggatgccgagctcgagcaggccgccgctgaagcggtggcgagtgcgatcgaggaatccgaggagctggccgccgccaaggccgaggccgccgattggcaggacaagtacgtgcgcctgcacgccgagtgggacacctaccgccggcgcatgaccgagcagcgcgaggccgagaaggtccgcgccacggagaagctcatggagagccttatcccggtgctcgacgacttcgcccgcacggtggactacgccgagaccaacggcgagaccggcttgctgggcggcgtgaaggccgtgcaggccaagctgtccgatacgctggccaagggaggcctggtcgtgatcagccccgccggtgaggcattcgacgcccttgagtgccaggccgtgggtacggtggacgatccgagcgttcccgatgaaacggtcgcgcaggtttaccaacccggatacaaaatgggtaccaaggtaatcaggcctgctatggtgacgatcaccacgggcggccccaagagggaaaagcccgaagaagagtaagataaacgagggcggccgcagcttggccgccctcgtgcttgaaagagcaattctaagtaactaactaaggtaatggaggtggaacgaatggcgtctacgcccgattattacaaaacgctaggcgttccgcgcaccgccacggccgatgagataaagaaggcgtttcgcaagctcgctcgcaagcatcatcccgatgccggcggcgacgaggccaagttcaaagagctgaacgaggcctacgaagtcttaagcgacgagaagaagcgcgcgctttacgaccagtacggcacggcgaacgagaaccagatcccccagggatggggcggcggccaaggcttcaacgtcgaggatatcttcggtggcggcggggccggcggcttcggcggcagttgggccgacattctggagagcattcgccacggtgaaggtgcgtttgggggcaactgggacttcggcggcggttttggcggccagcctcagccccgtcgcggtcaggatatgaatgtgacgctgaacgtgacgttcgacgaagcgttcaacggcacggagaagcgcattaccgtgcgcattcccggcaagagcgagtccgacacccacacggtgaaggtgcccgccggtgctgtcgatggcggccgcgtgcgcctgaagggccagggagctcctggcgaaaacggtggtgcggcgggcgacttgctcatcaccactaagattgacgcgcatccctacttcggtcgcgataaggccgatgtgacggttgatttgccgatcaatgtggcggaggcggcgctcggcgcttccatcgtggtgcccacgcccgacggcaaaaagatcaaggtgaaggtgcccgctggcacgcaagacggcaaggtgctcaccattaaaggcaaaggagcgcccgatctgaagaacaaggggcagttcggcaacttgaagattcagattcacgttgaagtgcccacggacatgaacgacgagcagaaaaaggccatggaggacttcctcgccgcgacgggagaggagaagcgcccatgggcctagacgacaagaatcggccgctgtacatgatcagcattgccgcggaactggcgggcgtgcacccgcagaccctgcgttcctacgagcagaagggtctggtcacgccgcgacgcactagtggcaacacgcgcatgtactcccaggccgatatcgatcggctcaatctgatcaacgagctgacgagcgagggcatcaacctcgccggcgtcacgcgcatccttgatctgcagagccggctggatgagcgcgaggaagaagtggaagacctgcacgcgcgggtgcgccgccttgccgatcgcgttcgcgaacttgagaaccgcacga

SEQ ID NO: 10529 - DNA, 10773 bp, Unknown
  gut microbiota DNA sequence
cctgatcaacgagctgacgagcgagggcatcaacctcgccggcgtcacgcgcatccttgatctgcagagccgactggatgagcgcgaggaagaagtggaagacctgcacgcgcgggtgcgccgccttgccgatcgcgttcgcgaacttgagaaccgcacgaccgtcggcgccatcgtccgcgtaacgccgacgcgacggctcccctgacctgtccggcgcgagctgcggggcatacctcccgtgctcaaacagcattgaagtgcagggcccttcgagggcctcggactttcccccatgcacttcaatgaactgcgcgcgggaggcacgccccgcatctcgcgcctactcagccaaggttgagcgaagcgggatgcggggtgccgctcaccaagcgagttccgcagatggtatcgaaggcggtaagtgaaagggagcgagtagcctcagcgccttcgataccagcgaggactgtctgagcgactgagcggtaccccgcagcccgcccccgggagtttcaacaataaaaaggagaacgtacatgagactagataaattggcggtgacggcgcaagaagctttccagaacgcgatgggcgttgctggtgaggccgatgccgccgttatcgagcccattcacttgctgaaggcgctgctcgattccgacgagaacaacctcgccgctatcgtgaagcgcatcggcgccgacccggtctggctgtcccagaacgtggccgatgagatcgccaagatgcccaagcagaccggcgccacccccatggccatccccggccaggacctcatcaaggtcatcgacaattccgtaaagatcgccgagaagctcggtgacagctacgcgacgagcgagcacttgctcatcgccctgtccgaggacaagggcgcggcgggccgtctgctcaccacggcgggcatcacgcgcaagaacatcgaggcggcctatgagagcctgcgcggcgacacgcgtgtgacctcgcagaccgacaagacccagttcgaggccttggagcagtacggccagaacctcacccagcaggcccgcgagggcaaactcgacccggtgatcggccgcaacgaggagatccgtcgcaccattcaggtgctgtcgcgccgtaccaagaacaacccggtgctcatcggcgagcccggcactggcaagacggctatcgtggagggcttggcccagcgcatcgtggcaggcgacgttccctcgtcgctgaaggatcgcgagatcgtctcgctcgatctgggtgcgatgatggccggcgcgaagtaccgcggcgagttcgaggaccgtttgaagaacgtgctgcgtgaggtgaaggaggctgatggcaacatcatcctgttcatcgacgagctgcacactatcgtgggtgccggcgccggcggcgattcgtcgctggatgcgggcaacatgctgaagccggctctggctcgcggcgagctgcgcgccatcggtgctaccaccctggacgagtaccgcaagtacatcgagaaggatgccgccctggagcgccgcttccaaacggtgctggtgagcgagcccacggtggaggacaccatcgccatcctgcgcggcctgaaggagaagtacgagatccatcacggcgtgcgcatcaccgacggcgccatcgtgagcgcggcggagctgtccgaccgctacatcaccgatcgcttcctgcccgacaaggccatcgacctcatggacgaggcggcctcacggctgcgcatcgagatcgactccatgccggaagaggtggacgccgccgagcgcaagctcatccagatgcagatcgaggagcaggccctcatgaaggagaccgacatggcctcccaggagcgcctggagaagctgcgccacgacatcgcctcggcccaggagtccctcgacgcccagaaggccgagtggcagaacgagaaggatgccatcgttggcgtgcagaacctcaaggccgagctcgaaagcgctcagctcgatgaggagcgcgccacccgcgagggcaacctgcagctcgcctccgagattcgctactcgcgcattcctcagctgcagcagcagctgcacgtggccgaggaagctgtgaagatgaagcagcaggacggtgccatcttgaaggaggaagtctccgaggaggagatcgcctcggtcgtcgcggcctggacgggcatccccgtggccaagatgatgcagggcgagatggagaagctcgtcgacctggaggaagtgctgaagggccgcgtcatcggccaggacgaggctgtgggtgtggtggccggtgccatccgccgcaaccgtgcggggctgtccgacccgaaccgtcccattggctctttcctgttcctcggccccaccggcgtgggcaagaccgagctggccaagacgctggccgagtacctgttcgattccgagaaggccatggtgcgcatcgacatgtccgagtacatggagaagttctccgtgcagcgtctgatcggagcgcctccgggatacgtgggctacgacgagggcggccagctgaccgaggccgtgcgccgcaacccctactgcgtggtgctgctcgatgagatggaaaaggcccatcccgacgtgttcaacatcctgctgcaggtgctcgatgacggacgcctcaccgacggccagggtcgcgtggtgaacttcaagaactgcatcatcatcatgacctccaacgtgggttcgcagatcatccgcgagcatgcggccgagggtcgtgcctacgacgaggctcaggccaccggtggcgagaccatgggcgagatggccgagaagatgatgtccatgacgcctgagcaggccgccaagcgcatgcaggagttcacgaacaagatccaggacgccctttccacgacgttccgccccgagttcctgaatcgtatcgacgacgtgatcaccttcaacgagctgtccatctcggctatcgagcccatcgtggatttgcagctcgagcaggtgcgcgaccgcctgcaggcccgccacatcaccttggacgtgacgccggcggccatggagcacttggccatcgacggctacgacccggtctacggtgcccgccccctgaagcgcctcatccagcgcgaggtggtcgaccgcatcgccgagcgcgtgatcagcggcgagctgcgcgatcgcagccacgtgctcatcgatctggatgccgagggcaactacgcctgccgcatcgagggccccatggatctggacggcctgaacctggacgaccccagcttcctcactgccggcaccgacccgaaggaggccctgcaggatctggacaacttgagcgacggcgacctcggcgaggatcccatcgcctagtaaaaggaggggcgagattcccgcccctccgcgcgtcggcttccgacatcatcgtccgagcccccgcttcgctgttcgccttcggctcaggcgctgcgctccttcatgtttttatggagcgacctgcggtcgcagatagacagcgttcagaggtctcggtcgacgacaccggaagtcggcacgcttccacccgacaactgaacactccctttcacagcaagcgccccgggcagccaagaccctgggcgcttttggtcacgaaggtccttccgtccgtgtggatagcgacatcgtgaccgcggtgacgatgaaagcctccgcgctgcgaagctgggggttggcgcttacgacagcgattcgagcatatccaggagctcctcgcgtgaatggacgcccagcttcaggtagatgctgcgcacttgggagcgcacggtgtggaaggagacggtgaattgcccagcgatggactttaccgtgtgccccttggccaggggaacgagaacggccgcttcccgctcggtgaggtcgtgctcctttgcgaggcgagcgcatttgtcctcaagcggcgaggcgctggcggcaggcgctcgatggggaaggccagtgtagaagaatccgaatatcagcacgagcagggagatcacgagaaagatcagggcgagcaccaaagacgagggagggtcgagggcaaagaccgtaaccagaatctcgcttgcgaggcgcgatgcgaagaacagaaacgccgccaggcgaaagccgaggcaggcgggttttccgacggccctcgccaacatgcccggcaaaaagaacatgagtcctcccaggaggaacgccgccgtgttgaggaggaaggcgatgaggtataagccgctttcgggaaacaagatgacaagcagagcactcaggcagataagcagcacgaagcccgaggcaagccagaggcccgtgcgcagcgcaaaggcccttctctggaagtagagcacgaaagcccccgtgaccaagacgcccgcaaacgatgtggcggcaatcgaaacacccgccgagggcgtgaacacggtgcggaaggcgaagctgagcaaactgtaggcgcagatagccaggggcacgagcgccgagaacttgggtcgatcttccagcgccgccggaggctcctcttccgggggcaacggggcaaggagaacgtcaagggcgacggcgacgagcatcagcacgagaagcccgaagcgtgcggggacggccagcgccatgtagacggtgagcgcaagcacggccactatccctgcgcaaagcatttggagggatcctcgccgagccgaaaggggtcgggccatgcgtgaccagaggcagaggagcgaggcgcaggccgcgcccatgagcacctggcgaagaacgaggtattggaggagctcgccggaaggaacgaggggctgggcaaccaagagcgtcgcagctgcaaggccgaacgcgagggatgcgagcaacgagggcgcggggcggccttttttggcgagagggagagagatggcgagcagggcgataaaagctatctgccacgagagggaaagcattgccggcgaagcgtccgagccggcccccgcgatcgccgtctgccccatggatatgagcagccagccccaaatgagaccgggcagcaaggcgagccgaaccatagcgggcaagatcgactccttcggaggatcctgttcgcacaagtgacctttttcgcgtcgcgccatcaaataacctgtcccacctgccatttagcacaaaatgaacgtgtgaatcgcgggcatttagctcatcgggggcgatgaattgccaccccttttccccgattctcttcgcggcggaattataccgctgcgtaaaggaaaaggaagtatgaatcgaggagggtaagaatgaaggaaattaacactgccgaggttttccccacgctgcgcaacatctcactgtcgcgtaggacgtttgtcgcctgcgcggccattgccgccgcccaggctgctctcgtgtctgcgggttgcgctcccgaggtgcaatcgtcgggagagggacttgcctcgaccgcggcgtttgccccggggacgtatacggcgtccgcgcccggcaagaagggcccggtgactgtcgaggtgcgcatgaccgaaaatgccatcgagagcgtcgaggtcgtggagttcgaagaaaccgagcgcatcagcgctccggctcgcgagcgggtgccgcagcagatcgtggagctgcagagcctgaacgtagacgccgtgacgggcgccacgctgacgagcatggccatcatcgagagcgtggctgattgcgtcaaccaggcgaacggagacgcttcggcgctgaagaaggctgcgtcgccggagaagtcggaggagaccaaggagatccaggcagatctcgtggtgtgcggcgccggcggcgccggcatggccgccgccgtcgccgcggcccagcagggcttggatgtggtggtgttcgagaaaaccgcctatgctggcggcaacgcgctggtcagcggtggctggctcgaggtgttcgaaggcgtcgacgacatgaagcccgacatgacggacggcaaccgcgacatgttccacgcaacgctccagaagagcctggacaatggcgtccccaaggacttcgtcgatgccgtgcaggccgacttcgatgcgtatttcgccgcgggcaacacgaaggtgtacgactccatggagtactacgccctggactacgcctctcgcaatggtggcccggcgaaggagtactggctcccctatgcccacaaggtgaacgatctgaacaactggctcttcgatcagggctacaccgtgagtggcacgctggtcggcatcgtcgggttcccgtggccgcgcaaggcccatgcggtggacaaggagaacggcgagggcttcttcagcgtgttcgacaacacggtggagacccagagcctcccgatcaccttccttttcgagacgcccgtttccgagctgatcgtggacggtaaggccgtggtgggggcctctggccagtgcgccgacggcaccacctaccgtgtcatggcggaccgtggcgtcattctggctaccggtggttattccggcaatcccgatctgctgaagaagtacaacgagatgtggccctgggatgagtccacggttattccgacgaccaacagctacggccacacgggcgatggccacgtgcttgccgagggcttgggagccgagctgaagaacatggggcgccagatggtgttccccattgccgactccatcgattactcgacggagaccatcgtcggcaatgccggcctggggctcttcgtcaacgtgaacggcgagcgcttcatcaacgagtcgctggatcgcttcgccctgtccgctgctgtgatgaagcagcccgaggagaagctgttcatcatcagcgacgcgctcaactccggtcttgtgaacggctacaacgagcagggctacagcgcggacaagctcatcgaggagagcaagctcttccgggcggacagccttgaggagctggcccaggtgatcggcgccgacccctcggtgcttgcgaaggcagttgaagattacaacgccattgcgcgtggagacgtggcggacacggtgtttggccgcgagaacatgagcgagaaagacgccatcgtcgaggctcccttctacgcctccccgcgtacctgggccgctcatgtgaccatcggcggcgttgccatcggtcccgattaccaggccctcacggccgacggtgcgggtattgagggcctttatgtcgtgggcgaatgctccgacggcaacagcggtgtctccagcatgagcacaggtctttcctgcgtcaaccagatgctcgcctaatcagcccctccccatggacgaggccctcgccgaacggtcgggggcctcgtttgtgcttggtggtcctatgccggttacgcagccaccttctcggcgttgcgaccttgatcaagtccgccgaaacgaccttggagctgtgtcggctatgccgccttctcggctttccgggcgcggcgggcagcagcgcgcttctgcatggcgtccacgcaggtggccacggctgcgtcgccggtgatgttcacggtggtgcgcatcatgtcgaggatgcggtccactccggccacgagcgccacgccctccacgggcaggcccaccgattgcagcaccatggccagcatgatcataccggagctaggtacgccggctgtgtcgatgggccccatccccggcttctatggtactggccagatcattggctacgagttcaagtggggccacgcgctctccaacgccctcacccgcggtcgcgctgcggtgcgccacgcgcttggcctgcagcccgacgacgagtccgacgacttcacctacgcctacgccacgggcagctatttcgccagctaaacggcgagttgcccttcgcaggtggccacagacatcggccgccttgcaggttggcccaagccccgccgccttccctcccctgggcgacggggcttctccgttccgcgttttgtgcaggggattgcgaaaggagcttcacatgaacaaggtgcgtatcaccgttttgaagacgacgttcgacgaggagctggccgcggagtacggtgtgccgggcctcaagccgtgccccttcctgaaggagggccaggtattctacgccgactacgccattcccgagggcttctgcaacgaggcgtggaaggccatctaccagtacgtattcgcctttgcaaacggcgcgaccagcgagccgctctacttcggcgactggatggcccagcccggtgtggccatttgcagctgcaacgacggcctgcgccccgtcatcatgaaggtagaagccaccgacatccccgccgaacccgattccgaatccctctaccttaccgaatagcctccgatttcaccgtgaagcgcccccggcacgtccattgccgggggcgcttttgcgtggcggtaggctccgtgcttgtcgcgatgggctgatcttgtggccgaatctctctcatctacacggcaatatcacaatattttgtgatacaatactgtagaaagcaccgatgggaggcatgatgaatactgccattttggatagggcccacatactgagcgaggcttcgagcagtgatgcgcgtattagcctcacggagcttgcgcgctcaagcggatggcgcaaggtgcttcaaagcgtcggcgtcgtcgaggtggtggaccggacggagacggccgcgtttctcgtgtcccgcgagggcatggccgatcttctggaaacgatagattccctggaagagcagcttgaggccgccgacgtgttggctttggcgaatgctcgggccgaccgcggcaactggatggccggcggggcgctcgctgatgctgcctgggatgagttcgccgcacggcgctcccacttccaggcggtgaccaatggggattagcgatgcctcctaccgcgaggcaatacgccagcttgctgccgttcctggggttgagttcgacccggcgagcttggccgaggatgttttcctccttggctacgcctacgatgatgaagagcgtttcgcaacggcgcttgccggctccatccgggcgctttgccagttgacgtcgggcagggttatggcatcgaatttgaagtacgacttcgaggggatgagctcataccatttccaagccgagcgcaagcagggttcacccgccgatatgcgcatcgtgttccgccgcgaggaagatactgtgcgcgtcatcggcttcggcaatcgaaaaatcccctccgacatctacaagcgcctcagcgcatcacgcctgtcgtcctaactcgtcgcactgctgtacttacctggatcgtcgactggcataatcaaggggagattatgaatatcgaacatttaagagaattcttaacgctggcggaaacgcttaatttcaccaagacggccgaacagcactatattacccagccggtgctcagtcgtcacatgcgcgcacttgaggacgagcttggcagtgtgcttttcgagcggtcgacccgccaggtgtcgcttaccgacaacggaaagtatgcctattcgaagctgaacaggctgcttgataattacgatgaagtgctgctcgatattaagaaccacaattcggagacgacggcatctcttaatttgggaattctccattttggcatcaacgcctatcttgaccggcttattgcggctgtgaatcaggctagaccaggtacggaaatcaacgtttttcccatgcacgctaacgatgtggcctcggctcttttttctaatgagatcgatttggggctgacggtggcgcctgcaatttgcggtcatgagggtttgactttcttcgaggtcgccgaggagcctctgatgttgatggctccagcgtcgagcgatttgacgagtctttcagacgttgagctagctgatctatgctgtcaccgcattgtgctatcgaagcgtgagccgtggcaaaaactggtgcttgttgaggagcttgaagcagcggggctcaattttgacgacctggagatctcggaaaccgagcaagtcgagctccttccgcaggcgctcgttcgatgcggcggagtggctcttgtgccagcccatattggcacgatgggatcggatcaggttgtgctcatccccgtcaaggagaacccttgtatttctatcggctgcctttatagaagcgacagcaaggcttttcctctaattgagcgattgcgcgatgtcatcgaatccgaaacatcagtttgacctcgcattatgccccctttgcatcaccgtggctctctccgtatttccgtttctccttcgatgaacgtagcataatacccgttctcgcaaactcatcttttggaggatgaacgagagtgaaggagagaggttatgctgaaaaattcaaagagtagtatctcgaggcgggcattcattggaggcgcctcgctggcaggtgtttcggcgcttgccttgggaagcctggtagggtgccagccgaacgccatgcccgacacaggctcggacgcaagcagttcggccaatgtgtccggttctgattcggaagcgtcggtttgggacatcgagcccttgggcgagcccaccgagaccattaccacgaagttgtgcatcgtgggtgctggtggaactggcctggcggctggcatccaggcccgacagctcggattggaagatgtcctggttatcgaaaagcagccgatgacgggtggctcgtttatcggctccgagggcctttttgcggtgggttcccattaccagcttgaagcgggagcccatgctacgtctgctgagctgatcgcccaatgtatgaactatcatcactgggttccggactatgctctttaccgagtcttcttcgacaaa

SEQ ID NO: 10530 - DNA, 14346 bp, Unknown
  gut microbiota DNA sequence
ttttacccccctcccctcaatgaggggatctttttcaacgggaacatgacggctcctctacggacggatgaggagaaatcaaacgttcggtaatccccctcaaagagggtacacggcttcttcattcatgactatgatgccctctgttgcgtggcgtcgcgatcttgagttctctctgagacaagcatgaagttacaagggggagttcaaatgtctgacacccagaaaaatgaaaccgtggccaccgagcagccgcccgcggccccggtgtccgctaccgagcccggctctgcgccggcctccgagaagaagcagcccttctttacccgtcgcaccgtgctcgccatgaccggttgcggcgttgccggcctggtggtcggcggcgtgctcgcctcctggggcgtgaccaccgcctccattgcctcgggccgcatcgagctgcgcaccactcctacgaaaatgatcgtcaccgaccgcgctcgctgctccggctgccagcgctgcgagatgatgtgcaccctgaagaacgacggcgcgacccagcagtccatcgcccgcgtgcgcgtgtgggacaactacaatttcggctccggcgtcgataccaacgacggcatcttcggcaactgccagttcacggtcgcctcctgcaagcagtgcgccgatccgcagtgcgccaagtactgccccgtccatgccatccactccgatgaggagaccggcgctcgcgttgtcgacgaggacgtgtgcatcggctgtggtatgtgctctgccgcctgcccttggaacatgccccacatcaacgcccagaccggcacgtcgaccaagtgcatctcctgcggtcgctgtgccgagcagtgccccaacggcgccatcaagttcatcgattgggaggatattgcccagaaggccatcgacgagggcgtggtttccacggccaccatcgtcgaggcttaaacgatagagagaaggaccattatgccaggacacgctttaacacggcgcagctttttagttggaagcgccggggtggctgccgtggccgccggcgcgggccttgtgagcttgtcggtccgcggcgaagccgatgctgatgccgagacggataagcgaaccgaagtggtgcactcgctgtgcaattcctgctcgagcaagtgcggttattacgcctacgtcgtagacggcgagctcacgaagctcattggggatgaggcccatccgaacgctcagggcaagttgtgcgcgcgcgggtacggctattcccagatcgcctattcgcccgatcgactcaccgacccgatgaagaagaacgaaaacggcgaattcgaagtaataggatgggatcaggcgctcagcgagatcggccagaaggtgaccgatatcatcgcgcagtacggtcccgaggcgcttgccatggtgcaggatccgcgcccgtcgggcaagtactacacgaagcgcttcatgaacgcgctcggcagccccaacgtatacacgcatggcgccgcctgcaacctctccaaggagtccgggttcacgcaggccatcggggcagccaacttcgaatcggatgtggccaactcgaagatgacgatgttcatcggtcgcagctatgccgacgccatccgccccagctcggtggccgcgctgcagcaggcgcacgagaacggcgcgcacatcgtgctggtggatccgcgcctgaacaacagcatcgccttcgccgacgagtgggtgcccatcaaccctggcaccgacctggcgctcatcttggccatgtccaacgtgcttattaatcgcggtctctacgatgccgagtacgtggcggccaacagcgtcggattcgacgagtgggcgagcgccattgcggactacacgccggaatgggccgagggcgtcacgggcattcccgccgccgacatcgagcggctggcgctcgagttcgccgaggcggcccctgcggcctccatcgagccgagctggcgcggtgccttcgggtgctcgtacgcgaactcgggcgagacggcgcgcgcgctctgcctgttcaacacgcttctgggttgctggaaccagcccggcggggcgctgttcctccccagcgtgaaggcgggcgatctcgatccggcgaagttccccgaggtgccgaaggtcgaggcgaagatgtggggcgccgaggagtacccgctagcgctctcttccatgggcactaacctctacgtcgccgagatggcgaaggagggcaacgtcaagggcctgttcttctacaactcgaacatggcggccggctattccaaccccgcccagctggcagaggacttcgcgaacctcgatctgatggtcgtcgtcgacgtgcagatgtcggaaaccgcgatgctggccgactacgtgctgcccgagtgcagctacctggagcgtcgcgagctgcccgagttcgtgggcggacgcgtgccggtcgtttccctgcgcgatcaggtgctcgaggtgattcaccccaacacgcgtccggccgatgtgatcttcacccagctggccgaggcgtgcggcgtggggcagtacttcccgttcaccgttgacgagctggccgacgcgcagctgcgcagcgtgggcacgagcctcgatgagctgcggcaggtcggcacgatctcgttccccgagaaggcctatgcctacggcaaggttcccgagtggaagaccccgacgggcaagatccagtttacgagcgaggcgtgcgaggcagctgggctgtccgcgtgcccggtgtgggtcgagccccaggtgatgccgaacgagaccgtcggcgagttccgcctcatcggcggcaagcaggccatccacacgcatacgcagaccgtcaactgcgagcctttgatggacatcacgaagtcctacggcctcgaccgcatttggatcaacgccgaggtggccgaacgcttgggcatcgcggacggcgacgaggtcattctgtcgaacacgatggccgagggccccatcaaggtgaaggtgaccgagcgcatcaacccgacggccatctacatgccctcccattatggctgcaaatcccccgatcagcacacggcttacggcgtgggcttgaacttcatggacttcgttcccttccacatggaaccggcctatggctcggccatgacccaggaaacgttgatttccgtgcagaaagtaggtgaatgatggcacgctacggaatgctcatcaataccaagaagtgcattggctgctatgcctgccgcacggcctgccagcgccagaacgacctgcttcccgatgagtcgttcatccgctttgaagagcgtgaagtgggcaagtaccccaacgtgaccgtggagcacatcccgctgcagtgcatgcactgcgaggatgcgccgtgcgcgagcgtgtgccccaccggagccgcgcatatgggttccgacggcatcgtcgaagtggatcacggccgctgcataggctgcctgtactgcatggccgcctgcccctatcaggtgcgtacgcgcaattcaaagacgggcgaggtggacaagtgccgcttctgcacgctttcttcctatgagaacggcacgaagatgtgctcgtgcgtcgatgcctgcctgacgggcgctcgcatcttcggcgatctggacgattccgacagcgagatttccaaggaaatcgcgcgtacgggtgcggcccccatcgccggcgatctgacccgcgccaagatctattacgtgaggtgattgacatgatctacgaacccatttggggcgccatcattgcgtggtacctcttcctggccggcttgggcggcggcgcgttcgcaacggcagtgttcgttcgttatcgccacccggagtgtaagcgcctcatgcgcgtcggccgcctcatcgcgccgatcgtggtcatcatcggtctgtgcttgttgatgttcgacgctgccgcgggcttcgcccatccgctgcgcttcgcgcttctgcttacgaacttcggatcggtaatgacctggggcgtggtgtttctggcggtgttcgtggtcgtcgcgctcatcgtgctggtgcttgatttgatgaagcgcgaggtgccgatgtggctcgattgcgtggggctcgtcatgggcctgtgcgtcgccatttacacgggctgcctgctcggcgtgtgccagggattccccctgtggaacagcgcgcttctgccgattctgttccttgtgtctgccgtatccaccggcatggccgcggtgcttctggtcggcgtgttctacgcgcccgacgagttcaacgaggtcgtcgtcatgaagaagttccacttctggctgcccgtcatcgagttcgtgctggttgccgcgctgctgttcatcacggcgttcaaccccagccccgccggctgggagagcgtgatgtcgctggtggcgggcaattgggccgtcgcgttctggctcttgttcgtcatcgtgggcctggtgctcccgacgattctggaatgctggatgctgtggctggccaagcacgagttcgagacctcgcgcacgggccagatgatcagcgccctttcggatgcgggtgtgctcgtcggcggcttcatgctgcgtctgctcatcgtgagcgcggcggtgccgatcacgattattcagccttggatgctgtaagttcttgcgatacccactccttgcaaaaggcggccttagggccgcctttcttgtgggacggctcggcaattttgtttcgcggccttgaagggagcaggtttcggagagggcggctgcggaagggtgcagctgcgggagggtgcagctgcggagagggggaggggtggcttcaggcctggatgtggtacgtttcgacgagccattcttcgaggcagaggccgctttgcgttatggcggaggcggcctccttgccgacgtagcggtagtgccagggctcgtagccgatgccggttgtggcgcttttgtccgtggggtagcgcaggatgaagccgtattcggcgcaatggatcatgagccattgctgggtggccgtctcttcctggccttcgtccagttccagatagttagcgtccacgatgtcgacggcgagaccggtctggtgctcgctggcacctggaggtgccacccagaacgcggcagcctcctcggcttcggtgccttccagatgctcctcgcgctcggctcgctcgatgcggttttcgaagagattctcctggtagtcgtaggtgcggaaagaggagcagatgatgggatgtgtgccggcggcctcggcagccgtgagcatggccgcgaggtcttcaacgatgcgggcgtccactcggtggttgacgtggggctccacccagctcacgtcgggcagctcggccaagttgttgggctcgaagtcggcgtcgagggggtgctctcggttcacgaggcgcaggttccaggggagatcttcgagcgccgtcggaggcgtttcgctattggttgcggccgctgactcggtttcgggagaggccgcggcagctgaggtcgcctctgcgttggatgaggcgattgcgccattaagcggcgtcgctggctgggtgagggtgccggattcggaaggtacgggctgggcgtgggcggccgacctgcgggaggcgaaataggcgccgtcgccgatgacgagcacggcggccagtccgccggcgagcgcgatgaactctcgacggtcgagcgcgaatggcgcattcgacatggagcctcctccttcctgggtcgggtgcttcgtttggcttgctttcggctgatgcgttgtcgcttggggctcggctcgcttttggggtggccggctccggcgacgtgcgatcgtcgctggaatacgccagttgcgactggcgggacgatggggactcccatggtagcgcttgagttgcacgacgcgtgacagcatcgggaaaaagacgcacaccttacgctttcttaatcggggcgttcggggttccgcaagccggaaggcgcaggcgctataatagcggccatgaaaaagccgatagagaaaacgaaagaggcgattgcgcagagcgatgcgggcgatgctcccgacggtgtgactgatcgcgcaatcgaggcgggggaggaagtctcaacggaggctgccgacgaaggctctgcggaaggcgaggaggacgccgaatctcgcgtgcgcttatcgaaggcgaaccgctacgatttcggagttgtgtcggcagccacgcacaaatcgatgcagggcaacaagcggcgcgatacgaagccggaggtgctcgtgcgccgcatgctgcgcgagatgggctttaccggttaccgctgcgactggagaaaggccccggggcgtcccgacgtggcgttcgtagggcgcaagctggccatcgagattcgcgggtgcttctggcatcggtgccccgtgtgcagcctgtcggtgcccaagaagaacctcgattactgggaggccaagttcgtccgcaacgtcgagcgcgatgagcaaaacctggcggcgctagaggaggccggctggaaggtgctcgtgctgtgggagcaccagctgaagaagaaagagctgcccgccacgcgccgccttctatacgaattcgtgcgccgcgaggacgaccccgattacgacgaggcgtttcctgcagaagagatggtctgagtatgctattcaaatccagatttatcaaatcgtgatttgaattctctgaactggggtcttgcacaatgttgggtttgcgcgcaccaacaaatacaatcgttgttgcaaatagtctcaagttgttgcatactgatgagactacttgaaactatttgcgggggtgggctgtgggcgtgtacgatttcgatttgcagacctgcatcgagctcgctcggcgccttggcaccgacacggagcgggtagaggtgaaagcggccgctcaagggcttccgaaaagtatggcggaaacgctgagcgcgttttcgaacacatcgggcggcgtggtggttctggggttggcggagcgcgcgggcttccaggctgttccgggcttcaaggcgcgtgctgtggccgacgcgcttgcccagatgtgcggcgagaagatggaaccgcccgtgcgggcgtcagtggagatcgttgaattcgaagggtcgcccgtggtggtggccacggtgcccgagctgccgcccgagcttaagccctgcttcgtcaagtcgcgcgcaatgcatgacggctcctatgcgcgtgtgggggatggtgatcggaggctgagcccctacgaggtggaccgcctgctggaggggcgtcggccgccgcactacgatcgcgaagtggtcgaaggggctgcgatgggcgactttgacgaagagcttctggagggcttcatgcgccggcagcgtgccgattcgccgcgagcgttcaagggcatgagcgacgaggagctgcttgaggcgctctgcgtgacggctcgtgacggggaggggatcgtgcgacccacattggcgggacttatggcgctcgggcgctttccgcagcgttatttcccgcgggcctgcctttcgtttacggtgatcccggggacgtcgaaggccgatgtgagcgccgaggggctgcgttttctcgattctcgcgagatcgtcgggcccatccccgtgatgatatcggagctgatggtggcgctgcgacgcaacgtgcgcgtctcgtcgaaagtggagggcgcgtttcgcatcgatagacccgagtatcccgagacggccgtgcgcgaggcagtggccaacgcgctcatgcaccgcgattactcgccggacgggtgcgcctcccaggttcaggtgactatgtacgacgaccgcattgagatattgagtccaggcggtttgtgccgggctatgacggtcgaccgtttgggggaacttggcgtttccttcccgcgcaaccagacgctggccaacatcctgcgcgccacctcttatgccgaggggtttgccgaggtgggcagtgtggtggagaacaagggcacgggttacttccagattcgggccagcttgcgcgaggtgaatatgccggaaccggtagccattgaccacatcaccgctttcgaggtggcgctgtacaaggccggcgctggcgcggaggcagggcggttcgggttcgggctcggagagcgcgcggggggtggcgggcgcggtggtgttcgactgcctgagggcgctgcgggcgggaagatcgtgcgatccgtcacggagtggtcagacgaaacaggtcgcttccataccattcatgtgctggcgccgggtacggtggagtgcgacatcgtcgacttcttggaagaggcgcccgcaccggtgagctcgcggattcttatggacgcgttgggcaagtcgaaggcgacgattagccgcgcgctcaatcggctgatggacaagtctcttgtggaacggctggggccgtcgcgcggcccgggcgccgtctatcggttggttcagtaggcgcgcttcaaaggcgcgaggaacgcttcgtagaggcggttgtcgtcgtcaagttcggggtggaaggcggcggcgatctggttgtggtggcgcacggccaccggtgcgtcgttcagggtgacgaggggctcgacgccggggccggtagcttcgatgcgcggggcgcggataaaggtgaggagaaccggctcggaagcgagtgtggcgctgctgctcgagtggttcttttcatctgcgacgcaggttgctcccgcggcttcttctgtccccttcgccccttcttcccagcgaccctcggcgtggaagctgccgagttggcggccgtaggcgttgcggcgcacggtgacgggcagggtgcggaaatggtcggcgagcaggatgaggccggcgcaggtgccgagggcggggaggccctcggcgatgcgttggcgcagcggttcgaacattcccaggtcatgcagcagcttcgcctgtacggtggactcgccgccggggagcaccaggccgtcgaagggacgggcgaggtcggcggcctggcgtagctcgatggtggtgcagccgagggattgcaggcgctgctcgtgttcgatgaaggccccttgcagggcgaggacggcgatggttggggacatgggttctactgcccccgctcttccatgatgatctggatctcctgctcgttaatgcccaccatggcttcgccgaggtcttcggacaaggcggcgagcatctcaggatcgttgaagttcgtggtggcctttacggtggcctcggcgcgtcgggccgggtcgcccgacttgaagataccgctgcccacgaagacgccctcggcgcccagctgcatcataagggccgcgtcggccggggtggcgatgccgccggcggcgaagttcacgacgggcagcttgccggcctcgtgcacctcgcgcagcagctccaccggcacttgcagctccttcgccgcttcgaacagctcatcgtcgcgcaggttctggatgcggcggatttcagcgttcatccggcgcatgtggcgcacggcctgcacgacgtcgccggtgcccggctcgcccttggtgcggatcatcgtggcgccctcggcaatgcggcgcagggcctcgccgaggtcgcgggcgccgcagacgaaggggacggcgaagacggtcttgtcgatgtggtaggtgtcgtcggccggcgagagcacttcggactcgtcgatgtagtcgatgtcgatggcctggaggatctgtgcctcggcgaagtgcccgatgcggcatttcgccatgacggggatggaaacggccgcctggatgcccttgatcatggccgggtcgctcatgcgggacacgccgccggccgcgcggatgtcggcggggatgcgctcgagcgccataacggccgcggctccggcggcctcggcgatgcgggcctgctcgggggtggtgacgtccatgatgacgccgcctttcagcatttgggcgagctggcggttgagggctacgcgctcagcagaggtgatgggagtagcggggttgccggcctggttagcggcgggggcggtttcggtcacgaggactccttccttttgcaaaagatatgagcggaagggtaagggataactgagcttagtgttatattcaatttgggaagttttaataaggtcagttggaagtggcctcggtttcgcaaagagccgacgagctggcgatctggcagaagaccaggtggtcgtaaaggagcagctcgttcaaagtgtgctgcaggaggaggaagggaaagcgatgctcacgtatgtgctaaatcgcggaggggagacgagcctgtacgagcagctttaccgggcgcttcgagccgacatcgagtcgggtgctcttgcggccggcgcgcgtctcccttccaagcgggcgttcgcgaagcatttgggagtgagcgtcgtcaccgtagagggggccttagaccagctggtggccgagggctatgtgcgcgccgtgccccgcagcggcttctatgtgcaggaaatcggcccgaatttggcaagtttttcgagggtttcgacgcgtgaaaccgtgaaatcgccttccaaagccggtttcgagggcaaaagcgcgctcggcgtagccaaaatgggggtttcgggaaacgatgacgtcgaaaccctcgaaaaacttgccacaaaagacgagtccttttgtatagcttgtggcaaaggggatgtttcgggggcgcgtggggggttccagggcgaagcgagcctctgcgggaatgcgacgaaaatccggagcaacgcgagcatcgaggatgacagggccgaatgtggggcatcttggaacggccagaacgatgccgaatgtggggcatcttggaacggccagaatggcgccggacgcaaatggctcgccgatttcacgggggcgacggcgccggaaggggtgtttccctacgcggcgtgggcacggacgctgcggcgcgtgttggccgacgagagcgagcgcacggtgctggaggcgtcggggcctcagggatcgtctcggttgcgggcggccatcgcggcgcatctgcggggctttcgcggcatggaggtgcatcccgaccagatcgtgatcggttccggtgcccagtcgctttatggcttgctcgtgcagctgctcggtcgtaatctggcgtacggcgtggaagaccccggctatccgcggcttacgcgcatctacgagtcgaacgacgtggcggtgcggccgatcgctctcgatggggaagggccggtcttggaggcgctcgagcgtgcccgcatcgacgtgctgcactgcacgccgtcgcaccagtttcccaccggtatcacggtgccggtgtcgcgccggcgctcgttgttggaatgggcccagagtggggttgccgcgcccgaggacggtgcagcggctagggagattcgcggtcggagcgtgaaagcttccagtgcccggtcgcgctacctcatcgaagatgacttcgactgcgagttccgcatggcggggcgtcccgtacctccgctcgcggccctcgatggggctgggcgggtcatttacgcgaacacgttctcgaagacgctcgggggtgctttccgcattggctacatggtgctgcccgaggcgctggccgaacggttccgcgaccgacttggcttttacgcctgcacggtgggtgcattggagcagctgacgttggcgcggttcatggagtcgggggactacgagcgccatgtcaatcgccagcggacgcgttaccggcggcggctgagcgcactgattgacgtactagcggcgtcttcggccggcgatcatttgcactttgccaatgcgggtgccgggctgcactttctcatggaggttaggggtgtcgaaggagacgagagagatagtgcgactttcgaggagcgcgtggcccggcgcgctgcgattcggggcgtgcgcctggcgcctttgggccgttatcggttcacgggttgcgaggcgggagctcctgggcgcagctcgaacgaaacggtaggctgccggtgcgaggctcgcgaagtcgagggtgcccgaagggtatgcgacgaggtgcggtctgggtgcagcgaggggaggggtcggcgccgtcccgccttcgtgatgggcttctcttccttggaagaagagacgatcccggaggtagccgggatcgtctcggaggcggttgtggccgagctgggctgacctggtcatcctcgatgaactagggggcgcattcaatcaagtgcgcgtcggttgtttctagccgatgacgtcgccgttgacggcgaaggtgaccacttcgaaggggatgtccttgcccgactgggcgcaggcctcggcggcggcgcgctcgaggccgccgcagcagggcacctccatgcgggcgacggtgaccgaggtgatgtcgttggcggcgatgatggcggcgagcttgtcggtgtaggagccctcgtccagcttggggcagccgatgatggtgacgttgccgctcatgaagcgctcgtggaagctggcgcaggcaaacgcggtgcagtcggcggcgataagcagcccgcggccctggtagtagggggcctgcaccggtacgagcttgatctggcacggccactgagccaagcggttcggcagagcggcggccacggcggaaagcgcgtcggtggcgccggcagcggccggagcagcggcgcggccggccggcgtgggggccggtgccgaggcgccgttcagggagcggctgcgggaaccggggcatccgccctggtgcgcaggcgacggcgccggcttcggagcgtcgtcgatgagggtgcgggcggccgagccgggacagccgctgcggtgctcggccgcggccggaacgctgccagccgtcgcgccgccgttgcgggcggccaggtgtgccgccacggcagcctcgtcgtagggagcggcttcccgctcgacgaaggagatggcgtcggtggggcaggctggcaggcagtcgcccagcccgtcgcaatagtcgtcgcgtaccaggcgcgccttgccgtcgaccatggcgatggcgccctcgtggcacgcgtcgacgcacaggccgcagccggtgcacttgtcctcgtcgatgtgaataatcttgcggagcatggaacctctttcgcttcgtgtcgtatttcgggaagcatcatagcgggccaacgcgaaagcgcaagggcctccatgcagatgatggaaagttgtggacgaacccctaatcggtcagcagtgcctccaccttctcgaccttggtgtgcagggtgtcgctgtgtcccgggcggatgtcggccttcaggattacctcggtgcggatgccctggtcggcgaggcgcatggtggcgtcgcgcacgacggccatgacctcgtcccattcgccctcgatctcggtgaacatagaggtagtgcggtagggcagcccggagtcgcggatgacgcgaatggcctccgccacgtagggggccagctcgtctcccacgccgaagggggcgatggcaacggcaacaagcgtgttcataggaatctccttttgtttctcggcttacgcggctgatgcgctggcaagcgccagaggtgcctcggccacttcctcggcggtgaggttgtagagggcgtcgaggaaggcgacttggaagctgccggagccgttgcaggtttcggcagcgcgcaggccggccaggttgtaggcggccgttgcggcgagcgccgccacgaagggatcggccacgcaggcgtagaccgcgcacacgccccccagcgagcaaccggagccggtgatgcaggtcatgaggggcgatccgccggaaaggcgcgccacctgggcgccgtcggtgacaaggtcggtagtgccggagacggccacggcccctcccgtgaagcgggcgcacgccacggcggcgcgctcggcggcgtccacagagtcggtgctgtccactccgcggggaccgtcgccggaagcgtcttcggccgtgtcgttcccgagtccccacagctcggccacggcgatgatctccgaggcgttgccgcgcaggatagcggggggattctcgcgcacggcctcgatgagctgggtgcgcaggctgccgatgccgatgcccaccgggtcgagcacccaaggcttgcccgtcgccgcgcaggcccgcgccgtggcgggaaccgtttgctcgtagacgggcagcaaggttcccaggttgatatagatggcccctcccagggcggcgacgcattcgccctcgtcgggcaaatacaccatggccgccgagccgccgacggcgagctgggcgttggcgacgaagttctgggtcacggtgttggtgatggaaggtgcgagcgggttcgtctcgcgcacctcgtgcacggcacgggccatgagcgctcgcagttccgcctcggtgcgggcggtgggattgg

SEQ ID NO: 10531 - DNA, 3015 bp, Unknown
  gut microbiota DNA sequence
gctgacttccttgggcgaaccggtgagtttttgtatagaaaggattttgttttgaagaagtttgtactgtgcgctgctgcggcggcgttggcgttggtgttggccggatgcggccagcaggaaagcgaggctccggcggccgatgcgacccagcaggagcaacaggcccctgaggctcccgcagcggaagcaacggcgcctggccctgtcaccttcaccgacgatatgggcaacgaggtcaccgtggacaacccccagcgcgtcgtggcctgcatgggcagtttcgcgaacgcctgggaactggccgggggcacgctcgtgggcgtctccgacgatgcgctaacggcggccggctggaccatccaaagcccggatgtggccacggtgggggacttcacggcggtgaatctcgaggccatcatggcgcttaaccccgatttcgtcatcatgacgagcggtaccggcggccgcggcggcgactccagccagatcgacctgcgcgacgcgcttgtgggcgcgggcattcccgtggcctacttcgaggtgaccaccttcgacgactacgagcgcctcatgcgcaccttcaccgacatcacccggcgtgcggatctttacgatcagaacgtggcgaaggtggccgcagccatcgacgccgttgtgggcgcggtgccggccgagaacccgccgacggcgcttttgctcaccaccttctccggcggcacccgcgtgcagagctccggcacccagaccggggccatgttggccgacctcggcgtgaacaacctcgccgacgagaacaaaagcctcctgaaagatttcagcctggaagcggtcatcgagatggatcccgacttcatcttcgtcatccccatgggcaacgacaccgaggcggccatgcgcaacctcgaggaggccacggcggccaatccggcgtggggctcgctgtccgccgtgcagaacggtcgctacatcaccctggacccgatactgtacctttccaagcccaacgcccagtgggacgcggcctaccaggggctcttcgataacctctacgggcagaactagcgacgggggatgtctcgcgccatgggttctgtctcccgcaacatcgtcgtcgttgccgcgaccgccgtctttcttgcggcggtcacggcggcggcgctcatgctcggcgcctcctcggtgagcctgccggagctggcgacgtggcttttcggcggcgacgtctccgccacggcccgcaacatcttggagaacgtccgcgtgccgcgggtgctggcggcgcttctggccggggcggccctggccacctccggcgcgcttatccaggcctgcctggacaatccgctggcgagtcccaacgtcatcggcgtgaactccggtgcggggcttgccgtgctgctggctgcctcgctcgttcccggggcgctgtggctcacgccgctggcggccttcgccggggcgctcgcgacggcgctcatcatcttcgcgctgtcgctgggcacgggactcagccgccttaccgtggtgctcgccggcatcgccatcaccaccgtgttcggcgccggcatgaacaccatcctcattgttgacccggacgcctacatcggctcgtccaccttcctcgtgggcggcctgtccggggtccttatgcgcgatctggcgtggccggccgcctacatcgccgtgggcctggcggcggcgctgacgggcgcggcgaagctgaacatcctctcgctcggcgacgaggcggcccacagcctgggcgtgaacgtgcgcgccgtgcgcctggggatgctcgccgtggccgccgtgctcgccggcgcggccgtgagcttcgcgggactcgtcggtttcgtgggactcgtggttccgcacctcatgcgctttttcgtcggccacgacaaccgctgggtggtgccggtctcggcgctcgcgggagctgccttcgttgtgggctgcgaccttctggcccgggtgctgttcgccccctacgagctgcccgtaggtattctgctggccttcatcggcggccccttcttcatctacctcatcctgaagaacaaaggaggcggccttgactgagcgtgccattcagggcgagaggacgtcgtgcgcgccccctgccgccgtcgagacgcgctctccggagtgcgccatccgctacgaggacgtctcgttctcctacaagccgggcgttcccttcatggaggggctttccgcggtcatccccgcgggcgcggtgacgagcattgtcggccccaacggctgcgggaaatcgacgttggtgaagctggcctcgggccttctgcgcccgacggcgggacgcgttgacgtggccggccgcgacacgggcgcacttgctccccgcgagcgggcgcggctgatggcggtgttggctcagagttcgcgcgtgcctcccatgactgtggaggccctggtggcctgcgggcggcagccgtacgtgggctggggcggccgcctcggccccgacgaccgcggggtcgtggaagccgccatggagcgggccggcgtcgaggccttccgcaatcacgacctgcgccagctttccggcggcgagcgccagcgagtgcatctggcccgaacgctcgcccaggacaccggcctcatcgtgctggacgagcccaccacatatctggatatcagcgcctgccacgacctcatggccctcgtgcgcgacctgaaccgacgcgagggcaagaccgtcgccatggtcatccacgatctggacctggcgcttcgctactccgattacctcgtggtgatgcagaaggggagggttctggcccagggccccaccgagaaggtgctcgcctcgggcgccgtcggcgacgccttccaaatggacatctgcccccacgaccgcttcagccccgtgagggacgaggcggtcgcgggggcgcgtgccgagatcgaccgcggctacgtcctctacccccgtcgccgctaagcggcaccccgaggcatcggcggcggctatcgacggctgggcgc

SEQ ID NO: 10532 - DNA, 15413 bp, Unknown
  gut microbiota DNA sequence
gccaagtggtaaggcaaaagcttcccaagctttcattcgcgggttcgagtcccgtcgcccgctccataagaaatcgtgtcggaagtcgccattttggcggctttcgtgtttcagggtagaattgtttattgattggaaatctattcgtttttccagtatttcgtccagtacgtttgttagaattgcagtgttagttttaagaacagcgaggtcagacggtaaattcaggtcgtggaaggtcgagtaaggcagaagcttcccaagcttgtattcgcgggttcgagtcccgtcgcccgctccatgaacttcccgaccccgccttccggcggggtcgttcgttttttggacgcggatattgtttcgagagcgaaagaccgctgcttggcgtgagtcagggggacggccctctgactcactgatgcacgggcgagtttcttctcgcccatagccggaggtaagcgaagccgatgagggcgggcggaaccggcgccgctgcctgcgccgcatagattccgatgaatccgcagcccaaggaggccgccaggagccaggctagccccatcctcatgatgaaggcgtcgatgagagagttcgcaagggccagcttcggcgcgcccgatgccagggcaaacgaatcgagggcgtacatcgacgcgtagaagatcccgttgacgctgcaggtgatgcgaagatagaggactgccgcctgatctgttgatgctgacatggaaagcctttcgatgggggggtgaaaacaaaaagagaacggacgcctgcccgttctcgtgcccatcgtccatgtgcgcaagccgaaacaacccatggcgggttttcacggtcgacgatttttcagggtctgctccggtcccactgggattggccctagttttatctgggtatcctctaagtcgtcctctgcgtttttggcgcatcttgcttgtgctatgctgggcgcggcaacttcgctgaaaggacttccatggccgctctgcaacctgatccctgtgcgctccttcccttttccgccggacagctcacgccgatgcaggcgatcgaggcgcgccatgctgtgcgcagctataccgacgagcccctcgcgtccgaggcggtggaggtgttgcagaaggccatcgccctggtgaacgaggaagcgaacctgaatattcagctcgtacttgacgagccgcgggctttcactggctttaaggcgcggcttgtgaacttcacaaacgtgcgcaactacctggcgcttgtggggcctgaatgcaaggaactcgacggtatcgtcggctactatggcgagcagctggtgctattggcccagtcgctcgggctgaacagctgctgggtcgggggcacctacaaggtggtgaaccgcgcctacaacgtggatctaggccagaagctggccgctgtggtagcgctcggatatggggcctcgcagggggtgccgcaccggtcgaaggcgccccaggaggtggccccgggctacgacggggcgccggaatggttcaagcgcggggtggacgcggccttgcttgctcccacggccttaaaccagcagaagttctccttctcgcttgacggcgaagagaacgacgtgccggtggtgcgcgcatccaccaagcgcggcgcgttcacccagatggatctcggcatcgcccagtgccacttcgagataggcgccgggaacgtcctgtaccgctggtcagagtagtaggcgttgggagtcaggagaatcggccccccctgactcacggccagagaagaaattcgctatcgtttccttgtctcgcctcagggcgcggtgctgtgagcgggaatgtggaagccgctgcaatcgacgccctcgtgctcgagcagccacaatttgcgattgatgcccccggcataccctgtcaggctttcatgggcccctactacgcggtggcagggaacgatgatgcttatcgggttgcgccccactgcgcccccgacggcttgcgcgctcatggactctttgcccaaatgcgtcgccacatcctttgccagatcaccgtaagtgcgtacctcgccggacggtatttcgcagagcagcttccatacggcctgttgaaagccgctcccgttcggcgccagggaaagcgcggcgatagcaggagactcgccggcgaaataggcgtccaaccagtgggacgcctgatcgagatgatcgttcgcgccttctgtcatcggcctgtccagggtaccggcgaaatacttctgaccgttcagccaaagccctttcagcccttcctcgctggccgctagcgtcagcatccccaccggggaatcatacgtgcaagaagcatagtaagcatccgtcttgatggccatttctttcctcccggttcttcgatgaaaaccactctccggcgattttacctgttatcgagtcagcctatgagcggttcgcgtgaagaagcccaaggagggggaagatgaaagacagctgctggctctggagagaggcagaatcggtacctgtatagagggagggtctcgatgagggcttacttcagcctgcgaccctatgggggtcggcgcgaggaacaaagtgcgacattcttgcgtcatagatgcggtcgtgatctggcatgcttgcctcccgcaaagcgatatacggaggaagcaatggcagcacaggaagcaacagaattcgtagcatttagtaatgcccgaatgttcaattacgtcgtttcgaaagaagacgtgtgtcaaaagctcgtggagagaattcttggcatcgaagtagatcgtatcgagttcgaagcagaggaacactcaattcagccgggcctgcagggccatggcgtaaggcttgatgtgtacgcgagaggaggcgggaaatccttcgatgtggagatgcaggcccaaacagaattctatataggctgtcgattgcgctactatcagtcggtcatcgactacgatctcctgcgcaaagggatggaatacggcgatctgccgttcagctatataatttttctttgtgtgaatgatcctttggggtcagggctgcccgtttatacggttgcgccccagtgtgaagaaatgccagagtgccatttggaaatgcggtgtaaatggcttgtgttgaatggaagcgcatgggcccaagaagaagacgagggcttgcgagcgcttttaaaatacatcgaaagcggtatagttacggaaggcgacgagctggtcaagcaaatcgatcgcttggttttggaagcaaacaacgacgagagggtgaagggcgagatgatatccgtaagtaccgtcgaggaaaatgctgagcgtcgcgtccgtatggcgaagaagttctaccgtgaagaaggcttggaggaagggcgagcggaagggcgagcccaggaaacggctcgcatcacggcccttgtttcccgtcttgtggccgatgggcgcgaaggggatctcgttctcctggaagatcctgaaaagctcaggcttctcttgtcggaatactccctctagcttgctgagttaagggggatgtcggttcgtttggctccccgcggttgctccgcttgcgagggctgaccaaggtcagcccctacggcggggtggagtggaacgggatggtctatttccccggcatgaccagcttcaacaggcgcatcttcttctcgttgaagggtgggttgcgaatgccggtctcgatgagggtcgacttcttcatggtggacttgtagtgggtgaacgcgtcgaagcccaccttgccgtggtaggcgccgatgccggaattctgcacgccgccgaagcccatggagttgctactcgcgtgaatgaccacgtcgttgatggtggccccgccgcaacgcacggcatctaggatgcgccgctggaacgcgcggctctctgagaagatgtagcaggccagcgggtgcttgatcgaccgcacgatgtccagggcctcgtccaggtcgcgccaggtgatgacgggcagcgccgggccgaagatctcctggctcatgagcgggtcgtcgatgcgcacgccgatcaccacggtgggctcgatctgcagtgtcgtggggttgcgccggccgccgaaggcgatacgggtgccctgggggcgatcgtcgatgagctggcacaccatgtcgaagtgcttctggttgatcatgtgagggtagtcggggctggccagcacgtcctcgccgtagtactcgtgaatccaccgctgcaattcttccacgaactcgtcggccacatcctcgtgcacaagcgcgtagtcgggccccacgcaggtctggcccgagttcaggcacttgccccaggcgatgcgctgggcggcgcgacggatgtcggcatcggcggcgatgaacacggggctcttgccgccgagctccagggtgacgcttgtcaggttctgggccgcggccgtcatgatctcacgccccacgcgcgggctgccggtgaacatgatcttgtcgaattccacctgcaacagccagtcgttcatgtcgtttgatccgtgccagcagtacacgtagcgcgggtcgaacagctcgcggcacatatcgcgcagaaactgcgacgtgtgcggcgaggtcttcgacggcttcatggccacgcagttgcccgcgccgatggcgtccactagtggaatgagcgtcagctgcagcgggtagttccacggcgagagcacggcggccacgccgaaggggtaggggcacaccgtggacgaggaggggaaatgcgcaagtggcgtaggcgcgcgccgcgggcgcgcccattggcgcagctttctcaggtaaaggcgaatctcgtcgtaaacgagccccagctcagtggcgtacgactcgaaggcggattttcccaggtcggcgtggagggcatccaaggcttcctgctcgtgggcaagcaagtaggcttgcagccggcgcagctggcgcaggcggaaatccacgggtaaggtggcgccggtctcgaagaaggcttccatctcgttgatctggttctgcacgtcggccatggaggtggcaacgccgtagttgttggggatgggggtcgtggaaggcgtggaagaggtatcgttcatgagggggttcctttcgagggaaagttacaaccggcgcagcacgtcccagccggccatggtgatgcaagagggaacgaccttgccgatgaggcgcagcgccgccgactgagggctcgcgcaggccacagcgaaatgggccttgttcgcgcaaagcgcgcggcgcaccacttcctgcggcgtttgctcgccgaggaggtgccccacgtcgtggccgccgccggaggtgcgcgccaccttctcgaagccggtcttcacccaggtcgggcagagcgccgtggcggtgatgccagttccgtgcagctcccagcgcagggcgcgcgtgtagtgcagcacgaacgacttggtggcggcgtacacattcatatggggcaagggcgtgaaagcagcggcggaggccacctggatgatgcggctgccccgttccatatagggcagcgtcgcacgagtcatatccaccagcccgcggcagttcaggtcgatcatggaatccaccgcggcatcggagatggtctgccaatcgccgaacttgccgaagccggccgcgttcaccaagaacgtgacgcgggggtcttccgcggaaagcgttgcgcgaatgttcgcgatgtcggcctcgctggtgaggtcggcggctaccgcgcgggagggcgtgtccagctcgctggccacgtctgtcagggccttctcgttgcgcgcaacaagccacagctcgtcggccacctgctgcgcatctagctgccgcgcgaactcgcgccccagcccggaggacgcgcccgtgatgatggctactcgtttcgaaggattcatggaaagtctcttttctgaacaaccgtgggtttaacctaacagtcagaaggctgtttccgcactggaagcgggcaaccgttacaatgatgtggctctataaaagctcgaaaggaccaaagcctcatggctgctgaaaaaccaacgccgcccttcgacacgttcgtgttcgatgtggacggcacgctgctcgatacgcttgacgacctcgtcgtgctcactaacgatgcgctcgctgaattcaatctgcccccgcgcacccgcgaggagatcaactcctatgtgggcaacggcgtgaaggcgctcatgtaccaggcggttcctgaagggacgccccaggacgtggccgacgcctgcctcgcccgctggaaggagaactacggcacctatcccaacgacctgacgaagccctacccgggcatccccgccctgctagccgagctgcgtcggcgcggctgcaagctgggcgtgctgtcgaacaagttcgatggaggcgtgcagttcatcatgaacaagtgtctccccgacgctgtggatgtgcagcatggggaaggcggcccgcagaacttcccacgcaagcccgaccccacagggctgctcaccaccattgaagagctgggaagcgcgccggcgcgcacggtgtacatcggcgactctccgggcgacatccacgtggcccgcaatgccggctgctatgcggttggtgtggactggggctaccatgacccggccgatttcgccgccgaaggctgggaacccgacctgctcgtgagcgatccggagcagattctcgttcttgctccggaagtctagcgcctgtgtcgcagcgagcccacctcatactctcctgggttatcgtcgccctgtgggcgggcgtgatcttcttcatgtccgcccataccggtagcgatttcgacggcaccggccccttggccgcaatcaagcgttggcttgtgggcctcgtcgctcccattttcggccccgacaccgacatcgtgaacgtggcggctcattttaccgagtacctgatattcggtgtgctgctcgttgtggccgcgcggcgcacctggcccgcgctggggtggggaaagctcgcgctcgtcgctgtcgccctcgccagtctttacgccgtgaccgacgagttccaccagtccttcgtccccggccgcatgtgcgaccccgccgactggctcaccgatacgctgggggccacactgggcgtcgccgcagcagtcttcgccataagaaaggggcgcacgaagcgcccctaaaagtggtttagtcccggcgagctattccgcgtccccgtagccgtcggggttctgggactgccagcgccagccgtcctcgcacatgcgggccatgtcgtattcggccgtccagcccagctcgtcgcgggccttcgtggcgtcggcgtagcactccgcgatgtcgccggggcgccgggccatgatgcggtagggaatctcgtgaccgcacgcagcctcgaaggcgtgaatcacgtcgagtaccgacgagcccttccccgtgcccaggttgaaaatgcccacgccccggcgcgttccgtcttccgccgccgcgccagccaccgagcccacgccgatcggctcgccggtacccacgcgcccggccatccaatcgagcgccgccacatggccgcgggccaagtccaccacgtgaatgtagtcgcgcacgccggtgccgtcaggggtggggtagtcgtcgccgaacacaccgacctgctccagcttgcctacggccacctgagccacatagggcagcaggttgttcgggatgcccttcggatcctcgccgatgcgaccggattcgtgggcgccgatggggttgaagtagcgcagcagcacgacgttccactcgttatcgcccgtgtacaggtcggaaaggatctgctccagcatcgatttggtccagccataggggttggtggcgtcgtgcttcgggcagctttcggtgatgggcacgaactccggctcgccgtacaccgtggcgctcgacgagaacacgatgttcttgcagccgtgctcgcgagcaacttcgcacagaaccagggtgccggcgatgttgttccagtagtactcgagcggtttggccaccgactcgcctacggccttgaagccggcgaagtggataatgacgtccacggcgtgcatggtgaaaatggtctccagctcgtcgcgatccaggatgttcgcctcgtagaaggtgagagagggccccggcgcaacctcgcgtaccgcagcgccggccacagctgcgacggcctcggcctcttcctcgttgggcaggtcggcaaacacgggcgccacgccggcgatttcgcccacgcgccgcacggcctcgcgactggaattgctcaggtcgtccacgatgacgacctggtagttacgctcgagcagttccaccacggtgtggctgccgatgaacccggcaccccccgtcaccagtacgcaggtttcggcgggatctttcgcaagcagggcgttcgccatgggagccttctttcttggaaacgacgacgcaggttttgcgctcttgaatcgcatgacgctatggtatcaggttgggatggcttgccgctatatttgatggaaagcgcatggccagagcggccagtgagtcaggggggttctcaggagtcaggagaaccgccccccgactcacgccccgcctcacccgcgcccaaagaaagccgccttcagcgaaaaagcgacttccacggcccgcatcctctataatcgttctcgcaacaaaactcgcaggaaaagcccaggaggcattgctcatggctgacattcattttggaaccgacggctggcgcgccatcatcggcgaggatttcacgcccggcaacctgaaccgcgtcgtcgcggcggcggcccgcatcttcaaggaggaggctgtggccgcaggtcgcgacgccgatgcgccgggtacgctcatcgtcggccatgattgccgccaggatgcccacgcctatgctgagctggcggcccaggtggccgcaggcgagggcttcaacgtgctgctcaccgaggactattgccccacccccacgctgtgctggtcggtggcccataacgacgacgcggtgggcggcatcatgctcacgagctcccataaccccgccgagtatttgggcgtgaagctgcgcatggccgatggcggtgcgagccccgccgagttcaccgatcgcgtggaagccgtgctgccgccggagccgacggacatcctcggccccttccaaacggccgacctcatgactgactacctggccgccctgcgcgagctggtcgatgtcgaggccatccgtggcgccaacctgcgcgtggtgtgcgatccgctttacggcgccggccgccactacctggccgaccttctgcgcgacatgggcgtggaagtcgtggaaatccacaacacggaagatcccaccttcgccgggctgcatcccgagcccatccagccttgggtcgacgagggcctcgcgaaagtgggcgagctgggctacgacgcgctgttcatcaacgacggcgacgccgaccgcattgccgccggcgattcgcggggcaactacgtgaacgcccaccgcatcatcacgctgctcaccaagcatatggtcgatcgcggcgagacggggcgcgtggtgtccacggtgacggcgtcggctatgctcgaccgcatgtgccgcaagctggggctggagctcgtcagtacgcccgtcggcttcaagtggatctacggcgagatggaaaagggcggcgtcatgatcggcggcgaggaatccggcggcatcgggcttcccgatcacgtgaaggagcgcgacggcctgctcatggcactcttgctcacggaatgcatggcccagtcggggaaggacttgggcacgatcgtcgacgagatgctcgccgatatcggccgcttggagttcgctcgccgcggcctttctatcaccgacgagcagatggcccgcttccgcgccgaaaccgtgcccgcgtacacggccgacgagatcgccggcaagcgcgtgctggacgtggatcgtcgcgatggcgtgaagctgcttttggaaggcgacgcctgggtgatgatgcgcccctccggcaccgagccgctcgtgcggatctacgccgaggcggccaccaccgacgaggtaaacgagcttctggatgccgccgaagcggtggtcacgagcctgtagaggcatatattcaaactgctcaagtcttccaatcgatcgtataggtaaggggccgccgaagctgagatgagcttcggcggcccctttgtcgcgggtcggggaaattgccggtggctagattgccccgttgctacctcgcccggcgcgcgcggcggcggcctgccagggcgagggcgccggcggccagggcgagcgtcgcggagagcagcagcgccagggacagggcgtcgccggtctgggcgagcttgtgagcgatggtggtgcgctgcttttcgcgggcggtggagctgtcatccgcgtcctgcagaatgccgcctcgagtggtgacgcctggcgggtacacggggtcggtggacacgctctcgtggctgcggatgtacccgtcccagccctcttcgggacggaaggggtcgcccggcgccggcgccggacggtcgggatcccattgggatggaggcgtcccaaaggccgtgcccacgttgccgatgtcggtgtccagcgcgtctttggtgaccagcgcgtcgaaggagagcgccgcctcctggccgccgtagaggtgtccgacggccacggccaggatgcgcgtggcggggtcgtaggccccatcgtccacggcgacctctcgcccgtcggggagcgagagacggatggtgccggcgacgggttccaggccgcggggcacgtcgtcgcggatgacggcgtccatccacccggtggcggggccgctgttcgcgagggcgatgcggtagcgcaccgtgtcgcccacgtgggtggtgccgtcgtcgcgggaggcgttctcggcggtcttggcgatggacaggttctcccgcccggggtcgtcggggatgatggtcggcggctcgacgggatcggaggacgctaggggttcgtccgcgggcggatcggtcggcttgcccggatccgggttcgagggcacggtgtccggatcctccgacggaatgctcccatgggtatgggcgatgttcgcgctgctctggccgagggcggcggcttccacgacggcctcgaacgtgagcgcggcgctcccgccgccccatatatcgccgcaggtcaccgctatggtgcgcgtctcatggtcgtaggccccgtcgggcacggggacggacgcgcccccgcccgcggcaagtcgcagggtgccggccgcgggctcgatgccgacgggcagcggatcgcttatcacggcgttcaccaggcagctgttggccgcgccggtgttcgcgagcgtcacggtgtagaggagcctgtcgccgatgcgcgtgacgtttgcgccgggggccgtgaggttctccaccgtcttcgtcaggccgatctcggggtcggccggcacgacgcggcccgggccgggaggggtgacgggatcggtgggatcggggtcgatcggcagaggcttgcccgggttggccgggtcgggcatcggtttgtccgggtcggccgggtcggggcgcgtgccagtggcctcggcgatgttggtcaggtcggcggcaggcgcgccctcgccggccgcgtcggccgccacggtgcactcgaaggtgatggtggcttctgctccgccgggcacgttgcctgcgggcacggtcaggacgcgccgcccgttcgcgtcggccgccgcgagtgcgaacttccccacgtcggaggcggcgaccagcggcgccttcgtgagtgccttgcccgcgacgcccccgcgcgggttgtccagccgcacgctgccctcgtctagctcgaggcaggcgggcaggggatcgcgcaccaccacgccggtccacagtgaccccgccgtgccgttcgccgccgtgatcgtgtagcggatgcggtcgccgggctgcgtgggtccgtcagggtgagtgaggttctcggccttcttcgataggctcggcgccggcgccactgtcacgtcggggttcacggtgacgtcgtatacccaggtggagcccgtgtaggcgccgttggcctcctgccggatggtcagcttgccgcttcccgcagccgtggggtccagcaccagcgtgtaagtgccgtcctcgccgcgcaccgggtgcccgtcggcgtctttcaggaagtcggctgtaaacacgttgccgctcgcgtcggtgacgctgatcttccccgtggaaggcgtcttgatcgaaaggatgacgcgcccggggtgcgggttgtcctcgttcggctcaccccaggtcgttgtgatggagccacggtaggtcttgtcgccgggctcgtccgggccggccgccgggtcgtccggctcccccggccccgtctccaccgacggcgcggggaagtcggggtccttgcagtccgggtcgggcgccggcgtcacggtcgggttcggatcgatgggctcgatcactacctcggcgctgggggcggagggatctttcgcgggatcggcgctcgcgaggtagttggccggcacgcccgcctcttgttgctcgtccgagggccgaaggaactgcagcgacacctggtgtttgcccgcctctcccacgcctggcacgagccagtctgctttcgacggcgtgaaggtgtaggtgaagcgcgtctccgctccgccctcgccgttgggcactacggtggcgttggccacgcccgcgttgtcggggacgggattgcccgagtcgtcccgcagcacgttcccgttctgatcgagtttcgtgtcgaagagcagctccaccggatcgcccaccggctcgccgtcaacgaacagctgcacgcggccgcgcggcgctttgcaggtgggggccgtggcgttcgaccggtcggcggccaggggcttcccgtccacggtgtccccgcgcccgatgacggcgctcacggtgatgcgctggtcggaggggtgctcgttgccgccgggctgcagtgccgcgtccccctcgtcggcccatactgctcgcacatcatgcacctgggagggaatggacgtgatctcgcaccatcctgtggcacggtggccccagtagccgttcgcgaagtcggcgagcgccgggtccgacgagccggagtactcccgcgacaccatggtgaacttcatgacgcccacgttcaccggtatgtccttgccgctgtccacctcgtccccgacgggcgcgccgtcgcgtttgtcgtacagacggtagcggtaggtgacgtcgtcggtgttggtgagccagcggtactcggaggggttgccgtccttgtcgtagctgagcacctcgggggtgcgcaggggatgctcgggcgtgatctcgtaggtcttgaacggcagtccgtcatagggcttgacgaggctgttgaggtactccttcggcagctcgaagtcctcgtagcgcttcagctggtccacctggccgggattgcggaacagggtgtcgaaggggtgcgcctggccgtccttgccgcggtaggacaaatccaccgacaccgtctgctcggtggccgacttgggcagccacaggtacagcttgccgccgatgagctgcgtcggcgcgccgtagggatagtcctctccgccgaccttcagggtccagctctcgatgaggttgtcgcctgcctccccggcggcggccatgtcggcggatagatcgatggtcaccataaacaccttgttggggtcgtcggggtcgttggggttgtagccgtcggccaaggccgcgttgttgccccaggccgtgccgccgatgcccttgaaggatccgttggtgtacactgagccgcccgtgatgatcacgtggccaccgtcggcgttgaagtcggggaatccctcggaattggtgacggaagggtacaacgtgccgccggtgatgcggatgacgccgcccgtgttaggggtggaggcacagctgttgccaaagccggaggagtgctcgaagcccgtcgatttgacgaagccgccgttgatggtgatgttgcccgcatggacattgctggcatagcaccaagtggatatccagacgtaatcgccccgctgccgtcccgcagatggaatatgatcgggcgcaatgccatagtcgtagttgaagttgctcttggccccgcatcctgagccgatgccgcttgcatggtagtttcccacggcgttgatgactccggagttaaaggtgaggacgtcatcggtgccgcacccccacgagccgcctccgatagccgctccggactcgagcatgttgtcccctgtccatgaataggctgttatgtttcctccgttgaaggtcatggagccgcccgtttcttcggcggcccctccgatggccgccgcctgctcgccgcctgccactcccagttttccggggtttgcgctgtcaagaactgtatgagggtctcccttttccactttccgaccgcttagcagggtagtgtcttggttgataacggctccaatgggcaccacctcagtgccattcgcgtccgcatttctttcctcatcatccacaatgaggctgcttccttctccgcaacgaatgccgggtgcattgatcacccctgtggcgaggtagtttgcagaaccatcggccaatgtgatgtggagagtggtgcggttgcgtacctctgctcctgattttgcctgtgttccatcggcggtgtcgacgatattggtcatgacattgatggggatgttgcacgtaggcgtagcgtttatgttcactccgtcaagagcgatttccccatggttgccgggggcgatgtaaatgcacgtcttggcggcgttggcgtgtccaggggtgtcggtgttggtgccgcggcgtttttgaaggtgaggggcgtgcttgtcagcacgaggatgcaatccgcctttgcatagccgccgtaacctacgaacccgtagctcaccaccgttccatcttctttagggtactggaacatgtcggggtagtagatgaagtcggtgccgtaggtgccgccccttacgcgcaaggtgccgcaggtgacccagccgtcggcgtcgggggcgtgggtggcggtgctggcgttggggacgtttagggccacgaggcccgtcgcggtgggtgcgggaggggtttcagaaagaggagagacgtcgggctctgtgtctgctagtggcgcggccgacgcgggagcagcggaggccgacggtgcggtatcagtgtctgaggttaccgccaccaaaggcagcgccgcggccacggactgggctacggggtcgggggcgccgtcgggcgccgcatcttcaggagttgcgtctccggagccggacgcagccgggttgtcgagaggggaaggagagggactttgctcgggagggccgcccgggtcggccgagtcgccggtcgcggcgtcgtccgctagggtctcaaatacctcgatggggggggg

SEQ ID NO: 10533 - DNA, 27502 bp, Unknown
  gut microbiota DNA sequence
ccctacggggaggggcagcgaagcggcaagccgcgctataatgggagcgatcattttccgagaaaggacgctcatggaataccagcagctgcaggacgagatcaaggcggccatgaaggcgcacgacaaccatcgtcgcgacattctgcgccaggtacataccgagctgaaggccatcgaggtgaacgagcgccgcgaggtgaccgaggccgacgtggacgccatgctcaagcgcaccatcaagcagacgaaggagacgcttgacggctccatcaaggccgggaacaaccaggagcgcaccgacactctcaccgagcaggtggccattctggaagagtatctgccccgccaggtggaaggcgacgagctggcagcacttatcgatgaggtgctcgccgacacgggcgcgtccacgaagaaggacatgggccgcgtcatgggcgagctcacgcgccgcaccggcggcaacttcgacaaggccggcgccgctaagatcctcggcggaaaactgagctagcccacgtttaccacaagcacctccgaacgatccccctcttgtcgattttcgcttttcggaagtaaatgccacttcctcatcgaaatggcacgatcaattttcgcctctctgccatagctaccctcaactggcatttttctgccacttcaggcccgtaatggcagagagccccagcgtcaatcgaccatttcggcaccgaagtggcatttactcgcctctcccccaagcacaaagagaaggcctcccgtcatgggaggccttcctgcttagagcgtctttcccgaactgattagaagaacgggtagatgctgatgccggtcatgtagaacacgacgcgcagggcgagcgcgctcacgagcacgcaggccacgcagaccgcgccccacaccttccaatccttcttcgccttgccgacgaaggcgccggccacaccgcatgccgcggcgatgagcgcgaccaccgagaaggccagcgaggcgccggagaagggctcggtggcgcccgtcggggcgatgtccatggtgggctgggtagggtcgaaccagaagtccacctgggtgtaggcgcccaccgtcgcctgcatggcgacgaggtaggccaccacgagcaccacgttcacgatctggccgatgacgttcaccttggcggtgtaatcgagcgactcatccttcacggcgcacagcaccgccatggtggccgggccgaagccgcaggccgcgccgagcagcgagccgatctgcagcacggagtcccaggcgggcagcgaggccatcatgtaggagtggcccatgacggcgacgagcacgacggccagcaccaggccgaccgctgcgagccacgtcggcaccttcgcgtcgtcgccgccgcagcgcaggtacacgaagtagacgaccatagccacgaacagcacgatgatggcgatgagctcctgggtgatgccactcgtgaggtgcccgaagccgttgaagatgcgctcccagtgctccaggtggaagaacaccgcgatgccgcccacgaccagaagcgcggccgaggtgatgagcgccggcatctgggcgcgggtgccctggccgcgcagcgtgtagaggcactgcgcgccgaacacgcccgccgcccacgcgagcagcgtcgtgaacagaataaggggccattgtaattccataatctactcctccccttgccacttgcggttgcgcaggatgtagcaatgcttcgggccgttacccgtgtcggtcagatggtacacatcggcctcggtgaagggctcgacccactctccgagcgtcgtgcggttctgcatcatctcctcgtagggagtcgccagatcgtgggtgggcgccaaggcctggaaggactccaagccctcgtccaagtcgccgaagaagcgggcgcggctgccgcactgggccacgcactggggcagctcgccctgggcggtacgctgctggcagagcgtgcacttctcgacgacgcgctcctcctcgttcaggtagcgcacgccgtaggggcaggccatggcgcagaactggcagccgatgcacttgtccttgtcaatctgcaccgtgccgtcctcggtcacgtgcgacgcctgggtcgggcacaccttcacacactcggggtcttcgcagtgctggcactggatggggaggaagtacatctccacatcaggccagtcgccggaaccgccctctttgggggtggggccgatgcgcagcgtcttgatccagaaatcgccgggcataacgccgttgatggtcttgcaggccgccgagcaggcctggcagcccacgcaacggttcaggtcggtaacgatagcgtagcgagccatcttacatcacgctcccatcccactcgggttcgccttcgaagcgggcgcgcacgcccttgcccgtgggcacccactcgcgcaggcgcgggtcggaggcatcatggatacattcgacgccattcggatcacacggaaccggattgccgaacggggaattctcggccgtggccttgtacacgatggtcggggtggagcgcatcgtggcgcagccgccgacggtgtcctggccgtaggggtcgttcaccacgttgatgcccaccagctcgaagccgtgagaggcggtgtcgaactcggggaaccaccaggcatggttggcattcactacgccctgggagatgccgtagtacaaatcgagcacctcgcggaccttgccccacggcgtctcgatccacacccagtcgccctgcttgaggccgaggcgctcggcgtccttcgggttcatctcgatgcggggagacggccacacctcgcggcaccagggcagctggcgatgctcggagtggaagtaggtgggctgacgggagcccgtggtcatcaggaagatgttgtcgggcatggccttcagggtgtccttgtagccatggttcatgaagtaagtgtcatcggcctggtcgacgagcgcagcatcgtacagctcgggcttggccaccggcgagtcggtgggctcgcggtagatcgggaagcggtcgtcgtcgccctggaactgcggcaggtcggagtgcgcccacttgtcggagtcctccggcacctcgcccatgttgcagatgtaggcctcgcacacgagcgaccagatctccaccaaaccggaagcggtcatgaagccgggatggaagtccacgagcgggaacaggttgaagccgccctgctgacgacgccagcccatctcgtggcggcggaaggtgccccagcgctcgggatgccactcgcggcagtccatccaaccgtgatcggtgaaccactgtttggcctcggcccaggtgggaccttccgggaactcggcggtgcaccacttgcccacgttgtccttcagcacgcgatcgtggtcgggccacaggtagctcggcgcgccggaggcgtcgtagtcgtcgcccagctgctcggtccacttgtcgatgaaggtctggcactgcggcgcgtagttgaggttctcggccggcgcagcgtccgggtccttcgtgttccacggcacgcccatggccttgtacatgcccacgttccagtcgggatcgtagatggtctctcccggaggctcgatggccgcgcagcagcaaccgaacatgccgccggagccctgggagacgcgggtggagtcgagttccatccagtgctggcaggggaagatgatgtcggcgttgccgttgttggggcagaaccacaggttgatgtcgacgaagaagtcgagctgcgtggtggcatcccaggcgcgggcgatgttgcccatgttcatgatgtcgccagactggcacacgccgccgtgcagggcgtacagagtctccttgacgttgtagcccacttccttgttctcgttctccatggccagcgaccaatcgggatcctgcagacaggcgtcccagatgcagttcgcgtcggcccagcgagcccagaagcgattgagcgggaagcgatcggcgtccacctggccggcctgacgcatgaagatggtcgtcgggttcggccaaccctgggagggaagcatggcgccgcccatgcgcttggcgatgacgatggcctcttcatcggagggcaccttgttgccgtagcgctcagcgagcggggagttctcatcgatgaggtactgcacgaagtcctgcatgtgcttggcaacttcctccagcgagtagtcgcggcccggccacaccttcgcagcatcgccccagggtgccgccttctgcatgttggagcggcccgggttgccgtcgaactggctcttgcaggagccgcggttgccggcgggctcgtcggaattgcccgtcacgcaggagagcatctgcagcacacggcagttctggatggagttgccgttctggtcggtggccagctggaagtggatgccgccgttgccgtggcgcggatcgacgcgggtcgtccacacacgcacggcctcttcggccttctcgccgggcacgccggtgatctcctccaccttgtcccaggtgtactggctggtgaggtcgtggaagccgtcccacacggtgcggcactggtaggtcttgccgtccttcaaggtaacggccacctcgccggggaacagcgcgggcttcttgggcagaccggccgggttcgtgaccttgcccttctcgttgccctcgtcccaataggcgtcgaacttggcgtcggccggatcgcaccacaccgacgggtcgggcagccagccgggagccacgaggccctcgagcggatgctcgatgaaggagcccgtggtcgggatcttgtgcatctcgccttcccacttgccctcttcggcatcccagtaggtcaggcggttgttgttctcgtcccacaccatgaagcgctggtacttgccgccctcgatgatgtcggcctcggtaatgagcttcgtgcgcatgttgatgccgccgttgccctccacaagccagccctcggtcttccagggcttgtcgtcgcagaagaggaacggagcgttagaccagcggcgcaccatggtgtcgtcgtaggcctcgttctcgatgatccagttgaaccagccgagcgccagcgcgccgtcggtgccggggcgcagcggcagccagatgtcggcttccttggaaagcggcgtcacgcgcggatcgacgcagatgtgcgccgtcgcgtgcggggccacgtccgaaatggtgcggttggtggtgtcgtagttggagtactccaccgcggtgccccactgcaggtacaccttcggctcggcctccacttccatccagggggagcccatctcgtcggtcatgatgccggcccagtgacgcgggcccttgcagacctggtaggccaagtgcgcgttcggcgtgccgaacagctgcttcatgccctgataggggccaagcgaccacacgcgcgacgtgccgcacataacgaagatggactgtccgccgtacttgtcgacgacctcgcccaggccctggcccgacagctcgaacgcctcgtccagcgtgatgcgcacccaaccgggatcgtccgagcccttggggttcgtgcgcttcacggggtagcgcagacgatcgggatgataggccgcgtgcatggaagactgcgacttcgcgcagcaatgaccgcggctctggggcgccgactcgtcgccttcgaccttgatggccttgccgtcctgcaccgtcacccagacgccgcactccaccttgccgcaagcacggcagcacgtgcgcacgtgcttcagctcgccagcggttgcgttggcatcttcggcgagagctcgcatgggcgcgaccgccgaggaacttactgctgcagccgcaccggtgatagccatcgtcttcatgaagttgcgacgcgacatggttagctgtgccataaaatcccacctctctctttcctacatcctttgccgtttctctcttgcaccgacaaagcaagcggcttgtcccccgacggggcggaaggctggcgctgtgcgctgcgcccgccacctccacgccttcgccggtttccccgggacgctgacaggacggtgccttacgggcgcaattctacggaggcgcccatcgtcccccttcataggaggcttatgatttgggactattattctgggagaagagggtcatatgagaggaaatgacctggggattttctaagacagccccgcgtccgcgcgatttttcacgtctgccgctgactctgtgttatcatcgcaggacgtaattctgctgcggacatacgggggagcagctacatgaacgaaaagcaaggggccgccacgccggccgctttgtcgtgcactgagctggaataggggaaccatgaagctgccgcatatcaaagttgaagtggaataccgcgaagaggagaccggggcgccgggaaaagtatcgccggcgcttatcgtgggattcggactgcattgggcctgggtctatctcttcatgttcaacgggcagtacatcctcttccccgaagcggattccatgcagttgctgctctccgccacctccggcatcttccacgccgtggctttactgctgtatgccgtgtttctgaagcaggctcgccagctcttcgacacgcccgagcacatccgtctcaaccgcgtgattgcggcaggtctcgtggcctgcgcgacgcttttgtgcatggcgggaaacgcggtgccgacggggcctttggccgcacttctcttcgtggcggcaggcatagcgagcggcgtgggctcggctatgctgctcatgagcttcggcgtttccttcagcgtatgcgacctgcccacgattgccctgtgcacggcgctttccatcgtggtcagcgccctcgtgttcgccttgacgcgtatcgtgagctcggtcgttgcgcccgtcggcgccctcctctgtctggtattgcccttcgcggagctgctctgcctgaacaagtgctccgccgatctggtggacaagctggagttcgccttcctgacgatgcccgtgcgcaccgcttccttcgcagcgcgcttgggtgttccctcgatcatcttcggcgtgcttttgggcatcctgcgctgctgcgcgctcaccgggccgctgctggacgtgcttctgtccgaaggcagcgcggagaacacgttcgcgttctcaaccttcgcggcgagcctgttcgcttgtgcggccctcatcatggccatgctcacgctgcgcaagtcgcgcaacttcgccttccgtgtgctcgtgccgctcatcgccgtactgctcgtgacgctgtgcaccccctatggcatcgacggcgccttccgctgcttcgccctgttcggctcctacttcatgctggaagcgtgtctgtgggtcatgtacgccgacatcgcccagagctaccgtgtgagcgcctttaccaccttcggcttcggtcacggccttctgtccgccggttccctcgccggttttctcatgctgcaaccaggcggtcttttggaagcggtgtcggccgaaccgatgatgctggctttggtcgggctcatcgcgctgaccctcggcgttgcaacgctgcccaacggcgccgagatgcgcagcacgctcatccgcgagcgcttctgccctctgctggatgaccagaccgacttggaagagctgatgagcggggaaggcgccgccaacgagccctcaatcgaagaagctatcgctcccatgccatccgataaaccaactgtttcttctgcgccgaacgcgattccggaaggagcgattcccgccgcccaagaatctcccgagcagaaggccggacgcttcaagcgcaagtgcgccgccgcggccgataccttcttgctgtcgcgcaaggaaaccgaggtgctgttcctgctggcgaagggccgcaattccgccgccatccaggaggcgctttacatctccgccggcacggccaacacccacatgcgccacatctaccgcaagctggacgtgcattcccagcacgagctcatcgatctggtggaatccatggcggtggattagcgctcgtagacttggtcggttttcatcatggtttgggctttgtgccagatggtgtggggggtgtcgtgctgcacggcgcgggggcgcatggcgtagcggtcggtgacgccgcccatgagatcgacggcgaagatctcctcggagatttcgatggcgtgctcggggcagatggcctcgcagctgcggcatttcacgcagtcgctcgggcggtgctccacgccgaaggtgccgtcggcgtcggtgaacttcgctagagcgccggtggggcagaacacggcgcacatctggcaggaggcgcacgcatcggtgtcgatgacgacgtggccccacaggcgcgtgtccaccatgacatcctccggctcgcccaaggccgccaggctgtcgagcaggcgctcgcgacggtcggggatgaaatgcggcagggtgccgtcgtccattactttaaggtagcggctcgtatcgcgagcatcggtcgccggcgcggccccagcgtccgcgttgccggcgtcgcccagcgcctctgccaccgccgtttccgctacgactgccccggcacgggcggccaacgcggcgctttccgcgagcacggcgcggcggccgctgtcgtgatcggccatcttcttggccgaggccggcagcttgcccgagaagcgcacagtcatgggcgagccccaaatttccagcagcttctcagcggtttccaccaccgcctcggcgcacgcgcggcccctcttgtgctcgcagcgctcgcaatcgccgtggatgagcaccacctcgcgcgcaccttccacggcaagatcggccagaagcgcctcgtccacgcggccgagacattccacacgcgcgatcttctcttcatcgtagcggccgcgcgcccgctccaaaagctcgccgcaaccgagataggccacgccctcgttggccgcacacgatgcgcaggccgccgccacgagagcggcgtcgctgggatgatgggcctccagagcacaggtggggcataccgtggcgcaggtgccgcagccgatgcacttctcgggcgacacggtgagcgcctcgccgtcgtaggaaatacaacccgacgcgcaggactcggcgcagcgcaagcagtcggcgtgacggttgcgcaccagcgcacagcgctcttgatgcacggtgatgtacgggctttccagcttcccgatgagtcccagcatagtgtcgatgctcgccatgattcccccttgtgtcctcgatgcgtgtcgaccggaaccgcgacccgcaacccttgtcccaactgcggcggaacaaaggctgccaggcgcagtccccttggcgttttcgtcatcataaaggccatttcataggcgaaatcataggagccatattattctggctatgaaagccctcctaaacttctcggcgtattggggaatcgagagaaaaggagggaacatggcactgctaagaccgtcgctgacgctcgtgctcgatctggatgagcgcgtcgccgccgagcagaccatcctcgaaatcaatcggagctacgcccatattggcacgcccgttattcgcacccatgcgtgcgaaagcgcggaggacgcccccgtgcgcaacacggcgcgtctcatcgtgaacatgggcacctactcttatctgaactctgccgacgaaggcgccgacgagcggtgggagaccatcgtggggccctggatcggcaatatgctgcgcaagatcggcaacaacatgaaggtgttcaacgatcgccagcgcaagatcagctatccggaagtgcacttcgacaccttggatatcgaactgggcgccggagccttcaccgtcgccgtgcggccccaaggcgcgggagatgtcgacgaggccgtagccgaactggtcaccgccgctcgcgacctgcgcaacaacggcaccttcgccgaggccgtgcgcgtggagctgccttgcgccgaatcatggaacgcccagcgcgacgccgcctgggaggcctgggcagccgagcatcccgaggttttggaagagcccgacaccgacgaggaggcgccgagcggcgacgttgccgacgaggcggccgagcccgcgccggagaagacccgcgaggaacttctcgccgaggacgtcatcgccaagagctacgagaacaccgccgtgcctcccaccgactccgaggcactgccgcgtccccagcgcgaagaggaagaagaggaagagcccttcgacttccccgtcgattacaccctgtgggccgtcattggggccgatggcgcaacacgcacctacgattccgtcgcagcggctttcgtcgactagtggagatgcccatggcacccgagaacgcttctgccaacctggccgcctcgcgcaacggcgcgcccgcagcggcccggcagccccaagagatacgcggcgtgcacgccctcgtgaggtgggaaagccccgccgatgaggtgcgcggcattgccgcaggagccgccgtgctactgcgcgatcacgccgtgctgccccatcaaatcggcttcgctgtgccgaaccgcacctgggccatacagctggcccaggcctgcaaggtcatgggcgtgcgcgccagcatcgcagaggccggcgaagtgccgagcggcagcgccgccgtcatcttcgacttccgcaccccggagagaaacgttgagtggctgttcgtcgtcggctgcaccgagggccttatgcccacggcggcggccacgggcgacgacgaggccagtcgcgcagtccaacaagagcagcgcgccgccttcgcccaccttgtcgccgatgatcggccccatgtggtgctctcctatttcgcccaggcggacgttgccctagccgatcagattcgcctgccctatcgccgcacgatcacccgcgacggtatctccctcgcctgcctgacccccacccgcttcatcagcgagatgggagcggcacggccaaccacggtcggcagccagcgctttctgcgcgatgccggcctgaactagaaaggagctcccgtgagcacaccggatttgtccgcgttcaacttcagcttcgatccgactctggacacctgggccgtcagcaacgagcccgccgagctggattcctctgagatctttctgcccaacgtggaagggcgcaccgagtttctgccccccgaccccgatcgcgtgcccgtcatcgagaactcagtgcgcaccgacgatcccacctatgccgcccgccccgccgaggagcgaacccgcgagcttctgtcccagatgcgcccgcaccgcgccacgctgctgggcatcctggccgcctgcgagacgccgatggcaaccagtgccatgaaggaaaccgtcgagcgcatcagcgggcggaagttctccgtgtacacgccttccaacttctgcaccatgctggaagtggccggcggtcttgcgcgcgtaaccgatgccggcgagccctacaccgacgaggtgcgagcacccgagatggtggaagtggacggccgcgccttctggcgccccaccaccccgccaccggtgtactggcagaccaccgaagcgggcgccacggtgctcgccgaggacgatcccgccgcgcgcatcgagcgcctcttcgccaaagagcccgagttcctccccgtgtacaagcgcattctgctcatggccggcggcgaagagggcacgtccatggggctcatgtccgtggccgtcgacaccgatccggccatcgccgagaaccgtcgcttctacgtgcagcatttcgtggaaagcctggagcgcgccggcgccttcgtttgggccgacggcgcctggcgcgccaccgatgcgggccgcgcggcgctgaccggcgcgctggccgaggtgatcgacgactacgaagtgccagccgttgatggcgtgacgtgcgccaatgtacccactctcaccgatggcgtgaactggtaaggaggagccatgactgaggaaattctggaagagacggctctcgcgccatccgagctgatcgagctgttcaagcaccgcagcgccacctacgggctgctctcgcggctgtacgccaaggaagtggacgccgagctgcttgacgagctgcatgacacgctatggcctgtcgagaccggcaccgatgccggcgacgaaggcaaccgcctcatcgccacttacctgtccggcatctgggagaacaccttgaccgagctggccgccgactacatgcgtaccttcttcggccacggctattcgggccacgcggcggcctatcccttcgaaagcgtgtactccagcgagaagcgcctgctcatgcagagcgcccgcgacgaggtgctcgcgctgtaccgcgccgccgggctttccaagcaggagagctggaaggagggcgaggatcacatcgccctggagctggagtacctgcagattctctccgaccgcaccgcagaggcgctctgtcagggcgataccgacacagccgcgtcatgggtgcgcacgcaatacaacttcctcgatgtgcacctggccagctgggcgccgctgctcaccgccgaggtgaagaagtttgccaagaccgatttctaccggggactcgccttcctcacggagggctttttagagaccgaccgcgaggtgctggaagagctgctcgcggaggactagcgttcgggccggtcgcgcccgtcgcgccggccctctaagtagaggagaagacatgggagacgagaagaaacgagaaggcgcgggcatgtcccggcgcaccttcgccctgggcgtgggaggagccggcgtgcttctggccatgggcggcttgaagctggtgcccgcggaggcacaggtgcggccgcccggaggacaggacgagaaccggcttgtggcgtcgtgcattcgctgcgagcgctgcgtggaagcctgcccgcgtggcgcgctgcggccggcccacatcgaggacggcatcgtctccgtgcgcacccccacaacgaacttcaacgacggctggtgcgacttctgcgccgacgagaacgacggggtgccgctgtgcgtggcggcctgccccaccgaggcgctggcgctgcccgccgacgcgaccgccgaaaccaccatcatcggcaaggccgcactcattcgcgaatggtgcctggcctgggacaagaacaacggctgccgcttctgctacgacgcgtgcccttacgaggccatcgagctggacgagaacggtcgccccgtcgtcgtgcccgacaactgcaacggctgcggtgcctgccagagcgtgtgcgtgtcccagaaagagggctcctacaccaccggcgccacctcgcgcgccatcatcgtcgttcccgagagcgaggcctaaggagtcgtcatgagtcagaaacttcgcatcatcatccctctggccctgctgggcgccgccggcgtggcctacgccgcccacgtcagcgcgggcaccctgtcagccttcggctgggaatctatttcgcttatctgcccgatcggagccttgggcaccatgctcgccagcaagatgctcgtgccgcgagcggtcatctccatcgtgttggccgtggccgccatcctgcttctgggccgcgccttctgcgggtggctctgccccgtgcccgtgtggagcaagctgcgcggcatcttcaagaagggggatggggaggccgcgcccccctccggcgccgagaagcgcgccctgaaaacctcctgcgcaggcgcatgctcctcctgcgccgaccgcaagccggccgattcgcgccacatcatcctgggcggcaccctgctttccgcggccgtcttcgggtttccggtgttttgcctcgtgtgccccgtgggcctttcgttcgccctggtgtttctgcttatcgcgctgttcggcggcggcgatgtcacctggtcggtgctcatcattcccgtgttgatagccgccgaggtgatcttcttccgcaaatggtgctcgcatctgtgccccatctcgtcgttcatgagcctcatcggtcgcgccaatcgcacgttccagccggccatcgacgatgcgaagtgcctggagacttcccatggtgccacctgcgggcgttgcgccgaggtgtgcgaggtgggcatcaacccgcgccatccggagctgggcactaccttcaacgagtgcacccgctgccgcgcctgcgccgacgtgtgccccgggcatgccatcagcttcccgcttatcgcccgcaagacagccggcgccccggcgctggagccaacgccggctggggcgagcggcacaccggccatcgggtctgacctcgaccttgacgagccatccgaggctctctcgtaacgcccgcctcctctccttgggaagaagctgggcgcggcgaccgtgcaggcaagcctttcaacccgcacggccatcgcaccgcagcccagcctctccctgaccggcctttcccctcctccttcgatgcggcactcctcattttcccgaagctttccctctccctccccccgcttcggcccccgcatcaggcgcctccccttcctgcgccctgcgaaaggccgttcagggggagcccggcagtctcgattccccaatgtcctcgaactgctgggcttccctttctaccatctcatccagcgtgttcggaaggctacctatgaccctatcgccaacagcaactgaagcgctctgcatcacgggcgatccccgctcgggcaaaacgggcacgctcgtcgaacgtgccgtagcctgggccgaggcggctcccgcgactccggacgcccagccgccattgctgttcttctgcgcgtcgcccgtgacaacagatgacgccgcacttcgcctttcgcagcgcgaactggcgaacgtgcccgtagaggctgtagggcttgccgaacccgccgcttgtcagcacggcccgcgcacgggcctagtaaccacgcccttcgattacgcttgccgcattctggccgatcctcgcgctcagcgggccatcggtcgcggcgggcgcgtgctcagtcgcgccgaggaggccgttttctacgaggatctgaaaacctgcggcctgaaacgccggcgcctacgggagctgtgggcctttctgcaatgcggtcttgcgaacctgaacgacggcgaccctaactggattcagaccaccgaagaacgggcgattctcgacctggctcgcgacattctcgctttcgaagacgccatcctgccgggcgaggtggtaaatctggccgtgcacgctttggaagttgaaccgacgctgcgccagcgcttcggctcgcccgtcgtgctggccgacgattacctgctcatgagccccgcctcccaacgcctcgtgaacctgctggccacgagtaagatcgccgtggcaggaagcgagaaagccgcccttcccgccttcgagccctacccctgcgccacgggcttcgaagaattcgaagcggcccacgcccctcttcaacgcgtgacgctggaggctcccttccatgcccttgaccgcgcctgggaggcggctcccgacctcgccggcgagatgggccttatcgcccgcacgattgccgaggagctggccggcggcacgagccccggcgccattgccgttgtatgcgtgaaccgcacgtggcgcgcgaacctgcaacgggccctcgcatcggtgggcattcccgctgcgtcactgggacatgcggccctcaaagcccccaagggcgatcttgtccccgccaacgacgacgagcgcgagcgcgttctgaggcagcttcgcgacgacatcgtgcaaccaaccggcttgcgcgaatcccgcgcccgcgctcgtgccgatatgagcggcattgcgtcccacaacgaaccgtcggcttccccctgcggggactccatcgcgtggcgccagtggctcagcttcgacgacgccctcggccgcagcgccgccgtctccgagctgcggcgcgtcgcgcagccccaaggcctcaacctcgcggaagccctcgcggccttggatgccgataccctgcccgggcttcccgcaaccagccccttcgcccaaagcctgctcgccccctaccgcgtagcccagcgactgctcggggagcagagcgaggagaaccaacccgaaaccgacatcgcactcgactcggcagcggagagctcttctgcatccgcggtcaccgcaagcgtcacgtccctctcctctgctcgccacagcgaagcatgcgaagaaagcgcggcagcagcgccgtcctctatacggaaggatgctgcgccgtgcggaagaaactccgacccggacgttccggccgtcgccattgccgcccccgaagacctcttcggccatactttcgaggtggtcatctttggcggcttcgtgaacggcttcatcccctcgcgcgatatgtgcgaccccggcgtcgttgtcggcggcgcccgcgcccgccaggaagcctccgaccgagccgccatcactttggccgaacaacgcaccacccgacgactccttttcaccagcttcgaaagctgcgatttggaaaccgccgagcgcctgctcctgcacatcccccgcatccgcctccgctccggcgtccgcacctgcaacatcgagcccagcagctacctggaggaactgaacctgggccccaagcaaacctccggcccaaccgatcaaagccatccgtcagcttaggcatcttcgaaattcaagggacagatgccagttcgaccccgaagtggcgcaccgcactgccagttgaaggccgaaatggccagaaagtgccacttcatagccgaaatggcttcccccctcttaccatttcggggtcgaactggcatttgccaccagattcgtgaaagcgatgtgacttgctgcctctcttaggtcgccccatcgggcatgtcaggtaagcacgtttttcagggcctcctcgaaggttgcgtgggaggcggcggcgagcagggcgtccttttcgttgcgggaaagctgcttgaagacgtattctgcgtgcatggcatcgtgcttggtggcgaactcggcataggcgagcaggctcacgggcagacgagcgcgggtgtacttcgcgcccttgccggcgttgtgcaccgccagccgcgcctgcacatccacggcatagccggtgtacaacgacccatcggcgcattccaacacgtacatatagtgagtagaggccgcagccatagcggggctgccctagtagtaccgatagtatgccgcgcagctaccctcgctggagaccatgcagggaccgacggggttctccggcgtgcagaccttccggaacagcggacactcgcttggggccataatgccgcggagcacgtctccgcagcggcagcccttatgctcgcgcacctcttccacgtctggttggaagcggcgcatggcgtcgaagtcggcgaactcctcgcggatgcggtagccgctgccgggaatctcgcccaagccacgccaggtggcggagcaggtttcgaacacctcgtcgatggcggcgagtgccacggggttgccctcgggcatgacgccgcgggcgtaggcgatctcaatctcggcgcgcccctcgtgcagctggcacatgatcatggcgatgccctgaagcacgtctaccggctcgaacccggtaatgacgccggggatgccgtacttctcggccaggaagcgatagggctccgcgccgatgatggtggacacatgccccggcagaatgagcgcatccagcttcagcgccgggtcgttgatgatgacttccagcgccccaggcatgttcttgtgggcgccgtatacggtgaagttcgcaaggcccatggcgcgcgctcgtttgatggccatagctacgagcggcgtggtggtttcgaagcccacgccgacgaagacgatttgccgatcggggttctcctgcgccaggcgcagggcatccagcggcgagtaaacgatttccaccgcgcgtcctgccgcctgctcggccagcaggctggacgtggagccgggcacgcgggtcatgtcgccgaaggttgcgatggtcacttccggcacgcgggccagcgcgattaccttgtcgatgtcgtggttgctcgtcacgcacaccggacatccagggcccgacgccagacgaaccccctcgggcataagaccgcgaatgccgttgcgcgcaatggccacggtgtgggtgccgcacacttccatcagcgtagcagactccggggccagcgcttgaatggactcaatgagcccccgcgccaacgccggatccttgaatgccttcagttcttgctgcatggcgtccattcttgcaaccactccttcaagggtgtagaatacggacaagcggaatgcccgtggcaccgggcacgactgcttcacattactcctattaatgtgatgaagagccgttcttcctatgcgaggggcggctttttcattgccgcccgctgcgactactgccgcaaacgcgcggtcaactcaatcaccgctacgatcaccaaacaaaacgtgaggagttccatccagcttacgtacatagctgctcccttcgacgaaagaagcagtccgctcgtccgtgcggtcagtctagtgtaatacacgggcggattcaacaggcaaaatgcactgttttcgctccttaggccggcgtgggagcctcttccaaatcggccagttcggggaattgcttcaccagctcgatggtctccagggcgaactgctcgtccaccacctcgatggcgaagccggcgtgcacgagcacgtagtcgcccacctgcgcctggggtgtcaggtcgacggaaatctcacgggtcacgcccaaaatgtcaacggtggccaagttcccctcttccagggccgccaccttcgccggaattgccaagcacatacgctgctccttcgattcgtctctcaatgccccattgtcgcaggttcgcccaaggaagtcggcgaggtttcgagaggcgccctactcgcccgaacgagcggaagccaccacggcttggcccaggctgatgcaaccgtcgttgggaggcagatcgcggttgatggcgacggtgaaaccagcagcggccaagtcagccagcgcgtgctccacaaggtagcggttcatgaacacgccacccgacagcgccaccgtggaaatgtcgtacatggctcgcaccaactcggcgctcatgacgatggcgccaaccatggcatcgtggaagcggcggctgatgacggacgccggcactcccgccgccaggtcgtccagcaacgcgtggaaggtgggctcggcatccaggagcagcaccgaggtgtcctgcgcggtactcgtctcggtggcggtgttcttctcgacgatgacggcgtagcgctccttcgccgccagctcgtcctcgcctgccacgcccgcggcctcttcgacagccgcagcgccggccacgtcggccccggcggtttccatggccgtctccagaaggatggctccctcgccctcgtagctcggctccgtgcagatgccgagcagcgcgctggccgcatcgaacaggcgcccgaccgaggacgtcatgggcgtgttcagcccgcgctcgatcatggtgtcgcacacctcggcctcatcgcccagaggcgccaaagccgccgcagcagcaggatgctccaacaggtcgtaggcccacagcacgccataggccatgcgcagcggatgcttgatggccgcagcccctccgggcatgggcacgtaggcgaagttcgcgaaacgctcgaaggcctggcggttcgccagcagcacctcgccgccccagatggccccatcctcaccgtagcctgtgccgtcgaaggcgatgccgcagacggcatcagtcagcccatgctcggccataaccgacacgatgtgggcatgatggtgctgcacctcggtcacgggaagtccctggtgatgggcccatttgcttgtgagatactcggggtgcaagtcgcatgccaccgctgtgggaatcgtttcgaaaaggctctcgaagcgatccttcgtggccagccacgcatcgtaggtctcggcgttttccacgtcgccgatgtgctgggacacgaagccatcggtgccgcgcagcagcgtgaaggtattcttctgctcggggccggcggcgaagatgatgccctcggcaggcgcaacgccctcggccgtcaccgacacgggtacgggagcatagccgcgtgcccgccgcaggaactgaatggcgcacacgggcttttcgtcgacctcatccacctggatcagccgcacgacggagtcgtcgaagcgcgtgaggatggggcgattgttacccaaaaaggcatcggcgatgccggccagctttgcgcgcgcctcttcatcggcgatacagatgggctcgtcgtgtacgttgcccgaggtcatcacaagcagcggcaccaggcgtcccggttcgtcgcccgcttcgtccaccgccggattcgccgcataccacgcttcagcgaaatcgtgcatgagcaaatgttgcaccggtgtgtaaggcagcatgacccccaattcggacaatccatcggccaagcctgcgccaatagccgcgccagggcgtttacgcagcagcacaatgggtcgcgtcgaccccgccagaaccgcctcttcctcttcgctcgcctcgcaaagcgcccgcacatcgcccattccctgggccatcaccgccagggccttcccatcgcgccgcttgcgccggcgcagctcggccaccgcatcggcattgttggcgtcacatacgagatggaagccccccagtcccttgacggccaagatcttccctgccatgagcatctccaccgcggccgcgaaaatggcgtcggactcctcgcgggttttccctagcgaaatcggcccgtccgccccaacacgccacgttaccgaaggcccacattcaaagcaggcatcgggctgggcgtggaagcggcggtcgagcggatcggcatactcggcggcgcacttctcgcacatggggaacgccgccatggaggtggcagcacggtcatagggcaagtgatcgatgatggtgaagcgtggcccgcaattcgtgcagttgataaacgggtaacggtagcgacggtcgttcgggttgaacagctcggccacgcagtcatcgcaggtggcaagctcgggcgacacaagtgtggtctctgccacgtcctcatcgtcggagaagcgaatctcgaagctgtcgaaatcctccagcggaacttccttgatgtcgatttcctccaccttcgatgccgccggcgcgttgtcagataattccatgatgaactcgtccaccagcgcactctcaccctcagcgtgaatatgcacgccatcggtggcgttcagcacccagccgttgatgaggtacttcttcgccatccggtacacaaagggtcgaaagcccaccccttgcacaataccctttacatgaatatcgaccgcatcgatcatgagtaagctcccttgccttgcgctttgctttgccgcttacgcctcgtccgcctcgccttcggggacggcgacctccgcagcctccacctcggcatcctggggcgcatcggcaaactcggcttccacggcagtctcgctggcctcggcagcttccacaaccacggtggcttcggccagctcctcgtcctcggccatggcggcggcctcagccaacgcccgatcggtcaggatgtcggcaatcacatcatcgactacctgggccagctgacgcagcgttacgccggagttgtccggcaaatgcagatgcacgcagcggcgcccgcgcttggcgagcgtcgccaaatcgccagcagcctgggccttcgccagctcgccaaggctgggtgccgcagcttcctccggcagcggaatgtccttcaattcgtcagccgacaaaatgaggaagacgcccatgttcggaccacctttttgcagctggcccgtggaatgcaggtagcgcggccccacctccaagcacgacacgcagccgaaggattcggccacgccatggcgaatctgctcgatggcctcgcgccgcccctctcccgtaaacggaagaaacgcgttcagcgcaaagaagtcgcccggctgaatggaggacagcagcgcatacagcgtctcgtgcaagtcctcacagccctcgaacatgggggcgaaggagacttccacacggcccatgtctacctcgtcggtgaacacctcagtgaaatcgggctccggctggccgttcttcagaatatcgagcacctcagctttggcggaggcaacgtcgggctggtcgaaggggcacacctgcataagatagccgcacatggcgatggcgtattcccacatgacgaaatgctcagccagctcttccacagtgtcgatgcggtagttcagccgcggaatagcgttgtcgatgtaggcgaggctcatctcgaaattgcggcgctcgtcccacagatcggtttgggtctggtacatgatgatggacctgtcgcccggatcctccgtaagcagcagcgagtcgatctcgatgttcggcaggatgccctcgccgttcttccccagcgattcagccaccagctgttcgatccacaggcccagtacgcgcccacgcttgggagtgaggaacgagaacttgttgcgacccttcaggtagttgtcgtagaggaatgccgccaggttgatggccgggttgtcgatggcgtcctccgaacaggcctcctcagccgcgcgagcgtgagccatgaacgcttccatgtcgatacccgtgagcgccgccggcaccaatccgaacaccgagagcgcagaaaaccggccgcccaccgtgggctcgccggaaaacaccgcacgccagccttcctcccgtgcctgccgatctaaatcgctacccgggtcggtgatggccaccaggtgcttcaccacatgatcgcccaactccttctcgaaggaggcccgcaccgcctctagcagcatgcgcggctcaatggtgccgccgcttttcgaggagatgatgaccagcgtgcgatggggatcgcagatggtgagcatctcgcgcacgcgcacgggcgagtcagaatccaacgtgcggaacttcacgcgattggaatcgtgcttgttgtacttcgtgatggtcatgggcgcctgagtggaaccgccctggccgatgagcagaatcgtatcgagacccgcttccaccacctcgtcggcaaaagcctggatggcgtccatatcacacagcggactcgtggctagatcggcccatcccatgtagtcgctcgcgcaggcttgcgcctcggaggagaaatcgtacagcgtggcgtccttggcgtgaatgcggcttgctgcacgagctttcaccagggtctttgccgccggatacagcttctcaacgtcaacggagagcatggcgctcctcttctctctgggcaatttccgccagccagcagaattgcaaacgagccccgtacgcgctgcactggggctcctcctcgttaatctagtggaaatattctagcaaacgccaccaaaacgcgcccacatccccacaaccctatggcggttctgtgaacgaaacgagcccctgggcggggctcgtcagcgtatcattcagagcgaggcgtcctacaggttcagcgccttcttcagggagctgacgcggcggcgcgaaacgggaatcttctcctccacgccgttcaaagtcagcagcagcgtaccaccggaaacggactcgatctcctccaccatggacagattcaccaaatagccgcggtgcacgcggaagaacccgtggccgtcgaggcgcttctccagctgggccaggctcactgtggagaagtagcggtcagtatcggtctgcagataagcgtagtcgtcgcgagccatgacgaaacggatcttatcgatgccgatgagaatcttcttgccgcccttttccacagggatgcgctcggacttgtgagcctgcaagtgcagagccacctgctcgcgcacgcgggcgatggcctgagccaagcgctcggtctccaccggcttaaccagataatcgatagcgctcaccttgaaggcgtccagcgcgtgctcggaataggcggtcacgaacaccaccgccggagggaacttcagatgctgcagagcctcggccaattgaaggccagtggcctcgggcatgttcacatccatgaacataacgtcgcagggatactctttcagcttctcgatagcctcgcgcacgttggcagcttcggctgtcacttcaactccgccgacctcatcgagaagaaagcgcagttcagaacgggcaggcgcctcgtcgtcaacgataattgcgttaagcacgtcgtcctccaaaagaaatctctgattgcattcatgctattctatagcacagctgacgccccgtcatgcccgatcatgaggaaatcacgggttaattccagatgaggacattgaaattgccgataccctcatcgctcccgtcgctcaatcgtaaaatggccccgcagatgcggggccattgcagacatacgctgtaagctgtactcaattactgaatctctagtccctgcagctcggccagagctaggacgtagatcttgaaggaggtcttcagcagctcttcggagacaccctcgtcggggccgtgttcgccgccgacccagtcggggttctcgatccaaggcatgttcacaccgaaggaggcgcccttcttgaactcgcgagcgtaggtgccgccgccgatggtgaagggcttgtgctcggtgtcgccggtcacgaactggaaggcatcctggagcacctgaatctccgggtcatcgggcttcacgaggaagggcaccatgagcagggtgttctcgaaggtggcgccaatgttgtcggtcagcttcgtgagcgcggcggtgatctcctcggctgtgatggacgtaggccagcggctgtccatggtctgcacgagacgatcgccttccttgcggatggtgccacctaccaccgtcagcggcccgaagtactcgtcagccgtggcgatgcccacgccagcaccggtcgtatcggacacgaggctctgcaccagctcgaggaactcgcgctcctgctggttgcacaagccgttttccagcaggtagttcgccagcagcatgatggcggagatgccgcgctcgggccaggcggcgtgagcattcactccctcagcatcaatgcgcgccgtaccgtcaccggcgtcggctaccgtgatgcgctcggcgctgggcagcgcagaggcatccgcgcgcacgacggcccaggcttcaccaggcacggcgttggtcaccacgccgccggagatatccaagattaccggatcggcgataggtgcgctcgtgatgcagccgtcatagccgcccttctcaccatagcacaccgggaagtcggcgtcgggcgtgaacaagaaggccgggctctcgtacttctcgagataccacgtcacgtcggccatgcccgtttcctcattggcaccgaagatgaagcgcatggaataggggcgctccacatcaaggtcactcaagcacttcacggcatgcagagccaccaccgaggggcccttgtcgtccaggcagccacggcccataaggtaaccgtccttctcggtcaccttgaaaggctcgaacgaccagccaggaccggcgggcacgacgtccacgtgaccgatgatgcccagctgcttctcggtcttgccggcaagatccgcaaacccgatatgcccctcgcagttcgtgacggtcatgcccataccctcggcgatttccagcgccgcatccaacgcagcggccggcccaggcccgtacggcgcgcccggagcggcggcggccagatcctccgtcgaggggatttccacgagcttggcgatatcggccacaatcgcatcgcgatgttcatcccaataagcctcggcagcagcgacaatttccttgcggtccatagacgttcctttcatatatattgtcccctgaagcgcggcacaccatagcatggcgcttctaccttcttcgagtaaaaacgtattccacacatctcgcgccgacacgttcccggctactctccattgccattatgacccttccgcgaaatcagcgcaggccgttccgtcatttgttgcagggccgttagatcgctgggccgcgtgccctattttccctgcgaatacgcttataatggtggcggttttcgcacaaagggaaaggacgcaccgccatggccgacgactccatcacttcggcacccgtcgacgccgccgagacggccgcaccgacgcccaacaacagcgacagtgggagcgaacatagcaagccaaagccctggttcaagcgcctgtcgctgaccacctggatcttcatcgcgctcatcctgggcgtgctggcgggtctcgcgctgcaaggctcgccagagatcgccgacacctacatcaagcccttcggcaccatcttcttgaacctcatcaagatgatcgtcgtacctttggtgctgttctccatcatcgctggcgtcgtgtcgctggatgacgtgaagaaggttggcgccatcggcggcaaaaccgtgctgttctacctggccaccaccgcctgcgccgttacgctggggcttgtgttcgccaacctcatgaacgtcggcgccggctacacgatgcccacaggcgagctttcctacgaggccaccgagccgccgtcgctcatcgacactatcgtgaatatgttcccgtcgaacttcttccagcccatggccgacgccactatgctgcaggtcatcgtcatcgccgtggtgttcggcttcggcatgatcgccgctgggaagaaagccaagccggtcatcgacatttgcaacgccatgtcggacgtgtgcatcgccatcatgcgcggcatcatcctggtggcgcccttcggcgtgttcggactcatctgccccgttatcgccagcaacggcatcgatgtgctgcggccccttctgtggctcatcgtggtagcttacgtggccatgatcgtgcagattctcctggtgtactcgggcatcatcaaaatcttcgcccgcatgaacccgcttaagttcctgaagggcgaaatgccggtaatgggcttcgcgttcgcatcggcctcgtcagtgggcacgctgcccatcaacatggaatgcaccgagaaaatgggcgtatcgaaggaggtcacctcgttcgtgctgccgctcggcgccaccatcaacatggacggcaccgctatctaccagggcgtttgcgctatcttcatcgcccaggtgttcggcatcgacctttcggtgggtcagcagctgaccatcgttatgaccgccgtgctcgcctccatcggcaccgccggcgtgcccggatccggcatgatcatgctggccatggtgctgcagtcggtgggcctgcccgtggaaggcgtggcgctcgtggccggcgtcgaccgcattctggacatgatgcgcaccaccgtgaacgtcaccggcgacgccgccgtagccacctgcgtggacgccatgcaaaagcgcgccgccgctcgccgcgcccgcaaggccgagaagcaggcgaaggcagcgtagagggaaggcggctttt

SEQ ID NO: 10534 - DNA, 91817 bp, Unknown
  gut microbiota DNA sequence
ggctgtggatgttcagcttgcgatagatgtggcggatgtgggtcttcgccgtgccctcggagatgtagagctgctgctggatgtgagatgacttgtagccgcgggccaggtagtacatgacctcgctctcgcggcgcgacagcaggtaggtgttggcgatgacttcgcagcgttgacggaagcgacctcgggcagcgggggtgtcctcggctggcggggtggcgtcggaaccctcagtgaagatggagcgcgagaagtccatggcctggcgggccggggagggggcgggggtcgcagcgccagtcgcggcggcttcgactcctcctccttcgacctcgtcttcgattccctctgcgtcgacaccttgctcctgcggggcgtttccgcggtttgcggtggttgccgcggcggagagcgcctcgagcacctcctcggggtcgcccaaatcggcgagggcggaggccacggcccgctcccacgaggtcgcatcggcgatctcgggctcctcttcgtttgcgtggacggctgttggcgcgtccccctcgttcaccacgatgagcggggtgcggggaaggctctgcgcggcggcgcccctcttcggcgtcacggcaacgatagcggccatctcgtgctcgtcgggcagaagggcgtaggcaagcatcatggccacaagcacgatgagcacggtgcccatttcgccgaggccggtgggcgtcccgagggccccggtgaacagtggcaaggtagagccgccgagggccgccagcgccataacaccgcggccgaggccgaatacgaagatgggggagaggcggaagcgctgggagagctccgagaagaagatccacataagcgcctcgaaggacatgtatccgacaagcaccaccgaggtcccccaaaacgacgtgcccccggtcgtgaaggggatgaaaatggccgttacagcgatgaacgggatgagcggccggaagaagatatgccagcgctcgtcgccgccgagggcgagaaacgtcaccataatgagcaccgtggcgacgcaggcggtgacgaacagcaacgcctgatcttcgaaggcgctgccgggcaggatggtctcaatggaggtttggcgcatgatgcccagggccacgccgaggaagaacaccggcaatccgaagcgcatcacgaaacgcgcgtgattgatgggcagcggctggaaaaagagctggcgattgtcgaaatcgaggctcacgtggcgacgcagcacaagcagaagggcgatttccgcaaagggaatgagggcgcttgccacgccgccccacggaaaggggatctggtgcagcacgaggccgtagatgccgaatccgatggcgatggagagcgctccgttaatgatgatggaggctgagtcgcgccgcgagaaggcgatgccccaagcaagcagcaagatggaagagcccgttcccgtcaggatgcccgaaatgatttgcagcgtgctgccgtcgaagggcgattccgcgcccgacccgagcaagagaagcgttcccgttgcgccgagtagggcggctgcaacgagggtgggggtggcgtgcagcgctcggatgagcttggtgtcgaggatgcttgcgataagcagcagcaggccgtagatgaggatcgagacgaaataggccagggacagttgatcgttgaagggcccggcctggaggcctccggttccgaaaatgccgcctttgtcgaacatggagctgtagatccacgcttgatgcaggccgtagccgaacgaaatgagacttaattcgccgaaggatgcgccttccttgaagtcgattttgatcgtaacgcgaggaacctgaaaccccataatccccctcctgtgcgcccggccgtctcaccaggcaagatggtgcttaatagttgagtcaggggattatagatagcggatgatgcttcgtcaaccccgccttcccaagcccctttcccgtggcccgcgctgcgtgcgagttccggctcgtgtctgcgacctcgcgtgcgcgccctgcgcaggatgcgcagggccaccgctggtcgacgatggccctgcaacggtcggcgacctacttggtcaccgtgatcaccacgttgtcgtagcgatcgagaacggtcgagccatcgcccttcgcgggggcggtgtaagcctcgctcacgttctgggacgtggcggcgtaggcgccttccgcgtccttgtaggcctgctgctcgccggtggcatacacgctgatctcagcgttgtagccgttggcggcgaggtagtcggccaccgactgaacgtcatagttgtgaatggcgtccagcccgttttggttctcgctggagatgatgccctcggtaaggacgacatcggccgtgctgcccgccggaacgaacatcaggtcggagtgcacgtcgcctcccacggcggtctcgtcgaccaccatgaagacctcgtagctacccagaccgtcagaggaatccgacacgctgtcgtcgtgcacgtagtagaagccgtacgccgggacagcgatcagggctgcgcacaggcaggccagaaccgcgatggcaagaaccttcttgccgaatgctgcgttggtcataagtgctccctcaatcgtggtcgccccgcagtttcgcaacgcagccccattatggcgcgcgcacggaaaaggtcaagggcaaaaccccaggtgcagcgcacaatcatcctcgtggaagggcgaaatcatcacgagaggatgatgccgtttttcgcaaagatgggcctggtcgtatgagctgggcgccgcgatgcttcctagaatgtaggacgaagaggataggaagcggcgtctgctatcggattgctcgagcgaacgaagggcgaaaagagccttccgcgcatcggggttcgcgatgacgaccgcacgcgaaacgagagaggaaacctgtatggcctatcagcatcagggttcttgcgcgagtgccggggacaccctcgagctgctcgccttcgacgacgagttcgaccctttggcggtggacgactcggagatcgaccaggaatggatggatgacgagaacccctacgacaccatcgactaccccaccatgcgcaacatgcccgagacggtgcaccacgatccggtgtactcgccggcacgccaaggcagcgccaccgaggcgcttcaggcgctcattgtccgcaaccccaaccgtcggcccgtgctgctgaacatcatcggcctgtgcgagggcggctgcccctcgagcgtcatttccgagcgcgtggatgagtggcagcgcgacaactggtcggtatacgctcccatgacgctttgccgcatgttggagcgcgccggagcgcttacgttggagatgcccgacgtgtccgaggagcacgagagcgccgaggagggtgtggcgtacctggagattcgcgagaccgtggatccggtgtggcgcgcgactcccgaggcgttggccttgcgcgcggagtacctcgccggcaagagcttccgcgcggttgtgctgggatccgacgaggcgcgctacgccgaggtgtacgcggcggttatggaagcccttgaagaggcgccgcgaaagctggacgccattgagagcctgaccgacgccctggagatcaccaagtcgccgcgccgcttcggccagcacttcatcgacgtgctggaaacttgcgactgcgtcatctggggcgatggcgcttggagtttgaccgatttggggcgggctatgctcgccgagctgaagagcgcgaaggaggcttaacgctatggtcgttatggaagaagccgtcgtcgagggagctgccgcttccgaggacgtgaacctcgtcgagctgatgaacgcccgcgcccgatcctacggcatgctggcgcgtctgttccgcgaagaggtggatctgccgacgctgcgcgagctgcagaagatgcgctttccccaggccacgggcaatgcggccgccgacgaggggtaccaccagctttacgactatctgaagcgcgcctgggacgactcggtgaccgagctcgccatcgactacgtgagcacgttcatcggccacggcgtgaacgggtattccgccgcctatccgtacgaatcggtgtacacctccgagcgccgcctgctcatgcaggaggcccgcgccgaggtgctcgccacgctgcgcgaaaacgagttgaaacgcggtaactggaacgaggccgaggaccacatcgcgcttgagctcgagttcatgcagcgcatggccctgcgcgccgccgaggcgctgtccgacaacgccgaggacgaggcgatcgcctacctgcgcacgtcctacgactttttggagaatcacctgctgaactgggttcccatgctggtcgccgatatgcgcatgcacgcccgcaccttgttctaccagggtctggggcagctgacgctcggctccctgcaggaggacgaagccgtcctgcgcgagcttttggattccgtggaagcttaagcggccttttgcggcccaaaccttactaaccccttccttctttcccctcccttcgtcggccccgcccctcctcggcggggccgacccattttcgcgtgctgccccgcggtgtgcgagaggaagctgcttggaaaacaacgggtagcgtacccagaaactacgctatccgctgttttccaagcagaatgaagagcgaggaaggagaaaaactacgctaaccgtcatttctcaagcaattgagggataccgtccggcggtgaggggggggaatggcgaaacaagaaaagccccggttgcggggcttttcttgagagggtttgtcggcggttgatgggctgccgtggccctagtcgatgcccgagtcggcgaggagggcctggccgcctaaggtgatgggcgcggcggcgccggcttcttccaggaagcaggtggggcgcagggtggcgatgcgctcgctgtcctccatgcgcacgcgggccacctgcatcttcgtgcgctcggccaactcgagcggggcgcggctgaacgtggagaacatcaacgcgtcggtggttttggcgacgccagcggcaaacgtgcggcgatcggcctcgcgcacgcggtcgcggtcggcgtcggtggagaccacctcgaaggcgtcgcgggcgggcatgaagccgtccacgcagccggtgacgtacagggcgcggtagccgcagccgcacagctgctcgtaggagctgacgcgcacggcgcggacgttggcctcgtgggtggggaagaactgcgtctcgcgaaccatggcgtacagggtcgcggcgtcctcgtcgccggccagcgtcgcggaaagcgctgcgaagtcgcgcagcttgtcggcgtcgagggccgccagcaggttgtgtccgcggcgtcccgcatgcgcggcgatcatcgcgcggccggcctcatagcgctcggccagacgctcggcccgggggaagggctccgcttcgccggtggtgcgggcggcagcggccgcctccagggcatccaggatgccggcgtcgtgctcgtcgcaccactccatcaggaagtgccagccgtcggaataggtgaggtagttgccgaagcccacccatgcgcgccaggcgaacaggtcgtccgggtcggccagcaggttcagcgatgtgtaggcgataagcgctcgggcgcggttcgtgtcgcgcggatcgccgccaaggcgctcgaagcccagcgacgacaccataaagccgcggcggacgagcatttgctcgaaggcgtgcgcccactgcttgttgggggcgacgacgcagaggtcggattgggccgcctcaggattttcggcgttcacggcgaacaggtagcgcgtcagcccgttgaattcctcgtccggcgtgttccacttcacggtggcgatgtcgcgtatggttccctcgcgctggtcggccgcaagcgcctcctcgttgcccgcgcggacaacggcatcgcagagcaccgtgacattgggattgccgaaagcggtgttcagggcgaacacggtcacgttccgacgcagggtgtcgaaggtggcgaaaccctcgggggccgggaagctcgtggcgacgcgcacggtctcgtccggattgccggcgacgatgagctggtcgcgggcgagcaggcacaggcaggtctgctgtgcgacggaaaggttctggaagtcgtcggcgagcacgagggcgaaccgctgtcgcgcgccggcgcccgcatcactttgcaggtagcgcccgcagaggtaggccacctcgtcttccagcatggcgttcgtggcaccgagcaggcgatgggccagctccagcacgtccttctcctcgcccacggcccagtcgtcctcgggggcgagcgcgcaccattgcttcttgatgtggccgagctccgagcgcaagcggcgggcgggagtccccagggtcttcatgtcctccaggaagaagttgtactcgaagggcgcgagcacgcggggagtgcggccggtggcggcgcgggcctcgggcgtttccagcacggcaaggcatacctgctgggcgcaggccacggtgatgcggccggcgatgtcttccacgtcctgcaccccggcggcggccagggcgtccaccaggcggcgacgcgccacgcgggccgcctcggccgtggaggtctcgatgaggatgtcttcgggggcgcacccggcggccacggcggcagcggcccggcgcagcagcgcctcggtcttgccggagcgcgcggggccgacgattttggccgtgcggccgtcgaaagcggcgatttctgccatcatgtcagtcatgagtgcctcctaatcggccaagatgccgctggtcgagtcgaaatcgcgcgtggagccatcggcgtagacgaccgtccaatgatcgaaggcgagggcgaaatcggcatcgggcagggcgtacttcttttggatgtcctcgcccagatgcgcctcctcggcgatgcgctcggccacgatttcctcggcggttttgtcaagctcgccgcgctcgacttcttccaggtcgtgggcgatgcgggcgcgcacgacgatatcggccgcttcctcggcctcaagcgccgcttcggcggcctcagctaccaggacaggggaggccatgaacgactcctcggcggccctctcggcagcctcggcctcggctgcggccgcctcttcggcggcgcgggccgcagcggcctcggcctctttgcgggcctcaagcgcttccatgccggcggcgtactgcttctcgtaggaggccgcggaaggcaacgtcacggcgatgacgtccttgccgagtgcgccggcgttcagggcctcgcgcacgcggctcacccacttgctctcctcggggtcgatgccgcaggtggaatccagccgcatgcgcaccacgaggcgaccgccctgcagctcgatttccagccacgtgaacacaagctcgggcttgccctcctcgcgctggcggcggttgaagatcttcatctggttgtccacggcgtgcacctggttcagcagccagtgctcgatgtaatcgctccacagcgcgtcggcgccttccacggaggaatccaggtactcgcgggctcccacgcgcacggtcatgcggagggtgttcaccagctcgccgccctcgccctcgtgggtgcgcaccacgggcgttcccaggtaagagtagcagcgatcgatctccaatcgcagctcgtgatcgacgatcgactcgtccaaatcaagcgtgagggccatggaaggatggggcttgctcatcgttgtctcctttcgtcctatcctcttcgccatccagtatagagaggcctcgagcagggaaatcatcccatcgagatgagcgcgcgggatgattgccgtcccttaaatcggcctgctcttatgattgcgcggcccgcacggcccataccattttcaaccgttgggcaacaaaacatcggtggccgctcgacagcggaggcggatcttcaccccctccactcgcgaaggccgccgacgccgccgagggccgccggtgttttgttggaaagcatcgaacgaaagagagaggaggacccatggctaaactttcactgactcgtcgcagcttcctgaaggcggccgccgtcacgggcgctgcgagcactctgagctttgccgtagcaccgtctgcggctttggccgagggcgtcgacgaatcagctggtgaggtcaagcgcatccgttcctgctgccgcgcgtgcggcaaatgcgaatgcggtgtgtgggtcaccgtgcaggacaacaaggtcatcaaggtagaaggtgacgagtccaacgcacacagccgcggccactgctgcgcgaagtcccaggcgtccatgctggcgctgtaccaccccgatcgtttgcgctacaccatgaagcgcaccaaccccaagggcgaggacgatcccggctgggtgcgcgtcaactttgccgaggccatggacgagatcggcgccaagtacaacgagctcatcgacaagtacggcggaaagtcgatcttctctatgggcggtacctcgcgcgtgtgggctcagccgccttacggcaccctgaagtcggtctttgggactcacaacttccattccgcctacgagatctgcaagggcccgcgtcacttcggcggtgtgctcaccgacgagaagggttcgccgtggatggaggtggagcagggccccatcgtgtacgtgcagtggggtaccgcatccgagtattccaactacgactccaccaaccgtaccgtcgtggactgctcgcagcgcgcctacaagcacattctggttgacccgcgcatgagtccgctcggcaaggaggccgacctgtggcttcccatccgcgtcggcaccgacctggccatgtcgcttggctggctgaagtggatcgtcgacaacgacgcctacgacaagaacttcgtgaagcgctggtccaacggcccgttcctttacaaccccgaggccgacggcaagacctacaagggctacttcctggagatgaacggcggcatccacatgacgagccgcctgctcaccgaggccgacctcgaccgcgagtgggtctcccagttctgggagccggcgccggagcagtactcctaccgccgcttcatctgctgggacgccgccaacgagaagccgacctactgggacgccgaggaatgccagtgggagggcgagaagcacaagatcccgaccactggtacctggatcgagcacccctacaagcccatcatcgccgatgcctggctgcccgatccctccaagttcgccgatccggccgatccggcctacgacgcctactggaccggcgagggcaacgagaagggcgccaagtcgaacccgaaggggctgccgaaggacccggagctgtggcccgacggcgtgcaggtcaagctcgccaatggcaagatgatcgaggccaagtcggtctggcaggagtgggagcacaacctggaggagtacacgcttgaccgcgtctccgagatcaccgaggttcccgccgacaagatcgaagaggccgtgcgcacctacaccacgcgcctgaacccgcttcacggcaacggcggcatccactaccagctggcccccgaccagaccggacacgccgtgcagaacacccgcgccctgcagctcatcgcctgcctcaccggcaactccgacgagcccgccggcaaccgcggctcctcgaaggcccaggtagacggctgctgcggccgcgccaacatgatcgtgaccgaccacgagccggtcgactggggcattcgcgagggcatcggcaccatggagctcggcaacacgccgcgcgacctttccgtggaagaccagattccgctgatccagaacttcgtgaagtacctgcaggacgagaactccccgcttatggagcgctacggcaaccacatccccaccgacgaggaggcccgcatcatcgccatgcgcaagggcggcgactacaagggatcgcgttccttcccgggcctgaagaccccgttcgagaacaacgcggaccagatttccgccgagcgcttcccgctgctgcgcttctggaactcctggaccgacgcctcctccatctgggacgccatccgcgagatcgattccccctacaagctctacggcggcatctgcatgtccggcgacttcatgaaccagtcgaacctgctggaggcgtgggacgcgctgacgcagctcgacttctgggtggatatcaacctgtggtcgtgcccgaacaacggcaccgccgactacgtgttcccctgcacccactggctggagaccaacaccggccgcgtatcccagggcgccggcggcatcttcggcgccggtcagcgctgcgtcgagcccatcggagacgtggtcttcgacccgacctttgtcgtgtgcctgcacaagtccatgggcgtgccgttcaacgatcgcgaccccgaatacgacgagtggttgaacctcgactaccacgacttcatccaggccggcggttcggtgggctatgaggagcaggagtaccgcgtgctcaaggacgccaccgactggtggaagaccgaggagtaccccgacggccccgacttcccgcagtacgcggcgaagttccaggaagagggctggttcgactgccgcaagtggcatcccgagcgctggggcacctaccgtcgctgggagatgggctaccgtcgccagcaggccggctacaacctgtacgccgccgtggacgagaagtgcgccttcggcacccccaccggcaaggtggagatctggtcgaccatctgcgagtcctatatcggcgacacggtgaccgagtcttatgtgctcgagacgccgggcactgctgccaaggtgggagagaagaccccgtacttcgcccaggtgtgctcgccggatcgcgacgcctatgccggcgacattccggatatcgacaagttcccgcattggttcgagccgaagaactcccgcgttcaggcgcccgagtggtacgacgccaacctggtggacggtgcgtcctacaacagcgacaactacctgaacaagccctaccacggcatcgccggcgtgggcaacggccaggcgaccgacaacggcaccaccgacaacctcgaggcctacaagcaggccgtgaaggagaacccggaggcgaccttcatctgcacctccggcgctcgccagcccgtctacttccactccgagcaccgtcagctcccctggtgccgcgagctgtggccgtccccgcgcttcgagatgaacccgaacgacgcggcgcgcctcggcatcgagcagggcgactggatctgggtgcgcaccccctggggcgctatccgcgaggtggccgatctgtactacggcatcaaggaaggcaccactaacgccaaccatgcctggtggtaccccgagatggatcacgccgcccacggcttcgagctcgtcggcatcaactgcaccatggacaagtacgcccagtgctggatctgcggcgcctcccagctgcgcggcaacccgatggtcgtctacaaggccaccgaggagaactcgccgttcggcaaccccgtgccgtgcgatccgtggggcaacgaggcgatcaccaacgccaacgacccgcgtctgaaggaatggctggccaacgacccgcgtctggatgactcgaaggtggagctcacctacgcgagcgcggatgccaagggcctgcagaccttaagcctcatcaaggaatagaaaggaggaagatcaatggcgaattacgcgatcatcacggacctcaaccgttgcacgggctgccttgcctgcaccgtggcgtgcaaggccatcaacggcgtggacgtgggcaacttctggattaaaacgctgcgcgtcggtccgcatcccattgagggcggttccggcaccttcccggacgtggagatgtacttcctccccgttcagtgccagcactgcgagaaccccgagtgcgtgaaggtgtgcccgaccgaggcgtctcatgtcgccgaggacggcaccatccagatcgacaaggacaagtgcatcggctgccagttctgcgccatggcctgcccctatggcgtgcgctacctgaaccagaccgagcgcgttgtggagaagtgcacgctgtgcgagcagcgcacgagccagggcgagctgccccagtgcgtggcccagtgcggcgcccgcgcccgcttcttcggcgacctcgatcagggcgtcgagaacttcgaagccccggcgcacccggacacccccggctgccagtacgacgagatgaccaagacccgcgtcaagctcaaggactacgtggaagcctttaccgagaacgacattcatcacctcaccaacaagggcaacaaccccaagctcatgtacttgttgcgcgagggccggaagtggagggagtaacaacccatggaaattcagtggccccttattctcttcaccttctttaattgcctcgccggcggcatcttcctgatgcagggtattcttaccctgtccagcaagggcaaggccatgcagctcgtctcctgcgtgagcgcgatcgttgccctggccatcggcggtctgtcggtgttcttccacctgcagcatccgctgcgcatgctgaacggcttcgggcacatcacctccggcattaccatcgagctgatcttcgtgatcgtgttcgccattgccgtggtgctgtacttcctcatgatgcgccgctccgaggagggcgtggcccccaaatggtgcgccgtcctggctatcgtcgtgtcgctggcgctgccgttcgcgacgggcgactcctacctgatgagcgccattcccgtgtgggacaccatgctgctgcctttgtactatgtggtggccacggtgatgctgggcggtctggccgccatgatcatcgccggcgccacgaaggccgccgacgcggtgaagctgtctgctacggtggctttcattggcgcggtggtgtgcgccgtggtgagcgtcatctatgcggtggccatctccggcatgggcgcgaactacaccgagatgcagtactacttcgatccgacgctgcctgacgtggccatgcgccagtccgagcagatcaccggcgctattctggccggcgagcatgccgtggccttctggctgggcaatgtggctatcggctgcgcggtgcctgccgtgctggcggccctggtgatgacgggcaagattcccgccgagaaggctctggctgtggcggtggttgccctggtgtgcgccgtgatcggcaccatcgtgtggcgcgtgctgctctacgaagtggccgtgaacgccctcatccagttccagtgggcgctttagcagtgtgttaacgaagccagatgcggctgcagctgcggccgcatctggcagggcgcttgcgaggcgcccgatcccggatgccccctggcatccggtatgagggagccgctcgtctctggtcggtcggtcggcactctttgagaacctaagcgaggcgggcttttctgacagacgagccccgcaggcaacgcgcatgcgcccgcctcgctttttgttcaaaatggggtacttctcgtagtttttagggtgggatttctccattagctctgtggatgggaggaaaaccccaggtggcgattgctgctttagggatcggctttttggcaagttacgagaagtgccctattttgctcatttcgccctgacgaaggagcgtttgggtctcctgaagcttttttgcgaaaaggcttcaggaggagcaaaccctcagatgattcttgaagaggaggaatcaatgacagaggagaagaaagaggcgccgacgtctgcttcagctggagcagcgggcgcgcaagtcgccccgacgctggagagcgttgatgcggccgaggccaagcgcgcacctcgcggcggcatcacgcggcgcgggctgttcatcggcgtgggctcgacggtggccctgctcggcttgggcgggttgcgctatgcgggccacaatccgctgaaccgaccgcccggaggtgccgacgaggcccatctggtgagcggctgcatccgttgcgagcgctgctatgaggcgtgtccgcgccaagccatcgtgccggcgaagatcgaggacgggctactcggcatgcgcagccctatgctcgacttcaacacggggaactactgcgacttctgctacgaggagaacggcggcaaccccttgtgcgtggcggtgtgccccacggccgcgctcgagctgccggcaacctacacggtgggcaatccggagaccggcgagaccggcgacgtcatcattggcacggcggagattgatccgcgcacatgcctagcctatcgcatgaccggatgccgcgactgctacgacgcctgcaactacggcgctatcgagctaaaggatgagggcggggcaaaccccattccctatgtcgtggaagacaagtgcaatggctgcggtgcctgccaggccgcctgtctgtcgctgtcctccggttctatcaagtccagcgagcgtgccattgtcgtgcgccccgtcgaggcctaaagggggtaaaccatggctaagaagaacgaaacgatggaaacgcccgcttcgtccccgactgcgggcgcgaagacgaaaaactctgcgaacgcgctggccgcgaagctgaagacgcgtcggctgcgcaccgtggtgggcgccgtggtgttcgtcggcatggccaccggtctcatcgccggggtgagcatgggcacgatgtccggcttcggttgggacacgttctcgatgctgtgccctttgggcgccctcggcaccatgatcgccacgaagacgatgatcccgcgcgccgtggtgtcgcttctgcttattgccgcgctcgtgctcgtgttcggtcgcgccttctgctcgtggttgtgcccgaccatgctcatagaccgcatccgcgacttcttccgctcgcccaagaagcgtcgggagctcgaggagaagaagaactccgagatcaaggccatctcgcagcaggagctggcgagtctgaaggcggcgcgcgagggtcatacctgcggcgcctgcggcaagtgccagccggtgcaccacggcaaggtggactcgcgtcatgcggtgctcggcggagctttgctttcgacggcggtcttcggattcccggtgttctgcctggtgtgcccggtgggcctgtcgttcgctacggtgctcgtcatctggcgggccttcgcccatggcgacgcgacgatcgggcttatccttattccggcgatgcttgttatcgagttggtggtgctgcgcaagtggtgctcgaatttctgcccgctttcggcgctcatgaacctggtcgggcgtttctcgcgtacgttcgtgcctaccattaatgacgagaagtgcctggagacggcccgcgccacctcctgcagcaagtgcgccgaggtgtgcgatgccgacatcaacatccgtcatccggaattcggtctgcgcaccatggccgactgcacgcgctgccgcaactgcgtggacgtgtgtcccacgaaggccatcacgatgccagtgtttgtcggcaagaaggcgggcaagaccgtcgtggaaatccccgatccggttatggacgacctggagccgaagctggactagccaatcagtgagcgatggctcgactttgggagaggccgggccatcgttgaagaggagcaacaatggttgagacgattgatgcgggggctcaccgatatgtgggcaccgcgtttacggctgtggatagtggggccattcgggttcatcgggagcggtgcgcgaaggtgcgcaaccgcaacgtggactgcttgaagtgcgcggcggcgtgcacttcagggtgcatttccttggaagacggcgagctggtgatcgatgcctccaagtgtgtcggctgcggcacctgcgccacggtgtgccccacgtgcgccttggagtcgctgaatccctcggacgccgagttgaaagccgcctgtctgcgcgccgtgcggggtgacgaggtggtcattgcctgcagccagatggaggcggccttgggtgatttgctagtgcccggtgccgcggcgttcgtggtctgcgcggggcgcgtggatgagtcgctgctggcgggactcgccgccgagagtgtaggccgcgtgacggtgctttgcggcgattgcgatcactgtgcccagcgccacggtcgcgacacggcggagctggtagccgaaacggcgcgccaggtgctcgccacctggggcgacgatttggaagttgtcgtgaccgatgtgcctcctgcgagcattctcgccgagggcgccgatgaggccgctgccgaaaccgttcgcgtagcttattttgcccaagtgcgctcctgtccgccccttcgcgaagccgaaggagtgcgtgtcggttcatctgcggggcaggacgctcccaagcatcctgcccattccctccacgtgatgaaagacggcacgttgccgcatttcattcccgatcggcgtgagcgcttgctggacgcactggcgcagctgggggaaccggaaggcgacaagctggaaacccggctgtggggtgcggtggtcatcgacggcacgaagtgcgtctcctgccgcatgtgcgcgacgttctgccctacgggcgccatcgcgaagttcgacgacgccgacggcaccctgggcgtgacccacactccgggcgactgcgtgaagtgcggcagctgccgggacgtgtgccccgccgatgccatcacactgctcgacgccgtgcccgcaagctggcttaccggcggcaaccgccaccgctacgtcatgacgccccgtcctgtgagccttaccgacaacccccaccagatcctcgacaccttccgtctcgacttcaacggagacatcttcgagcggtaggggagccgcagcgatcgctggcgatcttgcgcaaaatgtcggcgagctgtccctgccgggcgtctcgccgaagctggcacggcgtcgacggggcgtcgtgcggtaaatctcagacttctccgcaaagcaggagaggccgcatctcccgactgcccgagcccccgccctggcagccacgcggtctcgatctgctccagcccccggcgcccctatcctcttcacggcgccgggggcgttttatgccaagggcaaacgcagggtgaaggtggtgccttcttgtgcggtgctggtgacggcgatggtgcccttgtgggcttgggcgatgtttcgcaaactagtgaactataatacaaatctcggttctatttctataaaatcgtgctatagtgcgattaatgcgaggaggatagttgatctcacacaaataaagtagtagaataaagtagtagaaaaaggaatccgatcatggcaatgctcgaaattcatccgcggatctttcttcgtcacccccaactgaacgaggaggatattcgcacggcttggaggaactcctactacgaagctctcagggccgatagccagaactatcctgagtatctttggataggcgttgactctaagggtcgcgacgtcgagatggtcggaacgctaaccgatgatggatggctcatctatcatgcgaatacgccgctttcgcgaagagtgcggctagaggttgagaaagcgaggcgctaggtagtatggccgagtacaagttgaaaaacggctacgttctcactgatgaggaaatcgagcgacgggctgcggaatgggagagcgatgacgcggagatagggcttgttcctctgcgcgtcggccggccgcccttgtcaggggagcccaatgcgaacctctcgttcaaatgccctgaatcgggggcagagctcatagctcgcgccgccgaagtggtcggtgtgaagaaatcggcattcattcgcgaggccgccctcgagaaagcggcgcaagtgctatctttggccggataaggcctctttagcaactcctacgtcaagggcaaacgcagagtgaaggtggtgccttcttccgcggtgccggtgacggcgatggtgcccttgtggccttgggcgatgtcgcgggcgatggccagccccagcccgtagccgccggtgttggcgccgggctcgccaccgttgttttcggcgtcggcggcgttgtgagtgcgggccgcatcggcgcgatagaagcggtcgaacaaatgcggtagatcggcctcatcgatgggctcgccgctgttgcgcacggagaggacggcctcgctggcgtgcgccctcagcgtcacggtcacggtgccacccgcattggtgtacttgcaggcgttgtccaaaagcacggccacggcccgctggaggcgcgtggcgttgccccgcacggtaattcccttgtcgatggcgcactcccacatgagttcccgctcgaaggccacggcttcgaacgtgagggcctcgccttccaccagacggctgaggtcgacgatgcccgcagggccttccgaggcttgggcgccctccggagccggtcgggccagatcgagcatatcggtcacgaggccttgcatgcgctcggcttccacctgggtgctctcaatccactggcgctggctggcgatggtgtcgccgccgcgctgccgcaggatggcgttgttggcgagaatgaccgtgagcggggttttcagctcgtgggacgcatcggcgatgaactgctgctgttgggcccaggcgcgttgcaccggacgcagcgcccagcgcgagaagacgaggttcagcaggaacagcaggcccaaagcgcccaggcccacggcggtgagcacgagggcgagcgagcgccagccgtcggcagcgcctccgtcggcgaaggccaccatgagatcggggccggcctcatgcttggcgaagtacagccctacatcgggcaggtatccccaggactcggcggtgctgacgacttcaggtatggcgcgcacgaggagcgcctcgggcacggtggctcccgagcgatccgttagctgcataaccgtgcggtcggcgatatagtagaccgccacgggcagcgatgcctcctcggtggtgcccgggccgccgatgcggggcggcgcgaagccgggatcactcgtgccggcgccgatgtcctgggtgggggtgggggccgagccgccttccgcactttcgcctgcgcctgcgttgccgctcgtggcgtcttccgcgttgtccgcttcaacgtcgctggctgccccgtcgtcgacgcggcccccgtcatcttccgtattgccaccgtcgggggcgttctcgtctccttcccgagggccctcgccccggtggaacggctcggcatcagggatgagctgcggttcgtgcagagatcggctcgtggctgccatgagccgattgtgtacatcgtcgatgtcggcgcggtagtcggcgtagcagatggtggcgaaggaagcggccagcacgagggcggccagcgccatgttcagggcgatgaacttcgtcctcagttggcgaagcatgggcgtggcgccgtcgccggcggaacgtttcggggcgctcgcgttggcgggatgcgggcgggggatgatgcgaagcttcgacagacggcccatgggcggctagtctccttcggcgagccggtagcctaccgagcgaatggtctcgatcctcgccttcgaccccacgtgggccattttcttccgcagaaacgagatgtaggcttccacgttgttgtcgctggcgctggaggaggggccccaggcgcggctgatgagctgctccttcgaaagcaccgcccccggcgagccgagcaggatgcgggcgatggcgaattccttctgcgacaggcgaatggattcgtttccgcaggtgagatccatggattccaggttcagcgtgaggtcgcccacggtgagcgtctcgaagacgacatcgccctggcgccgcgtgagggcgcgcaagtgggccagaagctcggcgggggagaagggcttggtcatgtaatcgtcggcgccggagtcgtagccgcagatcttgtcgctgatggcatcgcgggcagtgagcagcaggatgggggtgctcacgtgggcccggcgcaggcgctgggccacggtgaagccgtcggccttgggcagcatgacgtccaggatgatgacgtcgtaggtgcccgtcccaccgtactgcacgccggcctccccatcgtgcacgacgtcggtggcgtagccattgtcctgaaggatgcgggccagcgcctcggcgaggcgggcgtcgtcttccacgatcagaacgtgcatggtgatcctttccataaggggcctccgccaagggctgttgtgcgccgacgtctcggggctcggttgcggcgtttcgcggtgcgcttttggggccgcgcggcctgaggaagtgctggggttcattgtaacggcccacctgaaggcaacctgaaaggaatcggctgcttcaggcagttttcaggaagtccccttattgttggggccggcctgcgggggatcaggacttcgcgggccaatcgggaacagggtatcgccggccaatcagaagcaggatagcgcgggccatcgaggaaggagcattcgtggccgcctacagtagcgtgttcaagcgcgtggagaagaagtatcgcatcggcgcggccgagcgcgccgtcgtggaagccgcggctggagggcctatggcggtggacgcctacgggcgcactcgcattacgagcttgtacctggacaccccggagcgctccatgatcgcccgatcggtggaaaagccgctctataaggagaagctgcgtctgcgcgcctacggggatgcggctggggtggccctcatgggagctttcggtgccgggccgattgtgcgtgagccaggcggcctgccgctttccgatggggaagtggaaacgcgggtggcttcggggctgcaggtgcccggcgcggcggctgcccttcctgtgtttttcgggatcaagaagaagttcaagggcattgtgtacaagcgccggctcgccctgacgttgccggcggcgctggctttcgtgagcggtttgccctacgagcaggcctgcgctcgctggccgctgtcggatgcggcgcttgcggctgcggcgctctcgccggccacgcgccagatcgcccgcgagttggaggcggccatggaccgttggttgcccctggtgccgtccatgggtatcgcctgcgatcgtgcggcctgggcttaccgacccgagatgtttcaggagcgggagggcgacgagctgttcgatagcgagctgcgcatcaccttcgacgactgcttggagtatctcgactgtcatcgcttccgttcgccatggcggcccatcatcgagtcgagcgagtccgtcatggagataaagagcgccgggccctacccgccgtggctggtggaggttctgtcggccgagcgcatctacccggcctcgtttaccaagtatggcaacgcttatcagctggttgcggctgagccgcgcgctcgaaatcatcgaagggctatgcgtagtggtgcgtgaaccgttcgggaaatgcgagtcctggaaataggcgaaaaaacggagttgttagacatgggctaagcttcaaggtccttcaacggaggaaaagtgatccgatctggggcgaaaacccactcgcaggccctcttttcggcgaagctcagaacaaagaagtctaacaagtcggaattcctgcccaaaatgagggagcgcattgtctggaaggttgctcgcaagagtaggcagagaatgaacaagaaaggaaactcatgcttgaatcaacgttctcgtcggtgttcggaacggcggaatcgctcgtaggagcggtttcggcggcggacttcttgctgtgttgcgcgttctcggtggtgctgggcgcagtctgcgctggtgtgtacatgttccggcacagctactcgaagaacttcgtggtgaccctggcgctcctaccgctcatcgtgcagatggtcatcacgctggtgaacgggaatttgggcgcgggcattgcggtcatgggcgtgttcaatctcgtgcggttccgctccatccccggctcggccaaggacatcggcagcgtgtttctcgccatggccgtaggccttgcgacgggcatgggctttctggggttggcttgcgtattcaccgtggtggtggctgtggtgaacctgctgttcgtgctgacgccgttcgggcgtccccgcgaaccgggcaagacgctgcggatcaccattccggaggatctggaatacgacggcgtcttcgacgaagtgctcaaccgctacgccgcggaatcggagctgaccgaggtgacgactaccaacatgggcagcctcttccagctgacctaccagctgcgtctgcgcgagcgggggcttgagaaggcgatgatcgacgagctgcggtgcctgaacgggaacttgaagatctctctggggatgacgccgcaggggcgcgaaacgctttaggttctcggggcgctccgcgaggtgctttccggcatcggtgctcgccgcccgctgcgcgcttgatccccttccgaacgcggcaaaagaaacagcgaagatgacgcacatgagtcggtaccgtcccggcatcgctgctgctgacgtggaagctgtttcttgacggccgcgttcttcagggggggcgcagaggtcggcgagcaccgatgccgggaagcacctagggagatgagcccaatagtagtgcaagaccataaggacaaacgacaaagggagaattgatgttgaagacgaacgagatggtgggcgcttgcgtggcgcgacgacgggcttggggctgtggagccttggctgtggcgctggcggggtcgctggcgctggcggggtgcacgggcggcacgttcgaggaagccgccgaaggcgctggcgagaaaagcgagcagagacagagcggccgggcccagggcgatagcggcgctacgggcacgactgacggggtggactgggcgttgcttatcgacatccccggtatggatttcgagtattccgaccgcgacaaggacgcttcctacgatgtcgcctccgcgacaaacattgcgttgtcgggccagggcgcgacggcgtctggtgaaggtgctgcggtggaaggcgccacggtggctatatccgccgccggcacctatgtagtgaccggagagctaacggctgggtcgctggtggtaaacgcgggcgacgcggacaaggtgcagatcgtgcttagcggcgcgtctattcgcaacgaggcggggccggcgctgaacatccagcaggctgacaaggtattcgtgaccttggccgacggcacacagaacacgttggccgacggtgcgagctatgagcttgcggaaggggaggacgagcccaacgcggcgctgtactcgaaggccgacctgaccatcaacggcaccggcgcgctgagcgtcgaaggcaactatcgccatggcgtgaactccaaggacgacctcgtggtcacgggcggcgcgattaccgtggtcgccaaggaggacggactgcgcggcaaggactgcgtgaaggttgccgatggctccttcgccatcacggccggcggcgacggtgtgaagtcgagcaacgacgaggatccgacccgcgggtttgtgtccatcgacggtggcacgttcaccgtggaagcgggcgatgagggcttccaggcggccacgtatctgcgtctggccggcggcgacgcgcagatcaaggcggccgatcacgccctgcgctccgacgtggaggcggccatgatcgggggcacctatgtcgtggaagccggcggcaagggcatgaaccccgagacgaagttcaccatggatggcggcacgttcaccgtaaccggttgcgaggagggcatcgaggcgcaggaagttatcgttaacaacggcaagctgaacatcacggcgtcggatgacggtattaacgctgccgtggccgagcgcgactccaacgacgcgacaatcgatgcgtccggtgacgcgggatcgactgtcggctgggacgctcatgctggcgaccaaggcggtgagggccagggcgacggcggtcagggcgctgacgcgcagaacggacggggcggccagcgttcggagcttccggacggcgcggaatcggaccaggcgcccgagcctcagactggccagaacggcgacagcgcgatgcccgagccgcctgctggacagaacggcgatgatgcgatgcccgagccgcctgctggattcgacccccagaacggcgagcgacccgagcgtcccgaagatatggaggagggtcagatgccccagtgtcccgaaggcgcggaaggcgagcgtccggagcttccggagggtgtcgagcccggtcaggtgcccgacggcgagcaaggcggtggcttcggcgctcgcgacggtcgcggcggcgcgggcggccccatgggtgctaacgccagtgaggactgcctcatccagatcaacggaggcgtggtgaccatcaacgccggcggtgacgcggtggactccaacgggtacgtggaagtcacgggcggcgagcttgtcggagccagctccggggccggcgacagtgcgctcgactacgagtacggcgctgcggtgacggggggcacggtcattctggccggaggcgtcggcatggccgagacgttttcggaagggagcacccagcccttcgccctggtgagcctgaacggttcggcgaataccgagctatccgtggaaagcgagagcggcgaggtgcttgcccgctgcacggtgcccgtgtccttccaatgtgtcaccctgtcggtgccaggactggccgagggcgcgacgggcaagctcgttgccggcgacgctacgaccgacttcaccgcttccacgacgccttccggcggcatgggcgccatgggtgccccgggcggcatggaagccccccgcgaccgcggcgatcgcggcggccgcgacgctcaagcttcgacgccggaagcaacggcttagccatctacggcgcttcgcgcacctttttgcgtagtttgtgcgctacacttttcgtcagcagaacgcggcgaggagcgcgacggcaatgaataggccggcgcgcccctcgtatctacgctgcctgcggccgtcccttcaggttccgccgcgctttcacggttcgaactcgaaagggaaaggaaagatatgcgcgattcgtcactgggcccgcttttggcggtgttttatggctgcgggtttctggccggcttcaacgagaacctggtgaatatggcgctcgttgccatcatgggcgatttctccatcgatgccgtggcggcgcagtggcttgtgaccggttacatgatcgccgtcaccgtggtggtcacctgcatggcctacctgtaccggcgcctgtccatgcgggcgctgttcttcgcggcggcggctttgagcattgcgggatccgccgggggccttctggcgccgagctttccgctgcttctggtggcgcggctcgtgcaagcggtcggtacgggcgtgttcattccgctcatgatgaacgtcatcgtcgaccgcgtgccccatgggcgcctggggacgtatctggccatcggctcggccatgatcaccatcggccccgccacggcgcccattgtgacgggcttcatggtgagcgacctgggttggcgcagcgtgtttctcgtgcctctggcggcggccgtggcgctgacggtggccggcatcttcgttgtgcgcggcggccgcgagcccgagcgggcgcgcttcgatctcccctcggcgctgctcacagcagcgggtgtgacgcttctgtgcgtgggactctcggaggtgacgctgcgtccagccgtgggcgcggcggcacttgtcggggctgtgttggcccttggctggttcgctcggcgccaagaacatttggcgcgtccccttgtgtccatggagccgctgcatcacgggacgttctggccggcggcgctgctcgtcatggtgacgatgatgacctatttctcgctgtcggtcatggcgcctctgtatttcgaagaggcggcgggacttgcggccagcatggccggcgtgctgatggtggcgcccgtgctggccaacgccacggcctcggtgctctcgggccgtgccctggatcgctggggagagtggcccctgctgccgacggggctcgccatcgccgtcacgggattggcggcaaccatcgccggcgcccttacgggatcgctcgccgtggcgacgacgggcatcttcttcggctatctcggcacgggcatggtgctctcgccggcccagacggccgggctgcgccgcctgcccgacgagctggattcccacggcgtgacgctcatgtccatggccgtgcagctgtcggcgtgcctgggaccggcggcctatgtcggcatcatgagctcggctacggcctccgccgctgcggccggcgtacctgcggcccaggccagcgccgagggcttcgccaccgccatggccgccgccctcgtcgtggccgccgcgggtctggccatcgccttcttctacgcccgcttcgcgaagcgccgtcggcgctaagagatcagctattcagttttagagagcttgcgaggcgtcccagtgggcagcgacgtcaaagcatatgtcggcgaataatttgacagcaggtttcgaagagctcgcattgtatagaagataaactggatacgtggtattttcaccaactaaaggacgcccatgcagtcttccgataactttggtattgggcatcgcgtttccgaagacgatttcatcatccccaagtaggtaggcgatacgatgaaagtcctcatagtcgcgaaggcggtagttgggctctagcccgttgcggcgaaaggtgcctacggcgccatcgaacatggtttgcagctgcggattggtggggcagacgagatatttgtctgatagatcgtcgaaacttacggtttcgaggcttacgagaggcgagttgttcgtaaagtagacagccagaggcatttctgccagcagctcgcagacgaagttgtcgggaaggttggcaggctcacggaatacaacgcccatatcggccattccgctggtgacggaggtttctatggtcgcagaggtctggtggcaaaaacggggaaccggcagatcggggtgcctaagctcccattgcgacatgctttcgtagaaaatgtcgtcccaaaggctgtgggaggtcatcacgatatcgatgcacacgctattgcgggattcggcggccatgacgcggcacttcttctcgatgcggtcgtaatcctcgagaagcttggcggtggcggtgatgaagtactgcccttcgggggtgggcctcatgggtatgcggtcgaacaacctgacgcctaaggttgcttcaaggttcgcgatatggcgcgtgaggctcgattgggacatgtgcagcagattggctgctttcgtgaagttaagtgtttgtccgagcacttgcagctcccggaacaaatcaagcatggtaccccctctgcaccttggtcagcgacattccgcaatgctgctacggaatgtcgctattattccatgatatgggccaacgtgcaaaggctgaggggcggcttattcctgcaggatcgcgcgcttgctgcgcagctcttccagataagcctgggcgtcccctgggtcgtcgtcgacggactcgtcgcccaagtcgacttctgcgggaaccttgcgatacagcaaatcgtagagcaccggtacgatgtagagcgtcatcagcgtggcataggccaagcctcccaccaccaccagcgccatgccgcgctccatggaggtgcctatctgctggctgaacacgagcggcagcatggccaggatggtggtgagcgccgtcatgaggatgggacgcatgcgggtacgcccggccgcttccagggcgtcgcgcttctccaggccgccgcggcgcagctggttcacgtagtcgacgaacacgatgccgttgttcaccacggttcccatgagaacggcaaatcccatgagcgacatcatggtgagctgctcgccggccgcccatagcgccgcgaacccgccggtgaaggcgaggggcaccgtcgccatgacgatgaagggcgacagcaggctctggaactgggccaccatcaccaggtagatgagcacgaggcccaagacgagcagcatggtcatctgatcgagcatggtatcgatgttctccagctcgccgctgaagctcatggagtagccgtcggggagctggagaccgtccagcttctgctgaagctcgcgggccagcagcgcgttgttgtggccgtcggccacctcggcggttatggtaacggtcttctgggagttctcgtgagcgatggtggccggcgcctcgctctcttccagtgtggcgaagtctcctatggccacttccttcgactcgccgtcgcgcccggtgatggtcaccttctcgtccaagatgttctcgcgggtgatcgggtgggtctcgtccacgatggtcacctgggcccgggtcccgtccatctcgaggatgctggaatcggcctcatgagacagcgccccggccagatattcgtacagctgggccaccgtccagccctcgcgggtgagggcgtcctcgtcgatgacgagcttgagctcgcgatcggcgtcctcggtgccggtctcgatctcggtgtagccctccacctcgtcgacaagccccgcgacttcctcggacagctcggcaagtttggccgggtcgtcgccggtgagggtgatggagagcccgctgcccgccatggaggtcacagacgagtccgacgacgtgctgggaatcacctcgcagggcagtccttcggtgcgggccatcacctcgtccaccaccgcgttcacctcgccatcggtggctatgccgtcgtccatttccaggtagaacatgaactcgtcgaaattctcggccccggtgtcggcggccgccgaggagaccaccgaggccgaggccgtgccgtcgacggccgccacggtgccgacaccctccacggaaagcgccgcgtccataacctggtcggccacggcgaaggcatcgtccttctcggttccctcgggcacggtcacggtcagggagaccgtcctggacgtcatggagggaagaagcgagatacccatgcctgcggccccgaccaccgcgaccaccagaaggctcgcggccaccaggagcggcagcgccttatggcgcagagcgaactgcaacgagcgtccgtaggcacccttcaccttcccggagaagtcgtcgcggcgcgggcggtagcggcgaaagacgaaccgcgagagcgccggcacgagcgtgagggccaccacgagcgaggcggtgagcacgtaggtgagggtgagcgcgaagggcatcatcatctggttgaccatgcccgtggtgaatgcgatgggcataaagacgcagacggtggtcagcgtggaggccaccacggcgccggatatctgcttggcgccctgaaccgccgcccgggccgggctgatgccgcgcccgcgcaggcggtagatgttctccagcaccaccacggagttgtcgacgagcatgccgacggccagtgacaggccgcccagggacatgatgtttgcggacacgccggtgaagtacatgagcagcagcgccagcagcaccgagaacgggatggagacggccacgagcacggtgggcttccagtcgcgcaggaaaagcgccagcaccaccacggcgagcaggccgcctagaagcagcgagttcaagatggacgagatgaacgtgtcgatgagctcgccctggtcggacactatgcgcagatccagcgtggggaactcctctgcaagcccagccacggcctcgcggcaggcggccgacacctcgttggtggaggcggtggaggacttgtacaccgacagcagcacgccgtcgccgccgttcagcgacatgtaggcgtcgcccacgttgtccaccacggtgatgtcggccacatcgcgcaggcgcacgtcgcccacttcgtcgatggtcacgagcagcaggttctccagcgcctccaggctctcgatgttgtcccctacgtgcagaagccactgatgatcctcgtcggcgttgccgaggtatcctgccggcatggagaagtcttgggcgcggatgaggttcgccagcgtcgtcttgtccacgagggcgtcgacgttggcctgctcgatggcgctctggcgcgcgtcctcgtactgctcgcgggcctgatcgagctggctgcggctctgctcgagggtggatttcgcgctggccaactgggcgcctccattgccgaggtgggcggcggcgctcaggctgccggcctccacctcggccagctgcttctggtagctctgcagttcgccggtggcctcttccagctgtttttgcaaatcggcggccttgccgggcatggccgtgagagtctcgcccacctcgcccaggcgcgtgccgatgtcggtcagctcgctggcggcggcctcgagcgcgtcggtggtgtccttcagcttcagggcgatggtcgccgcctcttccagggaggtggccgactccatctgagcttgcagttcgccggcctcagccttaagctcctcgatgctcttctgcagctcctcggccctggcctgcttgtcggccagctcgccttgtagcgattcgccttcggctgccagcgtttgcagctgggcgccgagagaggacactttcgtggtagccgaggagacggccaacgtcaatcccgaagcggcttggcccaactggtcgctcgtctcctgctccttgtcggcgagggcctcctgctgggcggtgatctcttcctcggccgcctccaggtcggcctcgccgtcgtctatctcgcgcttcgcgtcggccagctcgccgttcacgctggccaagatgcgattgttcacgtcctcgatcttgtcgtcggaaagcctcacttccgcggtttgctgcacggcgccggccagcgacacgtcggccacgccgtcgacccgctcgagtctggggaccagcgtgtcggcggcgaagtccgacagctcgtagatgctcttctcgccatcggcggcggccacgtacatggtggccatcatgtccagggatatctccatgatgttgggagtgcccacggcttcgggcagcgtgctctccacctggttcacggccgaggacaccttcaccatggccgaatccatgtcggtgccgtcctcgaattccagaaacaccatggcgtaattgttggcggattgactcgagatggaggcgaccccgttaacggtggacagggcgctctccagcacgtcggtcacctcggtctccactttctcggccgaggcgcccgggtcggtggcgatgacggcgaggtaggggacgtccatgtcgggcatgaggtcggtcttcatcttcgcgagggacacgccgcccaggataaggcagataatgaccgtcactacgatgaggtagggatgtttgacgctgaatcgtgagagcataacgacctctttcgtctgctggcttgctttccgaaatggcgtggcaacgggtgcggggagacaggcggcggcgagagaggtggcaattgccttcggggtcgccgcctgttccaggacctatcgagagaacttcccgggatacaccttccccaggtgcatgagctcccagatggcgggcgactcgtagtgctccacggtggcgccatcttcgatgacgtcgatggaggcggtgccggcgaagcggatataggaggggtctttgccggtgagcttggcacccagccgcatgagtttcggcagctggtccaccattttcagataggcgatgtcgcgctcgcgctggaacgtgatgcggtagagcgtgccctcgggggactcccattcgtagacgagagtcgcggagaagggcttgccggtattcgggtcggtgcttttgtcggtggcggtgaagcggagccccccgtcctcgttgcccgtgatgagcttcccgttcttggtgagcatgaagacgggcgtttccgcgaatccgaactgcttctcggcggtgagccacgcgctgatgatcatgtaggggccgatctgcgccctcccccaataccaatgatgcacgaggttggcgatggacacgttgccccagttgtgatcgtggtagccgctgccgttgtaggttttggtggtaccgtggtcggagacaacggcccgaacggcgccggacggaaccgacggaagccagaagaactgcttggcctcatcgtctccgtagagcgtgccgccgacgccgggacgccatgagggcaccgtgccgtgcaagtcgagctcggccgtgacgttcttgctctggaagtggatatggtagttggtcaaatctccggtcacggtgcaagggccgatcttcacatcgcagccgtcggtactgaagcggcattggctcggggttgcgtccacgcgctcctcggtcttgcgaccgtcggggtaggtgatctcgatagtcgcgaaaggggtcagcggccctttcgccgcgatcatcgacttcgtgtagaagacgacgacgatttgcgtcccgtcgtccatgtgggtgtcgaaataccaccactcgtagccggccttgtccagctgggtgcgcaggccgtcctcccacggttcgatgacgttcctcttgaggccgaattgcttgaagtgggcatcgtcccagggttgaaggactttttgcggtgcggtcatggtgcctctcctttcccggcgcctttcggcttggcgcatcccctcaactttaaacaggctcgctcgtggaatcccatgcaagttatgcaagggtgcatcagaggtcgcatgagccttctttcttcgcatgggggtacctgaaattgcaaagttggggagacttttgcctgcgtatagtggggccatcggagaaacgatcccgaaggaggagacaatggaaacgaaagagacgctggagatgagggacgaggaggcggtgcgggcggccgcaccgcgcgccatgcgctcgatgagccctatggccatgctcggtcgccgcggcttccttatgggcatgggtgccttgggcttggccggcatcaccggctgcgcgccccaggctacgccgagcgatagtgcccccatggcggaaaccggggaagcggccaccgcgccggcgagcaccgaggtgacggccgacaccatcaagtacgagcccatcaagaccgagatgacgctggaggagctgaacgagcgccgtcagcagctcatcgactccaagaccgaggactacgtctgcgccgacggcacggtcattcccaacgtgtacgtgaagctgcgctcgcttctggacacctacggcaacggcgtgggctcgcaggtccatgatggcagctacgccgaggtgatgtacctgttcactcccgaggatgcccaggcctatctggagatgcccatgggcgtgatgttcacggccgccgattacgccgctgcgtccggacgagccgaagacgagtgcgctcagatctgcgaggatctttccgcccgcggccttctgttccgcagccgctccaacggcacgccggagtaccaccagctggccgaggcccacggcatctgggagtacaacatgaacaactacgagaaggatgacggcgcctatccggccatccacaattcccagtggggcgccgacatcatcttgcagctgtacaacgcccgctcttctttctacaacgcggtgccctgcagtcgcgaagtggtggccgacaacgagatcgccctgccctacgacgacttcgaggccatcgtggacaagttcgacaagattgccgtgtccccctgccagtgccgcctttcccacaaggctctgggcattcccgatccgggcgatcacccgctggagacctgcatcacgctgggcgaggaggcggagtactacatcgagaacggcatcggccgcgagatcgataagaaggaggcgctggaaatcctccatcgcagcgtcgactgcggcatggtcattcaggtggccaactcggcgaccacggaggttatctgcagctgccatggcgactgctgcgatattctgggctcctacgtgaagattgcccaaggcggcgccgagccgttgacgcctgaggacctcaacgttttcaagtacctcagccattacaccctgaagcacgacgaggaatcctgcatcaagtgcggctcctgcgagaagcagtgccccttgttcgccatcaccatggacgaggagacgggattccccacggtgaacggcacgtgcgtgcgctgcggccagtgcggcaccgtgtgcccggtgggcgcccgcaccctgcacctcaaggaggaagtgctggagctgcccgagacgctgttggatgactacaacgcgaagggcatgtaccgtttcgcgaacgatatgatcgcctaaagaaggtaaacggggcgcctccgcgcgacgttcgaacaggtttcgcggaggcgccgaagcaagacacttgagattatcagggggagattgctatgcatgagatggcaatggtgcgcagcgttgtggacatcgtgctggaagaggccgagcacgctggggcaacggaggtgctgggtgtgtatttgaccgtgggctattctcgcgatatcgtcgaggacgtgttcgagtcgatgttcgcctggatgtgccggggcacggtggcggaaggggcggtgctccatctgacacgagtgcccttcacggtgcgctgcgaggagtgcggccgcatcttcccggtgaatacgcgatgccgggatacaccccgctgtccccaatgcggagcctcccattaccgtctgcacagcggcatggagttctacgttaatgacatcgaggtgaaaaccgacccgactgctgtgcgcgccctggcctcctaggttcgccgtatctgccctccctctagcgctcgtccggcctgcgcccggcgggcgctttgtgtcttgcggcgtactccatatctctctcatctcgtgacactgcgcagttcgggttttgctcaaaactattacgatatggccactagatcgattgtcgccatcgatcttgggattgtctaacgctttgcaagttccttcaggttctctatggcaagctgtgggtcgaggacgtgcatgcccaggtaagcgcctcccatggtgtcggcatcggcaatggcataaatgtcccggctcgtctctccggtaaggtaatgccagaggcgatagatgtagcctgtccaatacataggctcgcggccccaggtggcgccggcggggggcagccctcccgcttcggcatccagctcttcaagtaaatattcctcgccggcccattgtagaaaatcgaaggtcgagtccatgcgtcgggcgacgtcgctgttcatgaaagcttcaatgaaagcggggcagtcatagccattggcgcgggccaattcgaaaagacgaccctggatgtcgcacagttggcgttggtccaatcgcagcttattcaaggggaacaccggcttccaatatctcgtcgaaaaagcgtccatcgcgccggtgctctcgacaaatgcgctcagcgagggccactccttctgcgcggttcatctcgctcgtagcaatgagctcggcccgttcctcttccccgaggcaccgttcttctacgatgcggatggcatcgcaagccttttgggtgagcgccactacttgattgcctagctgcagggcggaaagacttttcacgagcgccgcgtcggtgatctccccattgaagaagcggtcgaggacgacgaacatgcgatcattggcgatcggcccgatggcgacgtctgctcccgcaagcacagctgccgtcgcagcatagagctcggtgccgcgggcgctttccatctttccgcggtggtaggcgaccacaagagcccatgttgtatctggagaaagctcgcgaacgtcgagtccgtctagctcgagttccaccgtgtaaaaccgcgcatcgggaaagtcgcagataagggtaaggggttgcaaagggttggtgcccaggtagaaaccacgcccgaagtcgcaccgatctcggctgatgggcgcaatggggccgttgatgccatgacgcgaaccgtgatagaggatcactgcgccctccttcctcttcaggagaccggataatttatgtgtcagtatagcgtaaagagaagctacaggttttcgaaggatcgacatgcgtgatacacccatttcgcgaagcgtcggtcgctccgagcccgttctcccgtatgttgaaagcgggattctgccgccttcgtggaagcgcttcagcgctttagtgcgttggagtacaatggcggaaacggcggcgagacgcgaaggcgcgggccgcctcttttgagaaagggatggttgcatggccgacatcaccgaggtcgattacatctggaagaacggcgagttggtgccgtgggcggaggctacctgccatgtgttgtcgcactcgctgcattatggctctggcgtattcgagggcattcgctgctacaaggtgcccgatgaggacaagtctttcgtgttccgtctgcgcgaccatatggagcggctgcgccgtagctgcaagatcgcccagatcgagttgccctacagcgtcgacgagttgatggacgccacgcttgaggtcattcgcgccaacaagcttccggcctgctacatccgacctctggtgtaccgcggctacggcgtcatgggcgtcgatccgacgggcgcgccggtggacgtcgtcatcgccgtttggccctgggatgcctatctgggcgccgacgcgctggaaaacggcgtggccgtgggcatctcctcctggcggcagcgctccaacaacgccattccgccggcagtgaaggccacggcttcctatatgaactccatccttgcgaagatggaggcgaaggcccacggctacgcggaggccatcatgttgaacgaggcggggctcgtctgcgaaggtaccggcgagaacctgttcattgcgcgcaacggcgtgctttccaccccgcctctctccgacggtcttctggagggcatcacccgcgacacggtgctgtgcctggccgatgacctggagattcccgccgtagaggaaagcctcacccgcagcgatctctacatcgccgacgaggtgttcatgaccggttcggccgccgagctcacgcccgtgggctccgttgacggccgcgttatcggcaagcccggcgagatcacccgcgcgctgcaggaccgcttcttcgacctggtttacgggcgtatcgacgagtacgctgactggctcacggaggtctaatggctgagattcgcaccccggatgtcgacgatttgctgtgtgtgctggccgccatcgacgatcccgataccatattcgctcttttggaagacctgttcaccgtgcgcgagattcgcgagacgtcccagcggctgggcgtggcgcggcttttggcggcggggaagtcctatgcggctatcgaggcggaaacgggcgcctcggccacgaccattgcccgggtttccaagtgcctcagctacggtgccggtggttatgaacaggcgctcaagatcttagacgagcggcagtagatagagcgaccgtagacgcattcaaaaaagagaagaggcggcttgagggagccgcctctttgcaggggttcgagaacggatcggggaatctcgttctcgggaagcgggcttgttgaggggcgcccgcttccaaaagagagaagaaggaaaggaaaggggaaaggagaagattgatcagctcttttccgtttcgctggttgcagtataggggagggacgatctttgggaagactttcggctttgcagttaccatggcgtaaataaccgtgcacgattccgtcaaacaggggcggggcgaccgggctgcgtgataccgacgaaggtgcgggctgggtgcgcgagagttgtggagaaagtgtaaacctaggctaactctcttgtgcgaacgaatcagttaacctattataacttttgtcagcagggccgagggaacgaagccctgtaacacctcctctcttcttgttttactgggtggcgaagcttctcctcgtctcgctgtcgccacaacatgaagcccgcggatccccctcccgcgggccttcgtgtttttagggccgaatctcttgtattgccatggagctgaagcaaagcgttcaaggggcggtcacttcggttgatgctctgtgaactatgaccttccgcatcttgatttcctagcgttgacgtgggaatttcagctgaaacaaagcagtggcgcagaggctacgaaagggcgctgcgctctaaattagtacacgagcggggtaatcatttacttgcatggtttgcgtaacaagaaccttcaagggaatggtgatgacaatgaaactgaagtatctgggctgggtggcgctctccggtctgttcgcggtaagccttgcggggtgcgcggcccaaagtggtcagacggcaccggccggatcggagcaggcggtggtgcagactgaagagacccagggcccggcggcgggtcaggccgccgtcgatgagcaaaccgacgccgaggccgatgcggccacggccgagcaggaggccgcgaatcccgctgagctgcagatcgtcgattccggatggttcgtagccgacaacggcatggtagatttcgccgtagaggtgcagaaccccaataagaccgttgaggcggttgatccggtcatcgaagtcgtgggcaaggacgatggcggcaacgtcatcttcgacgagaccatcgaaactcccggcgtgctgcccgattctacctattactattcctatgtggccgggtccaccgccaactcctcggccacttcaactgaggtggtgaagccggcgaccgtcgagttcgccatcacgacgcccgagggctcgtggaaggccacggatcaaacgctggccgacgtgtataccgtgcaggacaagggcgcgactgacactcagttcggtgccaaggagttcacgggcacggtgaccgcgtccgaatccctggatggcgccacgcagtcgcgcgtcgacgtggtgctgctcgacaaagacggccatattgagggcggctacttcaagattgtcgacactcagcccggccaggctgccgactacgacatctacgccgtgggcgcacccgcgtacgccagctacgccgtctacgccagcccctgggctgaggaggacgccgcataaacgcagagcaacagagccaacttccgcaaggggcgacttcggtcgcccctgtttatgtcgcgcgttttggggcggaccgaaggcggcccttacgaggacgggtgggggcaagggtgcgtacaagtgcaggggcgcccagtacgagagagtcgcctgtggcagcaacgttcgctataaaagaatgctgcgtgctccgggaagaaatcgactatgtctgcggtcgataaaatgacaagtgcgcggcctgcatcgatttactcaaacagggtgttccttccgagcgagtggagaactttccttaataaggcagagcgactgtcgactcctgttttcttgtagatatttgctatatggcggttcacggtgttaaccgtgattgttaattcggcgccaatttgagcgggaagcagtccgtcgcagaccatggcacaaatctcccgctctcgcggcgtcagattaaacgtgtcttcaaagctctggtgctggtcgggttgagcagcataagaaacgccggtcggatgaagctggtagaatcgttcgctgagatgccgcgctacgatggatagtatttcgagctcatcgtcggtgaagtctcctgcgttgcgactgcggccaaaagctacggtcccaaagcctattccatggctgaatacgtttatgccgcaaccatatacaatgcccatcggctggagccattctcgataaaggacacttcgttgtcgggcgtcatcggagatgaaatctgagtccctgtagacaacgatatcttccatttggcttgtcgcccacgaggtgtagtccttttcaatgtaatcgctgtaatagcgacctaaggttcccttgtcgattgtcagcgttactggatcgaagaatatctccttgcccttccgccgtccttttaagtcgaaaaatgagatgtcatgaggtattattcgcaccatttcgttaagaaagaacagcctgagatcacgaatgttctcggcttgatatatgccgaaaattatatcgtcaagcttgtgccatagtgtttcatctgtcacgatggcccccttctgaatatgcatatttatatgtacgtagaaaagatgcgcaatctagagaatttcccagctgcctctgcaaatctaccataaaacctgcggagcgagcaatgaatcgctcaaattgcgagtgctgcttttattgtagcgctcttaagacaggaggtttccatggtcaaggattacatcgacaccaacgacttcacgaaggacgagctgctcggcatggtggatctcgccatcgccatgaaggggctcatcaaggaaggtggcgagtacccgctgctgctgaagaacaagaccttgggcatgatcttccagcaggtgtccacccgcacccgcatctccttcgagacggccatgaccgacctgggcggccacgcgcagttcttcggccccggctccatccagctgggcggccatgagtccatcgaggactccggccgcgtcatggggtcgctcgtcgacatcctcatggcccgcgtcgaccgccacaaggacgtggtggacctcgcgaagtactcgaaggccccggtcattaacggcatgagcgagttcaaccatccgacccaggagctcggcgacctcatgaccatgatcgagaacctgcccgccggcaagaagatcgaggactgcaagctcgccttcatcggcgacgccacccaggtgtgcgtgtcgctcatgttcatcgcctcgaagatgggcatggactttgtgcagttcgggccgaagggccaccagatctgcgacggcgccctgcacgtgggcaccgaggaggagcgcgaggcgttcgggcgtaagctcatggccatcggcgaggagaactgcaaggtctccggcggcaccgtcaccatctccgacgacatctcctgcatcgagggcgccgacttcgtctacaccgacgtgtggtacggcctctacgacgaggaggtctccggcgagaactacatggacgtgttctacccgaagtaccaggtgacctgggacctgatgaacgccgccggccccgattccaagttcatgcactgcctgcccgccacccgcggcgaggaagtggtggacgaggtcatggacgatgaggcccggagcctctgctgggacgaggccgagaaccgcaagcactccatccgcgccatcctggcgacgctgtgcccccagtccgagccgaagcccgaggtcgcgaccgcctatcgcgccaccatcgacgagtgcatggcgaagctcggcaagcagggtctgtagcctgaagagctcagttgggcagttcgcgctcagatgccgcttcggcgtcagctgagcagacaagaaaaggggttttcccatggcaaaaaagaaatttcgacttcttgatgcagtactttctgttatatgcgtcgtgtttgtcgccgaagctatcgctcccgctgcggccatcggcaaccagcagttcttctggtggattttcctgattgtagctttcctgcttccttatggactcatcgtatcggagctgggaacttcctatgccgatgacgaggggggcttgtacgattggatacgcagagcgtttggtgacaagtggggcgcccgcatcagctggtactactggattaacttcccgctgtggatcgccagcttggcggtgttgtttccaagcactattggcgctatggccggtatcgagtttggggtcattccatctctcgtgattgagtttgtttttatctggacggttattttcatcagcttctcgcgagcttctgatgccatctggattatgaacgtggccgctgtcttgaaggttgctattgctttgtgcctcggtggtcttggcatctattttgccgtcacatcaggcttcgctagcgatatgtctccgcaaacgttttttccctcttttgatgccaacgctctttcctatctctccattattttgtttaacttccttgggttcgaggtaatcgctacgtatgcgggggacatggaaaatcctcgggtgcaaattcccaaagcaatcatcattggcggtattgtgattgctgccatttacatggtcagctctttcggaattggtgcagccattccttcaaccgagctgagtcttgattcgggcattatggacgctgtcgcaataatggccggcaatgggtctctgcttctgattgtggttggtatcgtctttctgctcactctttttggaaatatggtgagctggtctttcggagttaactttgttgcgatttgcgctgccaaagacggcaatatgccaaaagccttttctaccgaaaccaagaaaaacaatatgccaaaaggcgtggccatcgccaatggcgtcattgcctcagttgttgtgatcttgctccccatggccgaagctctcggcattggagattacttctgggtcttgttctccgtgggtgtcgtgtttcttcttttcagctacatccccatgttcccggcctaccttaagctccgtcgcgtagatgctgatcgcgagcgccttttcaaggttccgggctctgagacgttcgtaaaaatactcgcttggattcctgcagtccttttggttctggcggccatcattacggtcgtacccctgaacggttcggaagaagagcttgccaaggtgccgatgctggtcgctgtcattgtgtttttaatcgctggcgaagttgtcagagtggtctcagcgaggaagcgcacccaggagtatttgggtatggaaaagagtggcgagccggctccaaggtcgcttcctgaggcaacgatcgtcgaggaagaggagggccgtgccgagcacatcgctcgtaattgatgcctgaatctaatagatcaaatcgatttgagtgactaagcaacccattcccaacttgaaaggaatcattatgaacaagacgatttacgagtctgactccacccccaaagccgacggttttcatatgcccggagagcacgagccgcaggagcgcatctggatgctatggcctcaccgcactgataattggcagtacggggcaaagccggcgcagcaagtatttgcgagtgtggcgcgcgctattgcgcgatttgagcctgtcaccattggcgtgaagcccgttgattatgccgccgctcactgcattttcgaagacgacgagctgatcgatatcgtggagatggagtctgatgacgcttggattcgtgactgcggtcctgcctttgtcgtcaatgattcgggtgagatgcgcgcggtccatttcggcttcaatgcctggggcggactctacgatggactgtacttcccgtgggacaaagatgagctcgtcggcatgaaggtgtgcgacctgtctcatgttgacagatacaagcccgacaactttgtgcttgagggcggctccttcacggttgatggcgagggcaccgtcattacgaccgaaatgtgcctgctgtccccgggccgcaatccacactacaccaaagaagaaatcgaagaacatctctgcgagtatctcggagttgagaaggttatttgggtcaaagacggtattgatcctgacgagacaaacgggcacattgatggggtagccacctatgttgcgcctggcgaggtggcctgcatttggaccgatgacgagtctcatccctactatcaggttgcgcgagacgcctatgaaacgttgtcgaacgccgtcgatgccaagggtcgtaagctgaagattcacaagctgtgcatgggcgcaaaccccatcgctcttgatgaagaagcagcggcaacgatcgacatggtagaaacggcaaaggagcgcactaccgattacgaggttatgggctcgtatctcaacttccttattgttaacggaggcgtcatcgttccccagtatgacgatccaaacgacgcgctcgctattgagcaaattcaagcaatgttccccgaccgcgaaattgtgggcgttaacacgacccagattctctacggcggcggcaacatccactgcatcacccagcaggagcccaaggcgtaaatgtaaagagagcgagcttgtgcctggcaagtgcttatagagcaatatgttgggttgactcttcgcttggaagcagtttaaaaaggattaggcagatggagagacaaaaataaaccgagtcttgtcttttcatttccgtccggcttgattaagttggcgccaaggatggcccgttgtgccaagccatctttggcgcttcagtttgagacaaattaacgaaaaggaggcttacatgccctaccagaaaggacccggcaagaccgtcgtcatcgccctgggcggcaacgccctcggcaacaccccccaggagcagctcggcctggtgcagaacaccgccaagcacatcgtggacatgatcgaggacggcaccaacgtcgtcgtctcccacggcaacggcccccaggtcggcatgatcaacaacgccttcgcctacgcgtccgcccacgacggcaagaccccggacatgcccttccccgaggccggcgccatgtcccagggctacatcggctaccagctgtcccaggcgatcctgaacgacctcaaggcccgcgacatcctgcgctccacggcctgcatcgtcacccagaccgtggtggacgccgacgacccggccttcgaggaccccaccaagcccgtgggcgccttcatggacgaggagaccgccaaggccaaggccgccgagatgggcatcacggtgaaggaggacgccggccgcggctggcgccaggtggtcgccagccccgtccccaagcgcatcgtcgagttcgacgccgtgcgcgatttggtggaggacggctacgtggtcgtgtccaccggcggcggcggggtgccggtcttcgagaccgaggacggctacgtgggcacccccgcggtcatcgacaaggaccgctccagcgcgctcatggcctccgagctcggcgccgacatgctcgtcatcctcaccgccgtggagaaggtgtgcatcaacttcaacacgcccgagcaggagcagatctccgagatgaccgtctcccaggcccgcgagtacatcgcccagggccagttcgcccccggctcgatgctcccgaaggtcgaggcctgcatcgagtacgtcgaggcctaccccgagggcaaggcgctcatcacgtcgctcgagtgcgcggccgcgggacttcgcggcgagacgggcaccgtcatcgtcgcctagcgatctacctgttcgggagcgctttccacagttttgtgctcctggtcggggagagcaagactctcttcatgcagcaaaagctcccagttcctcgcggatacaattgtcgtgcggggactgggagtttttgtctttcgggcttcgagggagggccgactgaagtcggcccctacggagaggaggcgggggagggccgactgaagttggcccctacggtggggaggcggggaggacggcctagcccttccagaatagttgggtcagctcttggcgggttccggtgccggttttcttgaggatgttgtgcacgtgggccttcacggtgcccaaggccagctgcagggagcttgcgatgttctgattgtctttgccctgcagcacttgctccaagatgacgcgctcgcgggccgtgaggttatagcgctcgcagaaggcgggcagaagctcgtccacgtattcctgcgtgtcgggcgcatcggcgctcgggggctccttgaagcgcaggcgcaacgtgtcggccgccgcgcgcagggtgaagaatgagaaggccagaagaaggatgttctcggagaagttgcgctcactgatatagagggggagcagcgcctctttcgtgaagaacgaggaatcgaacacgagaatcatggccacgtcttcgatgatgatgcagaagcaaagcacggtcgccacaagcagcacgggttcctggcggcgcatgcgcgccttttccacgtcgcttttcgacgtgcagtagcgatagatggcaaagctgatgcaccacaggagaaagccctggcgcagggtgtagaagagccactggcgaaattcgctgacgggcagcgccagcacgacgatctcgctggcgatgatgaaggcaacggccggagcgaggcgccagtgccgacgctgctcgttcacgaaatcgcagaggatgagccacatgggctccaaggtgcccagagccagtagcattttcacttgcgggtggtcgatggtatagaactgattaatagagtactcgacgttttgccccagatactcgtactggaaaatgagcgccaaatcgaggaaatagaacagcagcatggcggcggcgtagagaaacgagcggcgccgcgagacgaagtaggccgacagcgaaaccgagcccgatgctacgcagacgagcatcacaacgatggtgtagaggtagaacgctgtttccatagcgggcctcctcggcgttgggcgaatcctgacgatataaggcagattaaaaagaatttcgagaggatatagttgtcgttcaatgcagcgctcctattcataccacagacgccaggtcaatagttatatctgttgggattatttgagattagaacgcacccgttccgcttcgtcttgaaaataatcccggttatttcttcccaaaacctccgccgcgccccatgctgtgcgccaagaggagcgccccgccgatcccggggctctcaaggggctacggcttcgcaaggggcgggccggccgccataaaccttaaggaggtttccatggttaaggattacatcgacactaacgacttcaccaaggaggagctgctcggcatggtggacctcgccatcgccatgaagggcctcatcaaggagggcggcgagtacccgctgctgctgaagaacaagaccctgggcatgatcttccagcaggtgtccacccgcacccgcatctccttcgagacggccatgaccgatttgggcggccacgcgcagttcttcggccccggctccatccagctgggcggacacgagtccatcgaggactccggccgcgtcatgggaagcctcgtcgacatcctcatggcccgcgtcgaccgccacaaggacgtggtggacctcgccaagttctccgccgcgccggtcatcaacggcatgagcgagttcaaccaccccacccaggagctcggcgacctcatgaccatgatcgagaacctgcccgcgggcaagaagatcgaggactgcaagctcgccttcatcggcgacgccacccaggtgtgcgtgtccctcatgttcatcgcctcgaagatgggcatggacttcgtgcagttcggccccaagggccaccagatctccgacggcgccctgcacgtgggcaccgctgaggagcgcgaggcgttcggcaagaagcttatggccatcggcgaggagaactgcaaggtctccggcggcaccgtcaccatctccgacgacatctcctgcatcgagggcgccgacttcgtctacaccgacgtgtggtacggcctctacgacgaggaggtctccggcgagaactacatggacgtgttctacccgaagtaccaggtgacctgggacctgatgaacgccgccggccccgattccaagttcatgcactgcctgcccgccacccgcggcgaggaagtggtggacgaggtcatggacgatgaggcccggagcctctgctgggacgaggccgagaaccgcaagcactccatccgcgccatcctggcgacgctgtgcccccagtccgagcccaagcccgaggtggccacgacctaccgtgccaccatcgacgaatgcatggccaaattgggcaagcacggactgtaaggctttttcggctgggagcgcctcggcgttcccagcttccttctcacattaaggagttaccctatgagcggtaagaagaaattctcctttgtcagcgttatcctctccgtcatctgcgtggtgttcgtgtgcgaggcggcggctccggcggcggccatcggcaaccagcagttcttctggtggatcttcctgatcatcaccttccttctgccctacggcatggtggtggccgagctcggcaccacctacgactccgaaggcggcatctacgactgggtgcgcgacgccttgggcgacaagtggggcgcccgcatcagctggtactactggatcaacttcccgctgtggatcgccagtttggccacgctgttcccgcccatcttgggcatggtgttcggcatcgatatcgaggccaacatcttcgtgaccttggccatcgagctcgccttcgtgtggattgttgtgttcatgagcttctcgaaggtgtccgactccgagtggatcttgaacggcggtgccgtgctgaaggtgctcgtggccgtatccgtgggcgtgctcggcatctggtttgccgtgcagaacggctttgccggcgacacggctccggccaccttcctgcccgacctgaccaacaccgcggccctgggttacctgtccatcatcatcttcaacttcatgggcttcgaggtggtctgcaccttcgccaaggatatggaaaaccccgcccgcgacatcccgaaggccatcatcatgggcggtttggccatcggcgccatctacctgttctgcggcttcggcatcggcgcggccatcccggccgatcagatcgaccccgacttcggcatgatcgtcgccgtgatgactatggtcggcgaggcgtctcccatcttcattgtcatcgccatcgtgttcctcatcaccctgttcgcgaacatggcctcctggtccttcggcgtgaatgccgtggccgagtacgcggccaagaaccagaacatgcccaaggtcttcgcccatgagaacccgaagaccggcatgcccacgggcgcggccgtcgtgaacggcatcgtggcctcggccgtgctgctcatccagctcattcccgacgagtccatctcccagggtctgttctggacgctgttcgccacctccgtggtgttcctcctgctcacctacatcccgatgttcccggccttcatcaagctgcgcaaagtggatgcgaaccgcccccgcgtgtaccgcttccccttccagggcacggctatgaaggtgatcctggccatccccatgatcgagctcgtgctggccatcgtcgccaccatcgtgccgctgtcgggcgatgaggtggccgacaaggtgcccatgctcatcatcttcctggtgttcttggccatgggcgaggtggtgcgcatcgtgagcgcccgcggccgcaaggaagagttcaagggcctcacgcccgagactgccgcggcgcgcctggccgaggaggccgctggcgcgcccgaccagctggagcctgccgacccggcccagatcgaggccatcctggccgccaacaacggcgagcccgaaaaggtcctgtaagccttaaccgtcaggacctccgcggtaccgaggcgcgcttgtgccgagcgcctctgaccaagcagaagcggggcgcgctaccagctctccggcgcgcccctcttccaagccgattcttcccgaaaggatttcgctatgaagaccatttacgagtccgattccacgcccgccgccgatggcttctccatgccggccgagttcgccccccaggagcgcgtctggatgggctggccgcaccgcaccgacacctgggcccacggcgccaagccggcccagaggcagtacgccgccatcgcccgggccatctccgagttcacgccggtcaccatgtgcgccaacgaggccgacttcgccaactgcctggccgtcttcgaggacgacgacagcgtgaccgtcatcgagatgaccaccaacgacgcctggttccgcgacaccggcgccaccttcgtcaccgacggcaagggcggcaagcgcgcctgcgactggcacttcaacgcctacggcggcctcatcgacggcctgtacttcccgtgggacgccgacgaccagatcgccgcgaagatggcccagctcacgggctgcgtgcgctaccgtcccgacgacatgatcctcgagggcggctccatcacggtggacggcgagggcaccgtgatcgtcaccgaccagtgcctgctctccccgggccgcaccgcgtccgccgtgctcgccgaggaggccgacgaggacaccatctggcccgcctacgccaagaagttccagccctggagcgaggagctgcgcgcctacatggacgagcacctgaaggcgtatctgggcgtagagaaggtcatctgggtcaaggagggcatcgacccggaggagaccaacgggcacatcgacgacgtggccaccttcatcgccccgggcgtggtggccgtcatctggaccgacgatccggactaccccttctaccgccagtgccatgaggcctacgacaccctggccgcggcgaccgacgcgaagggacgccagctgaaggtgtacaagctccccatgccggtgaagcccctgtacatggaccagacctcctgcgacaccatcgacgtcgacgagaacgccgagccgcgcgtggccgacgagccgctgatcgcctcctacatgaactacctggtgaccaacggcggcgtcatcgtgcctcggtacggcgacgagaacgacgtgctggcggtgcagacgctgcaggagatctacgacgaggtgtggggcgcgggcgcctataagtgcgtgggcgtgcagtccgagcaggtcgtcttcggcggcggcaacatccactgcatcacccagcaggagcccacggcgtaggggcttcgcgcgttcggctcgacatcctccgatgatggaaggggcggctccgggataaggagccgccccttttttatgcaagaatttcgacttgttagagtcgtgggggaagcagaaagggcttctcgccgctcggtttagggaacacaacggcaaaaccccaggtcgccacacgatcatctgcatccggttctttcggatggtcatcccgaaccctaacaactcgaaaaaaccgtccgaaaatcgctcatcgattgcatgagtcggtcgaagcctcggttcccgcgaactttacgcgcgcaggaaggcctcgtagccgcgacgggcctcgtagatgtcggccttgctcgtgacctcccagggggagtgcatcgaaagcaccggcacgccggagtcgatgacgtccatgccgtacttcgcggggatgtaggcgatggttccgccgccgccggcgtccacgcggcccagctcggcggtctggaagctcacgcccgcgtcgtccatgatgcgacgcacgagcgcgacgtactcggccgaggcatcgttggagccgctcttgccccgcgcgccggtgtacttgttgaacacgagaccgcggcccagataggcagagttcttcgcttcgaagacgctcgcgtaggcggggtcgaatccggcggacacgtccgatgacagcatgcgcgagcgggtgagggcgcggcgcaggcgcagcgggctgctctcgccggcgagggccatgatctcagcgatggtgttctcgaagaacatcgaggccatgccggaggcgcccacgctgccgatctcctccttgtccaccagcacgcagacagcggtgcgggcggggatgtcgtcgcccaaggccagctgggccgcaagggaggtgtaggcgcacacgcggtcgtcctggccgtagccgatgaccatggagcggtcgaagccgaggtcgcgggcgcggccggcgggcactacctccagctcggcggagaggaagtcctcctcggcgatgccgtacttgtcggccagaagcgccagcacgtaggctttcacgggatctttggaggccttgtcgccttcggctttcccggcgccgtcgtccgcctcgtcggcgtcggtcgcggcgagcggccggttgcccacgagcacgtccagatcttcgccttccacgaccttcgatcccttcttatccatctgctgggcgcccaagtgggggagcaggtcggtcacgcagaacaccgggtcggccgggtcatcgccgatgttcacttccaccacctcgccgtcggtggtcgcaacgacgccgtgaagcgccagcgggagcgccgtccactggtagttcttgatgccgccgtagtaatgcgtgtccaacagcgcgaagtcgttcgtctcgtacagcgggttctgcttgatgtcgaggcgcggcgagtcgatgtgcgcccccaggatgttcatgccctcggagatcggtgcggcccccacatgtacgagaatgacggccttgccctgggcgcaggcccacagcttgctgcccgggcccaccggcgtgccagcggcgatgcaatcggccagcgaatcgtagccggcgtcctcagcagcggcgatggcggccgccgcgcactcgcgctcggtcttgttctcggagatgaaatcgatgtagtcgacggccagcgcctcaagctcgtccagcgacgcctcgtcgtacttcttccaagccacttcgcgttccacgtaacatcctttctcttgtgcgatcgaacacagtatgaaccaatctgtggggaaaagttcggaaattgttacatcctgttttctcgatgcgcggggcgggagcgccgtactataatgacccagacattgagacgatgtcgtcgatgcttaagaaaggaagattccatgaatctgcgtgacgttatccctaccgctgagaactccagcaatttcgacgtggttcccgagtccatcaccgaggtgggcaccacgcttgagaacctgaaggctgccgtgtgcggcgagaccggcgcgtccgccaagtacgccgcctgcgccgctgccgccaaggagcagggtttcgaccagatcgcccgcctgttcgaggccaccagcgccgccgagcagatccacatcggccttgaggccggcgtgatcgccgagatcgagccgggctacgagcgccccgccgctcccgaggccgagggcatcgctaccgacctgaacctcatcgccggcgccctgggcgagatctacgagacctccgacatgtacccgagcttcatcaaggtcgctcaggaggagggcaacaagaaggccgagttcgtgttcacccgcgccaagctcgccgaggccgtgcacgccgagctgtacatggacgcctacaacaacatcgacgctcccaccgacgaggcctactacctgtgccccatctgcggctacatccacaagggcgacgatttcgagaagtgccccatctgcttcaccccggccgacaagttccgcaagttctaagtcgtccgcacgcatagcgcgcacctcatgcgaccgtccttcggggcggtcgcttttttcgtgcgcatgggtgcttctcgctgttgccggacgcgagcgacggacacggtttgatcggttgcgtctgtgctgcgaaggggaaggtggcctttgtggccgagcattttcgcaggggcggccctcacgcttcttctgccggcaatgtgcgatactgggtgtcgttcggcggcgaaaggagagcgagaacatgcggaaggcgagtttcgatacggggcggggaaagatcgtctactgggtaagcgatgtgcccgatgcgacgcggccgtgggtggtgttcctgccggggcttacggcggatcgtcgcctgttcgcgccgcagatcgagcacttcgagggccgtgccaactgcctggtgtgggacgcgccggcccatggtgagtcgcgcccgttcccgctggatttctcgctgcccgacttggcccgttggttgggggagatcatgaaggcagaaggcgtcagtgcgcctgtgctcgtaggtcagtcgatgggagggtacgtggctcaggtgttcgacgtgctgttcccagggcgcgcccgcggcatcgtgtcggtggactccgcgccgctcggtcgcgactactacaagcgatgggagttggcctgtctgcctttcgtgacgcgcatgttctacctgtacccgtgggccacgcttaagaagacgagcaccgaaggcaatgccgcaactcccgagggccgcgccatcatgggctcgatcctggccggctacgagaagggggagtactgccggctttccgcccatgggttcgccatgctggccgaggtggtgagaagcgatgagtacgccgcgccgaccgccccgctcacgctgatcgtcggcgagctcgaccgcacggggttcgtccgcaagtacaacgagctgtggtcggagcgtacgggcttgcccgttcgctgggtagaaggcgccgcccataactccaacgccgataatccagctgccgtgaacgccatcatcgaagaggcgctcggcggcaactgagattgcacccagcggattgcggcggcttcaggcactcgcggccgcctcgcagcttgcaaatgatcgggcgcagatgttcggcgctcgccttgccagcttccaaacgatcgtgtgagagacggctctggctggtttagttctgctagaatgcttccgctgagaaagccatagcgtgaaggaggtgagaggaatgtcgaagaagcgcaagaaggcgcatcctgtgcaggcggtaaagccgaaaagcgatgtcgtgtggcggcagtcggctgaggaagcgacgctggcgagcaagccgcgctacaacgggttcgcctgtgggcatggcgcccacggttcggcgaagtacagccgagcgcgggccaagcaggtctggcagcgacagatgcgacaagaaggagcctctcggggctccttcccttttatagaggcccgacgacgggatcccgcagcagcgcggtctcagaggcggtgctgtttgcgccaggcggcgggggagcagccgacctcgcgggagaaggcggtggcgaaggtagtcgggcgcggatagcccacggcgcggcccacctcggacaaagggaggtccgtgccggccagaagctcgcgggcgcgctccatccgcaggtcccgcagctcctcggccacgccgcgcccgcgctcggccttgtaggtggccgccagacgcgagcggctcacgcacagttcgcgggcgatggactccagtgtgagcggcgcatccaagtggcgctccagcagcgcgcgggcgtcgcgggccagacgggccgcttcgctgctgccccgagcggcttcggcctgtccttcggcctcggcggtatccatgaggcaggcgacggcctcggcggcaagcgccgtcaggtgcagctcggtcgccgcggcgtcggccgttcgggcgtcgaggcgctgcagcatggcgcccacgtggggcgcgttcaggacctggggcgccgtggcaaagcgctccagcagggcatcgccgtcggagcggcggtcgaaagcgagctgttcccagaagcgcggcgtgaagcacagcgagcgggacacatagggggtgcgcggcttcagccggtaggcgtaggagccggcatcctggcagtacatgacaagacctgcagggccgggggcgctgacgggccgcggcatggtttccaggcagctcggcgacatgatgcccaggcagaagtagccgggtccgcagctcgtgaggtccacggcgccttccacctcgaggtcgagcacggtcatcaggcaatcggggccgatgcccgccatccaggcgctgccgcggccgcgctccggcgcgagctgcgacacgatgccgctgcgccgggccaccggctccatccccagcgtctcaatttgggagaggaacaggtggtgcagtcccttgtctatgttcgccaacgcgctcgcgcccataatcgtgcccgtcgttttccgatccgtccagagttctttccgattcgtccataagttagccttacttaacacaaaggccttaacgtaaggtaaattaaccgactgaaactttcaagaagagaacggcgacgcgacggaaaagggacgggagcgccgccttaagcggaaaggtgcgcacaggtggaaggcacgatggacggaatcgagggcgccatgcccgagcccaggaaggcgccgcggccggcgtcggtatctcgggcgcgcgagggcgcctcgactcgcggggcgtcgggcggcctgatgatggcggcggccgagcacgaccgtcgccgcgtggacccgcgggtggcgctggcggtgctcgtgctgctcaacgtggccgtgttcgcatccggcgcgaaggccatcgagctggcggccgtggccggcgatgcggcgctcatgctgtggtgccgccgcggacgtttggcctgcgcgtggcttggcgcctacgccgccttatcgctcattgcgctggcctgcatcctgggcggtcccttcttcatgcccatgggctcgtgtctggtcatgctcgcgcggctgttccccacggccatgttcgcggccgcgctcatctccacgacctatttgggcgagctggcctgcgctctgcagtctttcgggctctcggggcgcatgaccgtggcggtgtgcgtgggcatgcgcttcttcccgaccatcgcccgggaggcgagggccgtgcgcgaggccatgctcacccggggccttcgcctgacgccggcggccatcctgcgccatccggccgggctgctggagaacttcatggtgccctacctgcaccgcgtgtccatcgtggccgacgagctgggggacgccgtcatggcccgcggcgtggaaacgacgcgccgacgcggctcctaccacgagctgcgcatcggggcgctggacgtcgtggtgctggtcgcggccgtggcgctggtcgcggcggcggtggcggggaaggtgctcccgtgagcgccgcgaccccatcggccgcaacggccgccatcgtcctcgagaatgtgtcctacacctaccccggcgcggagcggccggtgctgcgcggggtcttcctcgagattccgcggggccagtgcgtggtggtcaccggcgcctccggttgcggtaagaccacgctcacgcgcctcatcaacggcctggtgccccatgtctatgccggcgaggtgaagggccgcgtgatggtggagggaacggaggtggccgcctggactcccgacgagctgggcgtgcgcgtgggttcggtgttccagaacccccgcagccagttcgtgaacctggacgtggcctccgagatcgccttcggctgcgagaacctgggccttccccgcggcgagattgtggcgcgggtgtccaaggcggcccgggccttggggatcgccgatttgctcgatcgcggcatcgaggagctttccggcggccagaagcaggcggtggccatcgcctcggccttcgccatggagccggcggtgttcgtgctggacgagccgacggcctccctggacgtgccctccatgaagcgcctcgccgaggtggtggcggcgctgaaagcggcgggcaagaccgtcgtcgtgtccgagcaccgcctgtggtggctggcggacgtggccgatcgggtggtgctcatggaagatggcgccgttgccggcgactggacggccgccgacttcgcggcgctgccggccgcccgtcgcgccgcggccggcgtgcgggcctggacggtggcggagatggaaggggagggccgccccgctgcggcggtcccggccggcgcggtctcagccgatgcccccgcgcccgaagcgccccggctgcaggccgccggcctgaccgtggccttccgccgccggccgccggtactggacggcctcgacctctccctggagcccgggcgcgtgctcggcatcgtcggccgcaacggcgccggcaagaccacgctcttgcgctgcctggcggggcttacccgcgagcgcgcgggcaccgtggccgtggacggggcgcccgtggccgcccgacggcgcccgggcctcgtgcatctggtcatgcaggagccgggctaccagctgttcgccgacagcgcccgcgccgagctgcatcgggaaagcgacgaggccgccgacgcgatgctggccgctttcggcctcgccgcctgcgccgagcgccatcccttggccctttccggcggcgagcgccagcgcctggccgtggccgccggcctcgcccagggtgcccgggtgctcgtgctcgacgagcccacgagcggcctggaccgcgccaacatggagcgcgtcgccgcggttttgcgccgggccgccgccgacggcgtcgccgtggtcctcgtcacccacgactacgagttcctctgcgcggtctgcgacgaggcggccgaggtggaaggcggccgcattcaggcccgctaccccctcgacgacgccggcctcgcccgcgtgcgcgcccgcttcggcctctgaaccccccccctcaaattccgagcccttcggctctctgaacctcacggtaacccatccccaaaggaaaggattgaatctatggcaacgacaacggcaaagacgacgagcgcagcacccctggcagcctcggggcgcctcacggcgaaggacatcgtgcttctggccgtgttcggcgtggtcaccttcttcgtcatgatggcggtggccatggtgtgcagcttcagcaccgacatggcctggtggacccacgccatcggctccatcccggccggcatcgtgtggacctacctcatggcgcgggtgcccaagcgcggggcggccttcatcgccggcgccatcatggccctgctcggcttcgtcatgggcatggcctggacgggcccggtgggcatccttgccggcgcggccctctgcgagcttgtcatgatggccggccgccgcgcgaagtggacggtggtcgtgggctgggcggtgctcgtgctgtgctggtggttcgggcagatctcgctcatcctgttcgccggcgagtcctatgtgcagatggtggtggacatgggcatgacggccgagtacggccaggggctcgtgaactgggtgtacagccctgccttcccgatctgcggctgcgtgacggcgctgtgcgccgcgctcggcagctggctgggactgcgcatcttccagaagcacttcgcgaagatcgcggcctaaggggaagcgatggcgacggaacaggataagcggccccagggcggcaacgccgtgatgcagctgctgcaattcgccgggtcgcggcgctggctcgccttcgcgggctcggcgctggcggcggtcaacggcatccttacggtggtgccgctcgtgctcgtgtggttcgtgctgcgcgacttcgtggccgtagcgccccatttcgaggaggccaccgacgccacgctgtgggcgtggctcgccttcggggcggccgtgctaggggcgctgtgctacttcgccggcctcatgctcacccacacggccgccttccgcgtggccgccaacatgcgcaaggcgtgcctggcccatgtggcgaaggtgccgctcggctatttcgacgcgaacgcctcgggccgtctgcgccgcatcatcgacggctgcgccgggcagaccgaggacgtcatcgcccacaagatgcccgacttcatcgcttccattacggcaccggtggcctatctggtggccatgttcctgttcgactgggtcatgggactcgtgtgcctcatccccgtggcggtgtcgctgttcgccatgtggtggatgatgggccgcgacgtgcccgagggcggccgctacttcatgcaacgctaccaggaggccctaaaccgcatgtccacggcggccaccgagtacgtgcgcggcattcccgtggtgaaggtgttccagcagacggtgcactcgtttcgggccttccacgcggccatcgtcgactaccgcgacatggccaccaactacgtgaacttctgccgcctgccccaggtggtgcagctcacagccatcaacggcaccttcgtggtgctcgtgccggcggccattttgctggcggcgggcgcgggcgacttcggccgcttcctcaccgactttttgttctacgtcatcttctcggccttcaccaccacggtgatgagcaaggtgatgtactcctccgaggcgctcatgatggccgaggactccatgcgccgggtgaacgagattctggccgtggcgcccatggaagaggtcgccgaaggggccgcggcgcacccggcgggcactgaggtggcgcttgagaacgtgaccttcgcctaccccggctcggcgcgcccggccctgcgcgacgtgagcctcacggtgccggctggcgccacggtggcgctcgtcgggccctccggcggcggcaagagcacgctggcgagcttggtgccgcgcttttgggatccgcaggagggcgtggtcgcggtgggcggcgccgatgtgcggcgcattcccgctgccgagctcatggacactgtggccttcgtgttccaaaacgatcgcctgttcaagggcaccttggccgacaacatccgcatggggcgccccgatgccagcgacgaggacgtggccgcggcggcccgggcggcccagtgcgacgacatcatcgcgaagttccccgaggggcttgccacccgcgtgggcgcggacggcgtgtacctgtcgggcggggagtgccagcgcatcgcgctcgcccgcgccattttgaaggacgcgcccgtggtggtgctcgacgaggccacggccttcgccgaccccgagaacgaggccctcatccagcaggccctggggcgcctggccgccggcaagacggtgctcatgatcgcgcaccggctgtccacggtggtggacgccgacctcatcgccgtggtggacgacggcgccatcgtggagcgcggcacccacgacgagctgctggcccgcggcggcacctacgcgcgcctgtggaagaactactgccaggccgcccaatggaagatcgcgggagggagcgcccatgctgcgtgatcgtctggccctgaccgaggaaggcgcccgctcgctgcggaaaggcgcgctcgtctgcgccttggccaacctcgtgctcatgttccccgtcggggtgttctaccttgtgaccggcgagtttctggcccactgggaagacggggcggtgccgctgccgaccctttggccctacctggcgctcatcgcggtggtgctggcggcggtgttcgccacccagtattgggagtaccacgccacctacagcgtggtgtaccaggagagcgcccgcaagcgtatcggcctggccgagcggctgcgtgtgctgccgctgtcgtttttcggcaagcgcgatctggccgatctcaccacggtgatcatgaaggacgccgccgaccaggagcgcctgttcagccacaccatgccccaggccttcggcacgggcatctccacggtgatcgtcgccgtcatgctgctcgtcttcgactggcggctcgcctgcgcgtcgctgtggccggtgcccgtggctctgctgatcctgctggcgacgagccgcgcccaaacggcgaagacccggggcaagaacgccgccgccctggcgcttgccgacgacatccaggagtacttggaatcgaaccgcgaggtgcgcgccttgaaccgcgccgacgacttcttgggccgcctgaacgatgacgtggacgccttcgagcgggcgaagctggcctcagagctggtgacgggcacggcggtcgtctgcacccagacgctgctgcgcctgggcatcgtgaccaccatcctcgtcggcacggcgctcgtggccgccggccagtgcagcctgctcgtgttcttctgcttcatgctggtggtcacgcgtctgtacgaccccatcggcctcattctgcagtcggtggccgagctcatcgacatgacccagtcgctcgcccgcatgaaggccatcgagggcgagccggcgcagacgggggagcttaccttcaacccccagggtcacgacatcgtgttcgacgacgtgaccttcgcctacgacgacgggggtcccgtgctcagctccgtgagcttcacggcccgggaaggggaggtcactgccctggtggggccgtccggttccggcaagtccacggcggccaagctggcggcgcgcttctgggatgtgggcgagggcgcggtcaccgtgggcggcgtggacgtctccggcatcgacccggagacgctgctcaccgattacaccgaggtgttccaagacgtggtgctgttcaacggcaccgtgatggagaacatccgcctcgggcggcgcgacgccaccgacgaggaggtgctggcggcggcccgggcggccaactgcgacgagttcgtgcagaagatgccccagggctacgccacgcccatcggcgagaacggcgctctgctctccggcggcgagcgccaacgcatctccatcgcccgggccattctgaaagacgcccccatcgtgcttctggacgaggccacggcctcgctggacgtggagaacgagtcggcggtgcagcaggcgctctcccggttgctcgtgggcaagacggtgctcgtcatcgcccaccgcatgcgcacggtcatgggcgccgaccacgtggtggtcctcgccgagggccgcgtcgccgaagacggcactcccgccgaactgctcgcggccggcggcctgttcgcccgcatggcctccctccaaggccaagccgccgattggaagttgtaagacagggcgtatctgccttttccgttcaccctctgcggcatatctgcctctaacagcaagggcccgcggcggaagctgcgggcccttgggggtgaaggcgcccggcgataagtgggagggaggttatcgccgggcaggagtaagcgggatggctaggcgagggaggccacgtactcgccggtgaacttgccctgggtgacggcgaaggcgatggatacgccgcacagggccgtggtgtactgaatgccgaagcggctgcccgctgtgttgccagcggcgaacaggcccgggatggggcggaaggtctcgcgagcgagcacctggccgttctcgtcgatggccacgcccgaagtgttgcagagcatgccgcccaaggtcttctcgccggcataggcgtagtagggcggctggttcaccgcgaacatgagcgacttctccttaccgaagtcctcgtcgaggccggtggcgcacagctcgttgtagcgctcgatggacgccacgaagttgtccagggcctcgccctcgtagcccaaatatccgcccagggtctcgtagtcgttggcggcgtacacgacggggttggaatcggggccggagccttccgggccgcccgcgacggcagcctccaggatggcgggcaggccgtccatgccgccgttggggtagtcgatgcccatgtggcaggcgggctgggccttgatcagcgcctcgtagttgctgtcgaagacgttggcgatcttgcccgcaggctgcagggcgccggcgtaggccgcccattccatgaacccaaagccttcgttgcagtagcgcttgccgtcggcgttgatccacagcgacgcggcggagccgagcgggtctgcggggctgtcgcaggggtagtagtagtcgccgcccatggaggactggtaggggtcgagctggccgccggcccagtagcacagcttcaggccgtcgccctcatagcccgaggtgacgatctggccatcctcgccgatcatgttggtgatctgggagagcaactccttggccatctcggggttggcggagtagtcgccggcgcagacgatgacgcccttggcggcgttcacctgcacgtagctgccgtcctccttctgaccgacggcgccggtgacgcggccgtcgtcggcggtgagaaactggcgcgccgggcagccccagtagatttgggcgccggcatcaaggcccacctgcagcaagttggcgaggatcttctcctgcacgggcatcgtggaggctgtgccgatgtaggtgtccaggccgttcttgaaggtggtgtaggcctcatcggtggggtagaactggatctccagggcgtcgcgctcctcgtcggtcaggcaatcgatgtaccaatcgaaggcctcgccgcaggtggtggtgaacttgcgggccagcgagacgttagagcggttggcggcgcgcagctgccagttgttcagaaattcgatgggatccacgccgtcaacgccgcgctctttgaggaattcggagttgatgtggccgaagtgccccatgcccatgcaagggtggttgtcctcgggatgggcctccatggcgatgaccttcgccccgctctcggcggcggcgcggaaggcggagcagccggagaagctcagcccgatgacgagtacgtcgcactcggcggtctcggcgatgtcgccctcggcgatgggctcgggggccgtgcgccagctcgtggcggcggtgctggaagcggtacccgacgatgcggtgccggatgcggacgagcccgcgctctgcgacggggagcagccggcgaggccgacggcggcgagaccggccgcgccgaggccggcccccttcaggaagttgcggcgcgtgaagccctgggtgttttccatgtgattccctccttgggtgtgagacggtcgaggtgtcgatggttcgggcgcctcttgtgcttttcatcttcggggaacagacgctcgccgcccatactcgaaatcaggtaaagctctaacgaaaacggggtatttcctggtagaggccttggcgttttggagtaatcgggtagagtgtgggtgctgggacgacgccgatgaagaggagggacttcatgatccgtcaaagcgaggccgcccgcaccgcggctcagttcctatcgttcgggtcctttttcctatcatgccccttggggctgtgggactcatgcctgttcgcgcaaatatcgtttgaccgtgtccttgaggtcgccgtcgtggacggcctatgcgtcgcagggttcatggcgtccttggcgttggggctcggatccatggcccgcgggacggcgcgcgttcccaagccgctcgctgtggccggagccctggtctatggaatgggcctctgcctgtatgcggtgattcaaggggccgacgtgcctgtcagcgctttcggcgcggcagtgatgggggctgccatcggtgcgggtctcgccgttgtcgtggtgggttggtgtcgcctgctggcgcgcttcggcctgaggcgctcgttggtgggcctcggcatcgcctgtggggcagcggctttggcagggctcggcttcgagatggacgttctgccccagccgctcagcgctttcatggccttcgccctggcaggtgcggtagcgcctgcgatcgactcgcttcgcagctctgtcgaatcggaagagtcggtagttggggataatgcggtggaacaggatgccccggtggagcatctgtgggactcgatgcgcactatggtcttcaacccctgtctggggctgtgcctgttcctcttcgtcatgagcgcccgtggatttgtgttcatgggctacgagcacatcggagcctcctcggtgattgtggcggcggtactggccgtcgtgctagcccggttctggcccggcttctccctggcgacaatctaccgggtgctactgccggtagcagcggcgatcttcatcgtgctgagcagctttcccgtcggcaccatgtccttcagcttggggttcctcgtttctcacagcgtcatggcgactgtggcgcttctggccttggcgtcgctcgccgccgttgcgcgggccggcgagttctccccggtggtcgtgggggcggctctgtgcgccatgacgagtgtggcagtgctcgtaggttccaatctcgcccagctggttccccaagatgatacgatgggggcggtgctcctggtctgcgccatggcctatttcgtgtatatactcatctccccgcttgcagactactatcggatgttccgagaaacggatggcgctgaagacctcagggagagagcctcccgcgattcggctcaaccgctcgactacgatggggtgtgcgccgcacttgccgacaagcgcaatctgtcggcccgcgagcgcgagatcctgccctacatcgcccgcggccatcgccccgcctatgtggccgaccttctctgcatctccgagcacaccgtgcgcacccatctgcgcaacatgtaccgcaagctcggcatcaactcccgcgaggaactcatccagcttgtggaggaaacggccggcgcccatgaggcgtagtctggccgccgcgccttcgaccgctgccgaaaaaatggggcgggtctgcggcgggtctggcaccaggtcccgtctcggcctataatgagtcaattactcattgcggggagcgtgggttgaaacacttggtcgtcgtggcaccgacggccgcccgtccccgttagggcaccgagtggaagaaggagcgcagccgtggcctactatttcgatgaaccgtcccgcacattcaacgagtacctgctggttccgggccatacgccggccgattgcattccggcgcgcgtcagcctgaagaccccgctggtgaagtaccgcaagggcgaggaggagtgcccgctctcgctttccgtgccgatggtttccgccatcatggccgccgtgtccgacgacaagatggccgtggcgctcgccaccgagggcggtctgtcgttcatctacggcaaccaatccatcgaggacgaggccgccatggtggcccgcgtgaaggactacaaggccggcttcgtcacctccgacgcaaacctttcccccgacatgacgctcgagcaggtagtggctctgaaggagcagtacggccactccaccatgcccgtcaccgacgacggaagcgcccacggcaagctgctcggcatcgtgaccgagcgcgactaccgcctctcccgcatgtccatggacgagaaggtggccgacttcatgacgccgcgcgagaagctcgtggtggctccggatggcacctctctgaaggccgccaacgacatcatctgggatcacaagctgaactcgctgcccattgtggatgcggacgaccatctggtggcgctcgtgttccgcaaggactacgactcccacaagtccaatcccgacgagcttttggacgcccacaagcgctacatggtgggcgcgggcatcaactcccgcgactacgccgagcgtgtgccggcgcttgtcgaggccggcgccgacgtgctgtgcatcgatagctccgagggctattccgactggcagaagatgaccatcgaatgggtgcgcgagcactacggcaacgacgtgaagatcggcgcgggcaacgtggttgacgccgagggcttccgcttcctcgccgacgcgggcgccgactttgtgaagatcggcatcggcggcggttccatctgcatcacccgcgagaccaagggcatcggccgcggccaggccaccgcgaccattgaagtggcgaaggcccgcgacgagtacttccgcgagaccggcatctacgtgcccatctgctccgacggcggcatcgtgtacgatcatcacatctcgctcgcattggccatgggcgccgacttcgtcatgctgggccgctacttcgcccgcttcgacgagagcccttcggccaaggtcatggtgaacggcacctacatgaaggagtactggggcgaggggagtgcccgcgcccgcaactggggccgctacgatttgggcggcaagaagtcgctgtccttcgaagagggcgtcgattcgtacgtgccctacgccggcagcctgaaggacaacatggccatcaccctgctgaagctgaagagcaccatgtgcaactgcggtgcgctcaccattcccgagttccaagacaaggcgaagctcacgctggtgtccgccacttccatcgtagagggcggcgcccacgacgtgctgctgaaggacaaggctccctacgcgagcaacacccgctaaaccggccgggatcttgcgccgctgtatgctgtcgcgaggatggcgggggcggtgccgagggtcgcgtaaagaggccgtagcttccgaggcgagcttttcgaggttttcgacataatcgaccctatcgaggggctgcggtatattggcagtccctcgattttgtttgtaggcgataaaagatcaacactattcgatatgccaattgctgagataaaatgataagtgtcgaattccgaagaaaacttgccagattgacgcggcttcgaatgatcggcctgcgagcatcgcgccccggcgcccctaggcgctcaaagcggcgaagaggttttccatatcctgctcgtagatgctgtcgcgcaggtaaatgaagctgatgtcgtgaaagatgcccgcatcggagagggggataacgcgcagcgtgccctcttgcacctcccgctgcacggcggcctcgtagacgaaggaaatcccaagatcggcctggacgaatatcttgatgatatcgaggctttccacgacgaaatgatcggcgaaggaggcaggcgagagattgcgctgagcgagcgcgtggacaagcacgttgcggctgccgctgccctcctcgcgcagaatgagtcgttcgcccaagaggtcttccagggtgcgtggcgtacgcgggaagcgatgctcggctgcgcaaatgggcaccaagcgctcggacgagaaggggcgtgaggcatagcgggccttgtcgaagagcccttccacgaaggcgcaatcgatggttcccgcgtcgaggagctccatcaggtgctgggttccgcccgagcgcacggtgatttggatgtcgggtcgggcgcccagacagcgggcgaggggccgggccaccacgtactcgccggcggtcagcgtcatgccgatgcgcagcttgaccgtggcgccatgggccacctcctcgatgcgctcgtgcagtagcacgtcgtcgtgggccatggtcgctagcccgtcgcgcaggacacgccccgccggtgtcagctccagctttttgcgatggtaggtgaacagcttcgcgccgtactcgcgctccaggtacgtgatgtgctgggagacggccggctgggtgagcgccagctcctcagcggctcgggtgtagttcagagtgcggcacacggtgaggaatgtctttacgcgaaaatcctgcattgcgtctccttcgatgggtgcggtggttcctgggggctcgggtagcatatcaataaacttctctaatggctacataattatatataagttttcttttggtaagaaaccgcgcataataaagccatcctactcctgcggatcgttgcgttatatccggcgattcgtggtcgagacatttccggctccaaaggccccgacgaaaggtgctctatgcgcgacattatcaagaaagtacccatccccacagcgggcgtggccttgggcctggccgctttgggcaacttgcttcaaccctatgccgagatcgcccacattgcttgcggggcgttgtctctcttcttggtggctatgctcgtcgccaagctgatcatgttcccctccatgcttcgcgaggacatgaagaactccgttttcgcaagtgtttctgccacgttcttcatgacgctgatgcagctggccggatacttggctcccgtggctatcgtgccggctttcgggctgtggtgctcggcggtggcggggcatttcgtgctgatgacgtggtttaccctgtactatatccgccgcttcaagctcaccgaggtctttcctacgtacttcatttgctacgtgggcatcatcgtggcggctgtaacgtctcccgtcttcggcgccgaagccttcggccagggcattttctggttcggctttgcctgctacctcgtgctgctcgccgtggtgacgatgcgctacatcaagcatgagatccccgaaggcgctcgcccgctgttctgcatctatgctgctcctatgggtctgtcgctggtgggatatctgtcggttatgcctgatccgaacctggtgttcgtggccgtgctcatgggcctcggccagctgatgctcatcggcgtcgtcacccgggtgccgaagttcctcgccctgcagttctatccgagctacgcagccatgaccttccccttcgtcatctccgcgatggcgctcggcaagggcgtgcaggctctctacgctgccggctactccattccggcgctcccggtgatcgaggccctcatcgccgtggagacgctgttcgccgccgtgatggtcgcctacgtcttcgtgcacttcatgaagttcttcttcggtacgccgaaggcggccaaggccccgaagacgcgtcccgaggttcctgcggctctcactgtcgaggtcaccgaataacgcttgaacatctatcgcctcgccggcccgacgttctgctctggccaacgacggcccctcctctcctcagcgccccggtcctccactggggcgctctcctttttggagggaaatcccgccatattgtgctccatgggggatgagctttcagcttgcggtacgcctcggagcttgcgacgcgtctcggggcttgcggcccttatctctcgatggcgcggttgatgagggcgcgcagctcgtcgatgccgtcgcccttctccgacgacgtcaccaccatgggcacgccacccggcagcttgagcgccttcttgatggcggcgcgctgcttcatctgctgctgcttcgacagcttatccgctttggtcagcgcgatggcgaagggcagctcggcgtccatgagaaactgaaccatgttgcggtcgagcgccgagggctcgtggcggatgtcgatgagcgacaccacgagtgcgaagtcacgatcttgattgtagtagccctcgatgagctcactccaccggcccttttctgctttcgacactttcgcgtacccgtagccaggcagatccacgagatcgtggccgtccacatcgtagaagttgatggtggccgtcttgcccggcgtggacgacaccttcgccaggcccttgcggtacatgagcttgttgagcaacgacgacttacccacgttcgagcgtcccgcaaaggaaacctcgggacctgtggatgctggcagctgctccgaggtgccgtaagcggctttaaacgatgcgttgtggaagttcatgggtgctccttcgcggaggggatcgcggtatttcgctatcatggtacttgaattggacggtcgaagggcgaaggggcgcggaaatgacggcaaatcataggaaagatgcgctggaagtggcgcacatcacgggcgtgcagggcattcgcgccgccatggcgcgcttggccgatgaggaggccgacgtgccgctgcccggggacgtgaccgaggaggtgccgctggggcgtcgcacctgtgccgtgtgcgctgccgacaacgacggttcctgggagacctgctggaactgcggcgcttctctgcgccgggtgcgctaggggcggaacgtatagccgccgtctgtcccgtgaggggcgcggtcgagcgctggcgccccttttccaagagcgcatcatggctataatggggaaatcaactcgcggccgcggggaatgcgcgcggtcgaaagccacgttttcgagggagtgccatgaaagcctacaacccccatgagatcgagccccgtttgcagttggcctgggaagaggccgggctgtacacggtgccggagaattccgatgcgcccaagaagtatgtcctggagatgttcccgtatccctccggcgacatgcacatggggcatgcgagcaactacacctatggcgacgtggtggcccgctactccaagatgcagggcttcgacgtgctgcatcccatgggctgggacgccttcggcctgcccgcggagaacgccgccatcaagcatcacagccatccggccatctggacctacgagaacatcgagacccagaagaagagcttctcccgcatgggcttttcctacgactgggatcgcaaagtggtggcgtgcgatccggagtactaccgctggggccagtggatcttcctgaagttctgggagcgcggtctcgtggagcgtcgcaactcgccggtgaactggtgtccgagctgcggcaccgtgctcgccaacgagcaggtcatcgagggtcgctgctggcgatgcgactccgaggtggagaagcgcgacctcacccagtggtactacaagatcaccgactacgcccaggagctgctggacgacctggatcagctggaaggctggcccgagcgcgtgaagcagcagcaggccaactggatcggccgctccgagggcgccaacgtggacttcatcctgtgcgaccgcgacggcaacgcgccggccgagcccacggaagacgacatcatcaccgtgttcaccacccgcgccgacacgctgttcggctgcagcttcttcttgctggcgccggaaagcaagctgctccgcggcctcgtggaaggcaccgaatacgaggcgccggtcatggagctggttgaggcagccaagaaggtgaccgccgtccagcgcgctcagggcgaccatgagaagcacggcgcgttcaccggtcgctacgtggtgaaccccatcaatggcgagaaggtgcccgtgtgggtgggcgactacatcgtggccgactacggcaccggcgccgtcatggccgtgccctgcggcgaccagcgagatttcgagttcgcccgcaagtacgatctgcccatcatccccatcattctgcccgaggacgacccgctgtacccgcagctcaaggacgagcagggccgcgtggtgaccacggtggactggccggaggcctacgccgccgagggcgttctcgtgcaatccggtccctacacgggcatgaccggcggtaagcactccgagggcgaagcagccatcgtggccgcgctggaagagatgggtcgcggcaagcgcaccgtggagtttcgcctgcgcgactggcttatcagccgccagcgctactggggcaaccccatccccgctatccactgcgagaagtgcggcgtggtgcctgtgcccgaggaagatcttcccgtgcgcctgcccgaggacatcgatctggccgccggcgagacgctggccacccatgccgggttcgtgaacaccacctgcccggtttgcggcggcccggccaagcgcgagaccgacaccatggacaccttcacgtgctccagctggtactacatgcgctacaccgacccgcacaacgtgcacgcgcccttcaatccggaaaagactaacgcctggatgccggtcgatcagtacatcggcggcatcgagcacgccatcctgcacctgctctacagccgcttctttaccaaggtgctgcgcgactgcggcctgctcgacttcgacgagcccttcacgaacctgttgtgccagggcatggtgctcgacgcccacggcgatgtgatgagcaagtcgaagggcaacgtggtctcgccggaggagatgatcgccgaatacggcgccgacgccgtgcgcgcctacatcttgttcttggggccgcccgagaaggagaagctgtggaacgaggacggcctgccgggcatgtacaagttcctgaaccgtctgtggcgccaggtgcacgacttgtgcggcaaggccggcgacgagacgctgttcgcgcagaagccggctgacgaggcggccgtggccgcggcgaagaagctcattcgtgagcgccatcgcgtggtggagaaggtgtcggccgacatcgagcgcaacaacttcaacaccgccatcgccgccatcatggagctgtcgaacgccgccggcgagtacctgcgtgcgttcagccccgaggatcgcgccgcctgcgaagaccatcgcgcgctcgacgcggaagtggccgaggtactggtgaagctcgtggcgccgttcacgccccatctggccgacgagctgtggcgcgaggcgctgggccgcgagggcttcgtctacgaccagccgtggccggcatacgatcccgatcaggcccgcgccgacgaggtggagctggccgtgcaaatctgcggcaagatcaagggccgcgtgaccgtggccgccgacgctccggagcccgaggtgctcgccgccgcccgcgaggccgtggccgccgcccttgagggcaagacggtgaagaaggaagtctacgtccccgggcgtctggtgaacatcgtcgcggtgtagctgcaactcctcgtgggctgcgggagagcgaacccgctcgcagcccgctgggcgctttatcctgctgcgaacgccgttaaaggaaatagcggaaggaacgcacaaaagatagcctcatcccagcacgcttgctgctgacgtggggctatttctttaactaacggcgttctccgcagggcgcccagaggtctgcgggcgggtccgccctcccgcagcgagcgatgctagctgagcagttcgtccaaagctttgaagagcttgtcgatttcgacgggcttggtgaggtggccgttcatgccgctgcgcagggccttctggcgatcctcctcaaaggcgtccgcggtcatggcgaggatgggcacttgtgcgcgggtcggatcgttcaggcgacggatggccttggtggcctcatagccgttcatgaccggcatctgcacgtccatgagcaccagctggtagtgccccgacggtgcgtccatgatcttctccaccgcctcgcagccgttcacggcgtattccacggtgaagccctcgtcctctagaagggtgatggcgatctcgcggttgaggtcgttgtcgtccacgagcaggatgcggctgtggcgcagccggtggctcgggtcgacgtgctgggtcttggcctcttgggccgctgcggtcgcgccctcgcacgccagctgcaaggtcagctcaacggtgaacgaggtgcccttgccctgggtgctcttcacggaaatagtgccgtgcatcatgtccacgaggttcttcgtgatggacatgccgagcccggtgccctggatgccgctgatggtggaggtgcgctcgcgctcgaaggggtcgaagatgtgctcgacgaattcggggctcatgccaatacccgtgtccgacacggtgaagcggtagcgcccgtagccgactggcgcgccgggcagctcgtccagcgtcaccttgatgaatccgccgggattcgtgaacttcagggcgttgcccagcaagttcaagagaatctggttgatgcgcagcttgtcgcagcgcacctcggtgtggcggacgctctcggtattgatggagaagtacagttgccgcgcgctcgtctcggcctgaatgatgctgtagagatcgtccagaagatcgacgaggttgtagggctgctcatccagcgagaccttgccgctttcgatgtggctcatgtccagaatgtcgttgatgaggctcaagagatgcgtgctggaggacttgatcttgttcaggtactcctccactttctccggctgatcgaggcggctggcagccagagtggtgaagcccacgatggcgttcatgggcgtgcggatgtcgtgggacatgttcgagaggaaggcgctcttggcggcgttggccttgttggcctgggtcagtgcctcttccagcagggccttcttcttcatctcctcgcgagtttgcacgtcgacgctgcgcaggcccagcaccatgttgtgggcttggggccaatcgctgccgcgcacgacggtggcctggcagtactccgtaacgtcgccgtggttgatgcgatagttcacatggatacggctctcgtcggtcaggcgcgtgatgaggctttccgccgaaagcgcgtcgcgcagcatggcctggtcctcttccacgacagcttcattgatgtatccgccgaggcaactgtcgagattgagctcgccggcgaacagctcgtccaacttgcgaagcctgtcgccgctgacgcgcagggcctcgcccgctttggtgttcaggctgaaggagcatacgagcaggtagtcctcggaaagcgcctggatgagatcgcgctggcggcgctccttgcgcacttcttcctttttcttgtccgtgtaatcgagcaggtaacgctgcaagagcagctcgccatcgctttcgatgagcttcacgttgcccatgacgtgcacgatgtcgccgttgtcgtggcgcacgcggtactcggtgctcaccgagtcgccgacgttcttcagggtagcgattgattcgcgcatcttcccggcgtcctcgtcgacgaccgagggggccaccatgtcgaagccggcggccatgaggtcttccgccgaatcgtagcccaaaatgtccagggccgcctggttgatgccgagcaggcgcgtgccgtcgagcgaatgggtgatgacgccgcaatccatggtggtgaagatggtttccatggtgtggttcttctcgacgatctcgtcctcgtaggcgcgttcctgggtgacgtcgatgcccacgccgacggtgcccatgaccgagccgtcgatgttgtagaggggcgacttgtaggtggtgagcaggcgcgtgccatcgctggtctgcacggtctcctccgagacaatggtggacttggcggccatgacccggcgctccgattcaatgcaggcgggatcgtcggcttccacgtcccagatgtaggcgtgcccgcggccctgcacctgctctttggtcttgttcaccgtggcgcagaaggcgtcgttgaccttgtggtggatgccgtccttggacttgtaccatacaagcgacggaatagagttgatggtggcttccaaatactggctcgtctcccaggagtcggcgtagcgcttgcaggcgcgctgccaatggttgaagcgccaggatgcctcggcggcgctcaagggcgcgatccacaggtcggcgatgtcgttgaagtagggctcgacggcgggcacttggtcgtgggagacgatgagggtgaccgttgtggtggcctgccggtgagcggcgaagacgcgggcccaggcggtggcatcgtggcccgtggcatcggcgaaaatggcgctggcctgggcggtgagcgcctcttcgggctcatcgctgcgcgtgaaatggtgcgtaaagcttggctgcggctgcgcatcttcgataatgcgtgcgatctcgtcgggcaggcccacgagatagaaagtcaccgggcaatggtacatggcgcgcgtcctttggagttgctcaacgtgtcgttgccgtaacaacgaggaaacggtttctcaacttgtgtagtataccaactttatcagggatgacttcccgcaccactggacaagtttgaatttttgctatagtgtaccccgcttttccgatgctacgaaggaggtggcctgtggcccgcgacaacgcccgacccgtgccctggtggcgctggtgcgcttgcgtgctgctggccgtctgcgcgctggcggtgctcatcgtgggcgtggccaacgtggtcaccgtggtcacgacgcgcgatcgggtggttaccgtggaaggcgcggcgacggcgctggccggcgatgccgccgatgccgtggtggtgctgggggccagcgtgtacgccgacggcacgccgagcgatattttggccgatcggctggaagtggcctgcgacttgtacaagagcggtgcggcccgggccatcatcgtcagcggcgacaaccgcacctcccattacaacgagtccgacgccatgaaggcgtactgcgttgaattgggcgtgccgagcgaggacgtgtacgtagaccatgcgggcaacaccacctacgagtcgatgtggcgggcgcggcacgtgttcggggcggaccgcatcatcgtggccacccaggcctaccatctgtatcgcgccatgttcgctgccgattgtctgggcatgcaggcgtggggcgtgccctgcgacaagggggcctacgataaccagcgggcctacagcatccgcgaggtgctcgcccgcacgaaggacttctacgcggcgcttttgcgcctgcccgtggacacggccggcgaggcggtatcgctgaacgattccggagatctgacgtgagggggcgcttgtgcagacgctaggcaccgagctggatcgaaccattgccggttggggtcctgaagccgccgcagctctcaagcgctcgcggaacaaggatcgcttccgcgccgccgtggagcgcacgtggcgtttgcgcccggatgtggggcggttcgtcctcatgcacaccaacggcatctacatcgccaaggacgagcgcccccgcaaagggcccgaccgccataaggactggtgggtcttcggcatgtatctggacgacgccatggcgcgcaccgaggtggacgcctggcagtcggtactgctcatgaatctggagcaagagggcttcgccgtcaacgagctgcgcttcttccctgcgaaatgggatatgcgccagcggcggctgtttccggaattgtgggaggaaggggagaacgcccgcgttcccggcaaccgtgacgggctcaagtaccaggacgaggcgcgggccttggatatcgtgaagcgggccgtgttcctcgtcttcgaggacaccgagctggcctgggcccttctcgagaaggttcgcggtgcctcggtgcgggagatgttcgccgcggggccaaccggcgagacggcggctcgggatggcaagcgacagggggagaagcgctaccggctgcttctttacgtggacgacgtggcgcagacaaagccgatcgtggaggcgtactccgaggccattcggtcgcgcgcccgcctgctgggcttgcgtctcggctccatttgggtgcggaaggctccgccgctgctggccggcaagcacgcgtttaagcgcacgggagcgtcggagccgctgcgcgacgaggtgctgcggggcggttcagccgaatagcttcaaggcgacggtgtcgtcgaggacgattttcagttcgcggccattcggtagcgcgtaggtatagtagagcggcgcctctggacggctgaacacgcggctcagcggcacgtcggcggcgcagtagatgcggcggcagcgggccgagacgcgatcttgggtggcgaacagcaacggatcctcgtagcggtcgcagccctggctgaagaagtagttgtgggcgtcgtcccacccgaagtgctggatgatgagccgatgcaggtcggcaagggtctcgtcggcgctcatgaaggcgctgcactgcggggaggagtcgtccgccggcccgataacgagggtgagcgcagcattcgaaaagaccccctcgcacggggtcgcttcgggcgcgcgccaccattggccgggaaattcgatgatcttggcggtcacgactcgagcctttctcgtcctcctcatgacgggggcattgtaacaggagttttccctaagggaaatcaaatggttgaaattggccgaaaaagtagcttcaagcagggataaggtgtctatttacattaagtaaataagtcaggaattcaagggatttggtgagtctttcgccggggcgcccggtcttgcgggagcccggtattatcatcgcagcagcgtctctcctcgttgatgagagattaatggccgcagctgcgctgcgatgaccaaaatgagtggttgcccgacggcgcggagccggtcgaggcgttttgcacgcggcattgtcggttgcgcgggcgggaaggtggggcatggcccagcagaaggggagaacgagcaaggcggacgccacccggcgccaattgctggatgcggcgatcgaggtcatttccgaacgcggctacgccgacacgacggtggagcgcatcgtggaggtggcgggcgtttcgaagggcgtggcctactaccacttctccagcaaggccgatatcgccacctgcatcctcgtggagggcattggcgagatcgtcgacgactttgtggctatcgccggtaaggctccttcggccgtggaagcccttacggccatgatggattctttcgccgcgactattttccgcaacgccggattcgggcgcatcctcgtgtcggagttgtggcggcgcgggcgcgaatggtccgagccgatgcgcgctttggaggagcgcctgctggcggtgctgcgcgggcagatcgagcgcgggcagcgcgagggcagcattcgcggcgatatcgatgcggcgttcgaggcggtggccgtggtgggcatggtgctcacgacgacgctgcactacatccgcgaggccgaacagcgcgccgaggaaggctgcaactgcgccgaggcgtttgcggcggcggagcgctcgcttaccgcgcgcatttgcgactacgtgcaccacgccaacgcgtagggggccggggcttctgccgtccttgcgccgccacccgcgtgcgccgccgtccttgcgcgccgccgcacgaaaccgctttttctccgtcagcgcaactgttgctttagcgcgctaaagttcgcggtatgctggggatgcctactgaaaggagcttttcgtgtacaagatctactgcctgaacaacatctctcctgagggcctggccctgctcaccgacaactacgaggtcaccgagaatatcgacgaggccgacgccatcctcgtgcgctccgccgacatgcacgagatggaagtgcccgcgaacctgaaggccgtggcccgcgccggcgctggcgtgaacaacatcccgctggacaagttcgccgaggccggcatcgccgtcttcaacacgccgggcgccaacgccaacgccgtgaaggagctcgtgctggccggcatgctgctggcgagccgcgacatcatcggcggcgtggcgtgggtgcgcgacaacgccgacgacgagaacgtgggcaaggccgccgagaaggccaagaagcagttcgcgggcggcgagattctgggcaagaccttgggcgtcattggcctgggtgccatcggcaagctggtggcgcagtccgccgaggcgctgggcatgaaggtcatcggctacgatccggccatggacgagatcaccgtgcacgagcagatttccccgacggtggagttcgccgacctgccgaaggtgctcaaggagagcgacttcatcaccatccacgtgccggcgctgcccgccaccaagggtatgatcaacgccgacgccatcgctcagatgaaggacggcgtcgtgttcctgaacttctcccgcgacgtgctggtcgatgatgccgccatggccgaggccctggcatccggcaaggtggccgcgtacgtgaccgacttcgccaacccggccgtcgtgaagatggagcgcgccatcgtcatcccgcatctgggcgcctccaccgccgaggccgaggacaactgcgccaagatggccgtcgaggaagtcatggcctacctcgagcgcggcgaaaagatccactgcgtgaatatgtagcaactcggtaatgcgggtggcgaaggagaacgccctctcgtcgcctccccctcgcccttgcgggctggcgcggccgagcgattcttgtgcgacgccccgctatcgctgtccattgaggctgcttgttttgcgcgatgcctcgcaaaccccttcattttggctatcggcgctatggtttagccaaaagtggtgggtttgcgaggctcgttgctttctgataagccaaaagttggaggtttgcgcgggtttttcgtcttgccgacctcgcaaactcctctgttctggcttcaatgtttctctcgcatccaaagctgaggggtttgcgtgtcgagggggggcagcgctcgttgctcccgtgcgttaggaatacgttggcattttagatttatgggtgtagaagtagctcgatgcggaaagtctagaattgtgccaaaacggttagtttgatttgtcgaatagctctatgagagactcagtgtattggtagagatttttatttgcgatcagctcattgctgttggattccatgttgctgcgcttcttctccaaagttttttccgcctctacgagcttgtcggttgcttgttggatgcgcttttccagttcggctgagtttttgtctttgatgctttgcatgaccgcgaatacgataattcctccaatgagagcagctccaatggcgaatggaacggcgcgagttggctggttcatgttgatatacaccgcaacaaagaacacgatagtcccgctgactaccgatagggcataatccatcgaagatttcttgcgataatctgcacgaataagcttcattctgtcggccgacagttcgtttgttcttgactgaagaattttctcctgcttctcgagtgcggttgctagggcttctgcttgattgctgtcggtttctatggtgatgagggcttcttctcgaaccctttcgatccccctttttgtttttagcaggtattcggtatcagtggatgtttgcgcaagcgtaatcatgtggtcgatactagtttttaccaggtgacacggagtgcttttgtcggacaaaggagagaaagaggttgccgatagagcttcgtcaatttgcagctcacaaagcaactgccagccccggaagtccatgggatgcttgtcagcgaattcctgggccagagtaagtgctcgatctttctctccgagatgcataaagtctttgacccgccgatactgttcttcggtgcccgcgatgccagcgacttgcacatgcccttgtgcgtctaccgcaaattggttttgtcgttccggcacatcgacgatgacgtaatcgcagaaaggacaaaagcctttcttggtggtctcgtcaaaggagtcaatacggccgtggcagttcgggcattcgaggggtttgagcgacatgagaggacctttcgtgaaagattgagcgataggactaactgcgagattttgaatttgagggtgcactgggtaagggcatgagagcctgtcaatctgcacgagttcggtcatgttgcggcggtcttttcagaggctgcagcgctactttgcttcgccatggatcgctcctatctcggagttccgcattctgggcagaatttcatgtcgacacccagagatttgccgcaagtgcgacacgtagagcctagaggccttccgcactccggacagaacttgctttgctggggaagggggtggccgcagcttgtacacgtagcggcaacggcaagaggagaatcggaaggaggtgtctgggtggccgcgctagaaggcttttccgatgcggagttcgagtcgaaggcgcagggcttgtttgaaaaggatgctctatcgagaagcggttgcgcctcttttgcgatcatggccccgaaagaaagggccagaggcatttgcgatatggcatttccgatattgtcttgggtgcctgggttgcccgcgtaagtaagggcgatgtcccgaatttgctcgtcgacccagttgtaactgagctcgctgaattcgagttttttctctcgcaccgctttcagcttcgagaaatcgtcctcattggttccaatgctgccgatatagaaattggtaacctccgctccataatccattaattcagaggttaaagattcccgcaccgcttgagatagctcgtcttgatgcactgaaagggcgaaataaccgaaggacatggcaagttcatagagatgccgtcggactctcatagcgacgagatctttgaaatagcgggcaaatctctcgttggagagggttgcgtcggttcccacaagcctaacgagaagtttgcgagagtcgatcaccttgaacccgaaagtgcctgaagcgccgagcgtgatctttaaaccatactcgggctctataacgtcaatattgccaacgccccagcttgaatcgagggtggtggtgcggttgatgaagtagacttcgcaatggaagggcgacactccatcgaaggggaggttcaccagtttccccagaagggggatgttttgggtggtcagcgtgtgacgaccggcgcggaacagatcgagagcttgaccatcgcgaaagagcacggcttcttgagattcgtgcgctataagttgggataaggtgttgaaatcctcggaaggatggcgaaacaccattgtgctgccatcgttttcgaatttgataacgtcagcaattctcacatctctcacctcgctgtgtcggcgtgcgttatgcgtctcgaatgcgcaggggtgaatgctgcagaggggcaacgttagaagaagagcatccgcctcagttaccacactgcaagaacgtctatacgaaaataaacgactcgaaatggcagatgctcttctgccagtcgtttggaaactcgtatagtcgtcccctgggggattcttgcaatgtggtgagtcgcattctatcagatgcctaagtcagggatgttgagaagggcgcaaaagggtctggcgccaggagtgtctttaacaaaacggcatctatcgaaatggctactatatttacgcttaaatttacgctaaaatctcttataagatatacgcatcatttgctgacagagataggagctgcgatgacagcattgacggctacagcggcggaggctcgcaccaacttttctcgcattgcgtctgccgtgagcgcgacgggtgagcgcgtgacggtgttcaagaactccaaaccgtgggtggtgatcgctcccgccgatgaggcggacgcggactatcttgagttggtccgcagtggtattttggaaggacgcgagcagatcgccgctggtctcggaatcgaaggtacggacgctcttcgcgcggctgtcgccgaaataagggctcagcatgactaaaatgatctactcgcagcgatttgctcaggagcttgcccgggtaacctcggcacgagtcgagcagaagatttacgatacgctgggaatcatcgaagcctgtcccgctatcggctcttgcaatattcccaagatgatacaagccgaatttggcgatagtgtcttaaagatggtcgttgatcctttcgatatcttctacgaatacttcgaacttctcgataccgtatatgtgtacacccttgttttccagaggcaagctcgttgatcttcgacgcgtgggatgaggcataagcttcatgtgggcatcttgtcggaagcgatgaccaatctgcatgtacctggagcgacacccgtgatgcagccacatggactttttagtgcgggggtcatttataataggcggaaaacttcttggaaggagagggcgatgagtgtggagcggccttgcgtattggtgggagtgaccgggtgcattgcggcctacaaggccggggaaatcgtgcgcgggctgcagaaggcgggcgtgcgggtgaaggtggtcatgaccgagcacggcacgcacttcgttgatcccgtgaccttccgggcgcttacccacgagaaggtggcggtggatctgttcgatgacccgtccgatcccattcaccacatttcgctcgctcaggaatgcgacgtgttccttatcgcgccgtgcacggccaacgtaatggcgaaggtggcctgcggcatagccgacgacttgctttccacgacggccctggcgaccacggcgacgttggccatcgcgccggcggccaacgtgcatatgtacgaggcggcggccacccaggagaacatggccacgctgcgccgtcgcggcgtgcgcttcatcgaaggggatgcgggctatctggcctgcggcgatgtggggcgcggacgtctggccgaccccgataacatcgtgcgcgagacgctggctctgctggccgagcgcgtgggtctggacgccttgcgcctggcctgcgagcagcacggcgaggtgccgttcgcaaccgtgatagagcagatcaacgccgcctcgtcgcgccgccccgaacacagcgccgaacccgttcccgccctgtgtcatcctgagcggagcgccgaaggcgcggagtcgaaggatctcccgacctgcgctgccgtcactgccaccgctgcctccgcacccgacaccccgctgcccggcgccgtggccgacggcgcggccaccatgcccgcgggcgcgctcgcgggccgcacggtgctcgtgacggctggccctacggtggaacccatcgactcggtgcgctacatttctaattactcctcgggcaagatgggctatgccatcgccggggccgctgcagctgccggcgcgcgggtggtgctcgtgtcgggcccggtggccctcgccgcacctgatggcgtggaagtggtgcccgtgaagacggcccgcgacatgctggccgccgcttcttcggtgttcccggccgccgatgccgccatcttcgccgccgctgtggccgacctgcgcccggcgaacccggccgaccgcaagctcaagaagggccgcgacgatgcagcgctcgccagcgtgcccctcacggagaaccccgacatcttggccaccttggccgcgggcaagcgccccgaccagtacgtggtgggcttcgccgccgagactgacgacgtgctcatgaacgcccatgccaagctcaagaagaagaatgccgacatgattgtggccaaccaggtgggcgacggcctcgccttcggcaccgacaacaacgaggtgtggctcgtcacggaaggcgacgacgtgcttttgcccctcatgagcaagcgcgccgtggccgagcgcctcatggaagtggtggccgcgcatttggactaaccccccttacgcttccgtaagtcactgcgatttttcccgaaagcgtcccttgcgcgggggcgctttcgctattatggtgccaaacgagaaaggcgccggccgtgctggtgagcgcttcgggcgcacaggcacgtcggcgggaaggggcatcatgcgggttctattggttgaggacgaccatgccatcgtgcgggcgctgaccgatcttctggaaggcgagggctttaccgtgcgctcctgcgcgactcaggacggggcctgtgcggcgctggcggccgaggacttcgacatcgccctgctcgatgtgacgctggcccagggcaacgggttcgccgtgtgcgccgcggcccgggaggcggcccccgagatgccggtcatcttcctcaccgcctccgacgacgagtactccacggtggcgggcctcgacatgggggccgtcgactacatcgccaagcccttccgcgcccgcgagctggtctcgcgcatccgcggggcgctgcggcgcacgacgccggcggccaacgtgctcacggttggggacgtgcgactcgatgtggcctcggcggcggtgaccaaagccggccgcgaggtgttcctgtcggcgctggagtaccggcttttgctgtacttcttccagcatgcgggcaagctcgtcacccgcgagaacctgcgcgacgccatctgggacagcgccggggagtacgtgtcggacaacgcgctgaatgtctacgtgaagcggctgcgcgagaaggtggagaccgacccggccgcgcccgagctcatcgtcaccgtgcgcggcctcggctacaaggtgggggagtaggccgtgggctccgcttcgacgctgctgcgccagtgcgccgtcatggttgggctggtggccgtgctcgcatgggcggcgccggaggcggcgaagggatgggtcgtcggcacgggcgcggtgctgttggcggtgttcgtcgccgtgtcgctgcaccgccaccgccagattcgccggcttgccgaggagatcgacgaggtgctgcactccgggcgcacggtggacttctcgaactgccacgaaggcgacgtggccgtgctggccaacgagctgtcgaagatggtgtcgcgcctttcgcgcacccgcgaccaactgtcccgcgaacgcaacgccctggccgactccctggccgacgtgtcccatcagattcgcacgccgctcacggccattaccctcatgctgcccgtggtggagcgcgccgacgacgcccgcgagcgcaagcgggccgtgcgcgagctggagtcgatgatcgagcgcgtctcgtggctcgtgaccacgctgctgaagatcgcgaaggtggacgccggcgccatgcacgtggagcggcgcgaggtgagcgccgccgacgtggcgcgccgggccgtggcgcctctggccacggccatggacctgcgcgacgtgaacctcgtgctggagctggacgaggtcgccagcttccaaggcgacgccccctggaccgccgaggccgtggagaacatcgcgaagaactgcatggagcacacccctcccggcggcacggtgacggtggccgtgcgggaggacgccctcgccaccaccatcgccgtctccgacaccggctccggcatcgccccggaggacctcccccacatcttcgagcgcttctaccgaggaggccagggggccgaaacaaccgatggggcgcaggttgatcccgtagggggcgaccttggtcgcccctgggccagcgacgacggcagcgacgtgcgccaggccgccggcttcggcatcgggctctccctggcccaggccctcgtttcggcccagggcggcaccctgcgcgcctccaacaaccccgccggcggcgcccacttcgaaatagccttccccaaactcgtggtgtagcgtgggcaacgccccccgctgtccttgttgtccttgtacccgttgtctttaaggcttcttaattgatgtgctattcggtcgtaatgggggaggagcgactgggggctcttgtagaatgatggcaaccaattgagagagattctacggtcaaggctcaggaagccatgatggccggtgatgcggaaacggcacagtctctctcgacccgggcccaggaagccggtgcgcgcctcgctgtggccggtgaggagctaaaggccactccgagtagctccaggccatgcccgagcaagcgtcggctctgtaggaagccccgccgacgagggcaaccagaggctgctgcgcatcggcgacaacatcaaagcgctcgtcgagctcgagaacctgctgctcatcaacttggacgatacgggcgatgtgcgcctgggagacgtggtcgatcttgtcgacgagttcgccaccgacgtcgtgtccagcaagctcaccatcgacgacgattcgggcgacgcccaggcctacttggaggagctgcaccgcggcaagcacggggcactgccggcgcatatttaaagcggagtgcgggacaacgcagaacaacgggaaggcagcctgatgttccgcatcccgtggttgacaaactcagttttattcgatatcttgaacataaaatttgtttatatagtgattcgaggtcgctatgaagttgctatctctctcttttgaccatgtgaacctgttcgaagatggagccttcggaatcgatttctttgctggtgacaaggtgcccgcaggggatgagtcagtcaccctcttggaaaagccgctctatatcaacaatgtcgtagctttggctggcataaatgcttctggtaaaacaactgcgcttcgactcatcactcttgcgctcgccattattcaaggggggattgccgtgcttcctcccttcgcggcaggcgttgaagatctttttgctgctcctccttgcatgaaggctgtcctgtgggagggaggggagatacttgttctcgaatgcacattggcctatcaaaataccaccataaccgcctctctcaatcgctctttctcctttgtcgaagaggttctctaccgattcagaggcgttcccacgaaatcgcttcttatccaaggtgcggacagccttatcgcgcgttcggaagaggtaatgcgtcgtagcacgctcgacgaaacaagccgacagtttctcgctgacaacgtcagcatcatgacctctcgtaaggattccttgtgctatggatgccatgtggcaggagatgcgccgctgcctcccagcgatagcctatccgatgccgtcgacatcttgcgagcgttcgatccggaaatcgagtatctcaatactctggaagatggtaaccttttcgaactgaaattcagtcgagacaaaacaccttctaccctctctcgcgtagagctggagcgagcgctttcttcgggaacgttgaggggactcagcattgttcagtcggctgtgtttgcgttggcctttgggggctacttcttgttggacgagattgaaaaccatctgaataagcagcttgtgaacgttattatcgacctgttcgttcacgaagacacaaatccccatggggccgtgcttgttttcacgacccattatccagagattctcgattctgttcaccgcaaggattgcgtctattttctcacgcatgaagctgacggccgtaccggcattgtgaagtatagcgatcgaatcaagcgtatcgagaacaaaaagagtgaggtattcctttcgaactacatcaaaggtactgcgccacgctttaccgatgtggttgcccttaaggcctttgccaaatcggtgattgaaggcgcccgtcatgagtagcttggctttgccggaggaggcacacctgctgttcgtgtgcgaaggaacgttcgagcagtatcttatctcagagttgttgcaggcgggcaagctcattgttgacgcgagttcggttgtggacataactcgcactcgcggtgcctcgcagattcagtcgcagtatctgaacttcgactacgattggcccgttgccattactcgcgtgctcgactctcgacgagagaacttctcattgggtcggctttatcgtgatcgctatccagttcttaatttctatacgcatcctgaaattgaaatgcttatcattgttagcgagggtatgttttcgagctatacccagagctttaaatccgctatgaggctaagcgaatactgcatgcagaaactgaagcttggtaacgtgaagtcgcgagattttctggagcaatattggagcattgatgctctctgcaaagccatacgcgactatgcttcgcttgctcatgcacggaaaggagaatttgttctcgcagatcttcttcgctagcaggggtttgtctcttacgttggggagcaggttatcgtcgagcgctagctagttgttgccagagcttgcatcaaagtctctttcatgagaaggacagattatgaccacgactacgaccacgaccacgatacccattcgtatcgaagcactcgcctttcttgccattgccttgtgcatgtgcggcctatcgctctttggcacctatgccacgtttctcgctggagatcctactgttgaagtgtggcctttttcgttggctcttgctgcggtgagtggaatcgcggccttaattgctccacgcttgggcctgctttctcgccatcggtggcttgctcctgcggcggtgggcatgctattcgtcggcgcgcttctggttctcggagcggacgaactttccgctgtatctttcatgctgggagcggtgggtgattattgcgggccgattgccacagcgttccacgcttagctgccacaccgtaccgcgcagggctgccacgtgctaacgggggcaccggggcatccggcgcccccgtcttcactggcctttctagccgatgcgcttgcgcatcggctcgtcgccctcgatatggatcacatctgacctgtacacgatcctgtcaatcacggcatccgcaattgcgccctctcccaactttgcgtgccacccggctggcgagaactgggagcagatgatcaaggagccggtcctgagccttgactcgactatctcgagcagctctcgggcctggtcgcccccgatcttctccagcagccaatcgtctactatcagcacatcgcacttcgtgtagcgcttcttcgatttgagccattcctcgtccttggatacggtgagctcgtcgagcatctcgggcatgcgcgcgtagcgcaccgagtagaacgcgttgcaggccgcgacgcccagagcgcaggcgagccacgactttcccgcgcccgagg

SEQ ID NO: 10535 - DNA, 3705 bp, Unknown
  gut microbiota DNA sequence
gccggtgcatcgccgcatcctgtacgccatgaacgagtccggctacacgccgaacaagccgcacatgaagtcggcccgcaccgtcggcgacgtgatcggcaagtaccatccccatggcgactccgccgtgtacggcaccatggtgcgcctggcccagcccttcagcctgcgcctgcctctcatcgacggccacggcaacttcggctccatcgacggcgactccgccgctgccatgcgttacaccgaggcgcgcctcgacaagccggctatggagcttctgcgtgacctggacaaggagacggtcgacttccagcccaactacgacgagtcgctgcaggagcctacggtgctgccgtcgcgtttcccgaacctgctggtcaacggctcgaacggcatcgccgtcggcatggccaccaacatcccgccccacaacctgggcgaggccatcgacgccacctgcctcatgatcgacaacccggactgcaccacggaagacctgctcaccgccatgcccggccccgacttccccacgggcggcctcatcatgggtaagaagggcattttggacgcctacgagaccggccacggcaacctcaccatccgcgcgaaatgcgagatcgaggaaaagaagaacggccgcgcctccattgtggtgaaggaaattccctaccaggtgaaccgcaagcgtctgctggaaaagctcggcgagctggtgcgcgacaagaagctgcctgaaatcagcaatatccacgacgccgccgaccgcaagggcatcgacatcatcatcgatctgaagtccaacgccatcccgcaggtggtgctgaacaagctgttcaagcacacccagctgcaggtgggcttcggctgcaatatgctggccctggtgaacggcaccccgcgcgtgctctcgctgaaggaaattctcttctactatatcgagcaccagaaagatgtcgtcacccgccgcacccgctacgagctggccaaggccgaggagcgcgagcacatcctcgaaggctatatcattgcgctcgataacatcgacgaggtcatccacatcatccgctcctccgagacggacaaggaagccgccgcgcgcctcaccgagcgcttcggtctttccgagaagcagaccaacgccatcctggaaatgcgcctgcgccgcctgaccggtctggagcgcaccaagatcgaggaagagctggccgagctgcgcgagaagatcgcctactacaagcagatccttgccgacgagaacctgttgaagcaggtcatcaaggaagagctgcaggagatcaagaagaagtacaacaccccgcgccgcacccgcctgaccggcgaggccaaggatatcgaggtggaggacctcatcgccgaagagaacatggtcgtcaccatgaccaaggccggctatatcaagcgcctgcccgtgagcacctaccgccagcagaagcgcggcggcaagggcatgcaaggcgtgaacttgaaggacgccgacttcgtggagcacctgtttgtggcttccacgcactcctacatgctgttcttctccaccaagggcaaggtctaccgcctgaaggtgtacgagatccccgaggccggccgccatgcccgcggtaccgccatcgtgaacctgctgccgctggagaagggcgagtccatctcggccgttatcgccacgaaggacttcccggccgaggagttcctcatgttcgccacggctcagggtaacgtgaagaagacctccatggatcagtacgaccgcacgcgccgcgacggcctcatcgccatcaacctgaaggacggcgacgagctcatctccgtgaagcgcgtggccaagggcgagaaggtcatcatggtgtccagcgccggcaaggccattttatgggatgagtcggaggcccgcgccatgggccgcggcaccatgggcgtgcgcggcatgaacgtgccggccgacgctcacgtgctcggcatggaaatcgccaagcccggcactgacctgttcgtcatcaccgaaaagggctacggcaagcgcacgaagatcgaggaataccccgagcatcatcgcggcggccagggcgtctacaccattacgatgacccacaagaagggcctgctgtcggtcatgaagatcgtcggccccgatgacgagatcatgattgtctccgaggacggcgtcattgtgcgcaccccggtgaagggcatctccgagctcggccgttccacccagggcgtgaaggtgatgaacgtcgccgacaaggacaaggtgtgcgcggtggctatcgcctccaccggcaagaagaaggccaagaaggccgcacccgccgatgagaaccagatgggtctgctcgaggaggagagcgaggaaggcactctcgccatcgacgacctcgacgacgatctgggcgacgagggagaagagacggaagagtagcaaaacgttagaaaatgtgctatagtagaaacaccagcaaagcccgtcgtttggttaacggttgagcgggcggagcgggttaacaacttgagggactagttgctgctagtccctcttgtctatcctctccatccgttggtgcttatactcccgccacagtgatagcaaagctgtcaccacgttggccatggcggccaaagcaatcaggaattcattcataggcgaaacctcctttgtagtaggccccgcccgcacacggactttgctggttcagttatattatcacagatgaaagaaaactaaagctgttcgatatctccgaaatcctcgggggatatagggtcgaggaatgtcttgaacgccgccagttcctcttccgtctgcttctcacccttgaagagaaacgggaacgaagaagcgtcaagtaccgtctcttcaatatggagcggcgcatcttgccgaagcgccagggcaatggcgtcgctcggccgggcgtctaaggtgatgagtcgtcctccctgggaaagaaccaggtgcgcgaagaacatctgccccttcgatccgtaaatcaccatggaatcgacgcgcgcatccaagttggtgagcgcatccagcatgagatcatgggtcatgggccgcgcgaacttcacatgctccagtgccatcccgatttgtgccgcctcggtggggccaatccaaatgggcacaatgcgcgccttccccgctggtgtctcctctacgggttgcagcaccagcacggacggctggttctgccccgccaccaccaatgtcaacactttcaacggaaccatgctttgtcctttactctagttcgatgagaacatgattgcagattgagctttctatgtttgatgtctattgtctcattattgaaccaagcttatttaaacttctggaatgtttaaccgcttaagcccatcttccggtgacaaaaacattgagtccaggacgcgaaaagcgacttatacaggcatttccgaaataaaacaaggagtaggtttgcctgtataagtcaaaattcttgcatcctggagtttcgaatgtctgtataagtcgcttttcgcacatcgaaagggaggatactgtcacggaaggtgaaattcatattctgattaaagggatactactcgtgccgttcgcggcgtgtcgtgtacgttttggaaatcgggaaaattttccttgacctcacctatgaaacaggcttaagatagtcaagcactttttcaagggcccgtagctcagttggttag

SEQ ID NO: 10536 - DNA, 5036 bp, Unknown
  gut microbiota DNA sequence
cgcgggcgcgctcgatgagggccagatcggctccgtcgtcggcggagaagcggccctggcggcgcaggtagggctcgatgggtttgaactgcttggggtcgcggttcaggcggaacgcgccgccgggcgtgcccgtgagcgcggggccctcgtactcggcgaggtaccacaagcccgtatccacaatctccttcgccacgtccaccatgtcggccgaggggaagccccagcccacggggcagggcgccatcacgtggatgaagcgggtgccgcgcacgtcgcgcgcccgctccaccttcttggtgaagtcgttcagataccccaccgaggccgtggccgcgtaggggatacggtgagccgccacgatgtcgaacaggctcttcttctgcgtgagacagccgtgctcatgctttccggccggcgtggtcgtggtggaggcgccgaagggggtgaggctcgacttctggatgcccgtgttcatgtaggcctcgttgtcgtagcagatgtagagcacgtcgtcgttgcggtcgatggcgccggagagcgcctgcaggccgatgtccgccgtgccgccgtcgccggcgaaacccaccacggtgacgtcctcgggcgccgccccctgggcgcgcaggcccgcctcgatgcccgagagcaccgccgccgtggccgcaaagggcgtgatcatcgcgttgttgccgaaggccaactgagggaagttgaagccggtggcgctcatgcagccggcgggcagcgccgccaccgcatgggggccgagcaccttgagcgcctggcgcacggccagggcgcctccgcagccggggcacgccttgtgcccgtagaagaactcctcgtcggtaatggtgcgcgcgttcaccgtcatcgctggtcctcctctccctcttcgatgccgaggaagacgacctcgcccgaggcgccctcccccgctgccagcgcttccaggcgcgcgaaggcgccgcgcacggcctcgcggctgatatcgtcgccgccgaggccgccgatgaagttcgcgctcggtcgcgcgatgcccgcacgagcgagcgacgccagcacgttggcgtacacggtgccggtgccgccgaaggagatgtcctgttccaacacgcccacggccgccgcgtcggccaacgcccgaacgagagcggcgtcgggcatcggccgcaggtagcggatgcgcaagacgcctgcccgcttgcccgccgctcgcagctcatcggctacatcgcgagcaaggccagccgccgagcccaaggtgacgagcacgaaatcggcaccctcgcaaaggtaggcgtccaccatgccgggatacgcccggccgaacacctcggcgaagcgcgcctccacctcttccaccaccgcctcggcggccagcatgtcgcggtggtgccagtactggtagtagcgattgaagtccgggccggctgagtagccgatgttcacggggttctcgaaatcgaacttgttggccgtgcggtaagacggcaggaaggcgtcggcctcatcggcggtgggaacttccactgactcgtaagtgtgggtgagcgcgaagccgtccacgttcaccatcaccggcagactcacgcgcggatcctccgccacggcataggccatgagcgccagatcgagcgcctcctggttgttctcggcatacacctggatccagccatgatcgagcagcgacagcgagtcgcgctggtcgccgtagatgttccagggcagcgcgagcgcgcggttcgcgttcatcatcacgatggggaaccggccgcccgaggcgtaggtgaggcactcggccatatacagcagcccctgggacgaggtggccgtgaacgtgcgcgcacccgtagcggacgcgccgatggcggcggagagcgccgtgtgctcgctttccacgtgcaggtactcgcaggcgaggctgccgtcctcgaccatggaggcgagcgcctccacgaccgtggtctggggcgtgatgggataggcggagatcacctggggccgggcgagccgcaccccctcggcgaaggcctcgttgccggaaaggaacttcctcatgccgcgcctccttccgtcgccgggcccatctcggccgaaggcgaggtctcatccagggtctcagccatctcggctgccccctcgttctcgccggcatgttcgtccaccatggcgatgcagggcacgggacacaccttcgcgcacacgccgcagcccttgcagaaatcgtagtcgacgacgacggccacgcaggcgccctcgtcgtcgcgcaccttcgcgatggtgccgtcgggacagtacatgtagcagttaaggcagagcgtgcactgctcggcatcgatgacgggccgcacgctgcgccacccggcgttcaccgaggtgaggtgccccgcctcaaagcaggtggagcgggcgaactggctcggacgcgcggcgagtccctcgcgcaacgtgggcgtgaaggggcggcggctctgactagcaatcgcggacatcgaaatccctcccctctccctcgacgagcatctcggcggccagcgagaacatggcgtccttctcggaaagcacggcggtcacagccgtcgccgcctgctcggcggccaccaggtcgcgcgtggcggcgatctcgcgggaggccacctcggcgaaggcggcatccacgatgcgtaagttcttcgcgtgcagcttctcgggcatggtggcacagatgccggcatggatgtcctcgatggtcacggccgccgtgagcgcgggaatggccccgagaaacaccgtgttgggaatggggcggccgagcacggcagcggaaatgccatcggcgtcgattcccagaatgcgcgggtcgtcaagggcccgcttcgtgttcagcagcatgaggccgccgggggcgagctcgtcctcccagccgtcttccacgagcgtctcgtccaaatagatgacgaacgcggcccgatgcacggcgctgcggtcgccaatgggagcggtgtcgatcttcgtgaacgcccgcatgggggcgccacgccgctcggggccgaaggtggggaacgccagcgcataggcgcctgccgacagcgctgcggccgcccccaggcaccgggccgccgtaaaggccccctgcccaccccgggcatgccaaatgaattccaacatagtggttccttacgtgaaaagaaagggacgggtctctcgcccgtcccttcattatacctgtcgttgcctcactggcagcatcgctcttccctatcggttcgcgtacaagtccaagctgcgtgcgagatggctcacgaagcgctcgcccatgacggagagctcgcggttgtcggcggtcacgtaacccagatgcagcttgaggtcggtctcaagcgggatggtggtgagcgcgctgccgtcggtgatgcccacgaggataccgctcgtcaccgtgtagccgttgatggccatgatgagctcggtgagcgacgcgcggtcggtgcaggccaccttcttggcgcgcggcacctgcgacagggcctcctcgtagaaggcgatgggcgcgtcctcgccctggtcgaagtacacgtagggaaagtcggccagctgctcgagggtgaggctcttcgcgttcacgaaaggatggcttgacggcagggccacgagcggcgcggagacggccagctcatggaaggcgagccccgcctcggccagcgcctcgttcagggcgctttccgtctcggaggtctgcatgatgacgcccagctcggcggccccggaggccacgtcgtcgatgacgccctgggtcgtgcggtctaaaagcgcgtaggagaaggcgtcgccgccggccgccaggatggtgtgggcgaaggactgcacgtcgaacaggtagtgctgcccggaaatggcgaagtcgtaagaggtcatgtaggttcccttcttcggtgggatctcttcaaatgaaatgatacccgatggccgaacaaagcgtcccgcccggccatcggtttgcacgttcgttgcctacttcgcgctgccgcgctcgtcgatgaagcggctcgccttgtgctcggaagaggtgccgagcttgccggcgtcgtagacgatgacgcgggccggcttcacgccggtgtgggccttcaacgccgccgtcacgcgggcggccacggcgtcgaagggctcatcggagccctgggcgcgctccacggacacctcgtagcgggtggagaagttctcgtcgtacacgcggatgaggtactcgccggtgaggcccttctcggcgcgcaccacgtactccacgtcggaggggaacacgttcacggcgcccacgatgaacatctcgtccttgcggccggtgatgtggatgcggcccaaggtgcgcccgcactcgcacttctcggtggagaagtagccgatatctccggtgcggaaacggatcatgggacgagccttcttcatgagcgtggtgtacacgagttcgcccacgctgcccggctcgagcacctcgccggtgaccgggtccaccgtttccacgaggatctggtcctccacgatgtgcaggccgtccttcgcctcgcacatggccgcgcaggcgccgtagatgtcggagagcccgaagaagtcgaccaccttcgcgtcccacaaatcctcgatggcctcgcgggtgctctggatggaaccgcccggctcgccggccacgatgatggtgtggatggagaagtcggtgcgcgggtcgaggcccttctccttgatcttctcgcccaaggtccatgcgtaggacgggctcgtccagatgatggtgggctggtactgctgcagcacgaaaatgaggcggtcgctcggcaccgcgcccacccagatggcgagcgcgcccaagcgctgggcgccgatgacgtccgggccgcccacgtacagggcgaagttcaggccgtgcacgtagcggtcggtcgggcgcatgccggcctgccagaatagccgcgcctcggtgtcttgccacagatcgaagtcctcctgggtaaaggggctcaccgtgggcacgcccgtggagccggacgaggtgg

SEQ ID NO: 10537 - DNA, 244 bp, Unknown
  gut microbiota DNA sequence
gcctccagcacgtcgagcgcggccgccaccgcgctcgacgacctctcgggcaaaagcaggcacagctgcgcgcggcagcagcgcaggtggagcgtgaggacgcactgccggtcggcggcgcgcccgatcaccgtgtccatctcgcaggcggcctcgcgctcgccctccgggagcgccgagaacgccgagaaggagcgctccgggccgtgcggcgtcggcgcgggcgccgccctcctcctcggcc

SEQ ID NO: 10538 - DNA, 177 bp, Unknown
  gut microbiota DNA sequence
cgctcgccctccgggagcgccgagaacgccgagaaggagcgctccgggccgtgcggcgtcggcgcgggcgccgccctcctcctcggcctgtaccccaccttgcggcgcaggtccatgttggacatgccggcgtagccccgctctatccagcggtagatggtggagggggcggccctg

SEQ ID NO: 10539 - DNA, 2054 bp, Unknown
  gut microbiota DNA sequence
gccagtgatcagcacgttcctgtgcgctttgacccactcgcagttcgccagctcggcgattttcaccttgtcgagtttgcggtcggcgtcgtagcggatgtcgatgacgttggcctccgggtcggagaaggccgcctggcgcagcaggcgggtccgcttgttgatgcgtcgcgagtcccattccgcgtccacgatcatcgcgaagcgctcgtcgaaggtcatgtcggcaacgcccagcatctcctcttggtcccggtatgcctgcgccatcaccgacaacctcattccgtacagcttgtccatggtggtctggcttgcgctcatcgtatgtctcctttgctatcgagggttgcgtaatagtcgctgccgcgcagatacgcgccggcatccgggtccttcccggacagctcggcgcttttggcgatgatcgacttgatggtcttgtagctcggcctgggagaataggagagcgccttggcgcaggcccgctcgagctcttgccctccgtgcttgtcggccagcgccatcaccgccctgcaggatctgtaggactgctgctcgaccgccctcgacgagaggatcgccccgatggcgccggcgcaagcggggccgatttcccttgcccatctgcggaagcgatccccgttccactcggcgaagtcgcggtgggcgtcgggcatgtggtcggggttcgtggaataggaccccttcggcccgtgcagcctcttgtgcatggcgatgcgctctccgtcgcagacgacccacaccgcgctcttggtggcgcagacctccacctcgcggcgcacataggagaacgggacggagtaccatcctccgtcgaaggcgacatggtagttaaaattgacggtggcggccttgcgcgcgatcatctcgtagggtttgcccggcagcgggacgagcagcgctttctcttggcggaggaatatctcgtccctgctgccctcgcgcttctggaagggccgcgcgttgatccgggcgacgttgtccaggagcgccgcgttgagcgcatcgagggatgtgaagacgcggttgcggagaggggcgatcgcctgctgctctatgacccggacccccatctccacggccgccttgtcccgggggcgccgcggacggcccggcacgacggcgcatccgtagtactcggccatgcgcctgtactgctcgttgatcacgagctcgtcgacggtgtgcttcgccactccctgcttgaggttgtccggaacgaggatcggcgtggtgccgccgaagaaggagaacgccgacacatgggcgtccacccaggactcctccctcatgtcgtaggagcccttcgcgtagagcttgcccgagaagggcaggcatgccgcgaacacgtagaccttgagcacctcccctgtgtccatatcgacgacctccatggtgtcgccgacgtagtccacctgcatctgctcggcgggcttgtgggcgatgcgcatggcggtcttgtgcgacatcacccacttgcggtgcctctcgcagaacgccgagtacatgtagggggatctgccttggctgaccgcggactcgcagtactcggaccacagaagcatcatcgtcacgcccggacgggacatctctgcgtcaacatgatcgtggtcgatcggcgccttgtcgggatcggccttggatttgggaggatagatcacctccctgatggcgcgatcccccatctcctcaggcaggggccattcgatcccagccgccttcgctcggccggcgacggctctgacggtggcggtggaacatcggcacgagaaagcgatgttgcggatgctgacccccatggcgtgaagcctgaggatctctctgtacttgaccattttcttctcctgttctctcgatggccagcaggtgccttttgcaccacattgggattgtgcaggaaaagaaaagacgcctccgtctgaagacgcccttaaacgcggcaagtcgggcagctagcgcgtggcagcgcaacgcggaacgccgtagcagcgcagtctggaacggcgtagcatctcagccgcaataatcag

SEQ ID NO: 10540 - DNA, 1272 bp, Unknown
  gut microbiota DNA sequence
gaagatgagggccacatcgggttggttgatggtaaggtcggcgttctcggtcatggcacgctgctttctctgcatgaaaaaagggagcccgaatgagctccctttcagtatagccatttcgccaaagttcgcgctgtgttactcggcgtaacggaacagggcggccaccgaggcgtcggtgggcatctgcgcctggtcgacgatgtagacgtgagcatcctgggccagcgccgccttggcgaaggcgtcggtgatgtctggggcggccgggtcgctgtagccctcgtcgacagggttggcgtcggcgtcgaaggtgaccgcgccggtgttgatgtcgaagccgccgggcagcgccttgcccgcggtcatgaacagcacgcgcacgcggcgctcggcgagcgccatgccgatggtgttccaatcgtcggaagctttgccgtgggccgcatcggcgccgaactcgtcggccatcttctgaatgttggcgtcgcgcaggccgtccataatagcgagcgacgcctcaagcagctccttgccgttcaggctctgcgggtccttcttaatgccctcaggcagcagattcttgatggtgctgatcttgcggaatgcgctttcgtgcgcctcgtcgcagcacaggatgatgggcgtctcgctatcggccaagtactcgctcacggcgcggttcacgtagcggaaccactgttcggcatcttccttcttcacgtcgttgcgcgactgatggtcgtggtactgacccatatgcccctcgaggctgatgtaatcgagcgcgccctgctcgcccttgtccatgtcggcttcgctgtcgtcgctgttggcgaacagctggctgaagaagtcgtgcacctcgctcggcatcggctggtgctccacatgggtgcggtcgcccttggcccagctgaagcggtcgccggaaagctccagcacgaagtactcggtgccgtattggaagttgcgcagcagcggcttgatgaagtacgtgtcgccggccgataccatgggctcgggggcgaagaacaggttgtacacgtagacgtcgtcgttgttcatgaggaagccgaggccctcgccggcgtgcagccacagcggcatgtcggggtgcttcagcaggtagtcggccttattgtggatgcccttgaagctttcgtcgggatagtgctcggaaagcgtgcgataggcgtccttcatgagatccttgaacatatcggcgtcccacagatcgcggcgttcttcgcgctcgtcgtggtgcaccgg

SEQ ID NO: 10541 - DNA, 1519 bp, Unknown
  gut microbiota DNA sequence
cagtactatttttctgttcgcgttcttgccgctgtttctgacggtgtacttcgccatgctgtggcggccggcgaagaacgttgtcctgctgctgttctcgcttctgttctacgcctggggcgagccagtgtacgtgtggctcatggtggcctccatctgcttcaactggctgttcgccttcatcataggcaagtgcggcgagggcaagacggcgccgaagcgcttctggctcgtggcggcgctcgcggtcaatctgctcgtactcgggttctacaagtaccagggctttctggccgagaacgtgaaccgggcgctgggcgaggagtttatcgccgagctgaacctggcgctgcccattggcatctcgttcttcaccctgcaggccatcacctacgtggtggacgtctaccgcggcgaggtgaaggtgcagaagaacccgctgtacctcggcatgtacatcgccatgttcccgcagctggtggccggccccatcgtgcgctatgccgacatcgagcacgagatcgacaaccgccgcgcgacgctggagggcttcgcccaaggcctgcggctgttctgcgtgggcttgggcaaaaaggtgctgctcgccaacaccgccggcgtgctggccgactcgcttttgccccgcgaggcggccgagatcggctttatcggctgcttctcgggcgtggccgcctacaccttccagatttacttcgacttctccggctactcggacatggccatcggtctcggcaagatgatgggcttcgagtacccgcgcaacttcaactacccctacacgtcgaagtcggccacggagttctggcgtcgctggcacatgtcgctcggcggcttcttccgcgactacgtgtacatcccgctcggcggcaaccgcgtcagcacgccgcgcttcgtgctgaacaccatgatcgtgtggggtctgacgggcatctggcacggcgccgcgtggaacttccttctgtggggcctgtactggggcgtgctgattctgctggagaagttcttcgtcatgaaggtgctcgaccggctgccgcggttcgtgagccatatctggtgcatcgtgctgttcttcttcgggtggcttttgttcgccgtgacggggctcacgaacgtgggggagtggttctgcgccatgttcggcgcctacgggtggctgggcacctccacgttgtgggaactgcagtcctggagctacgtgagcctcgtgcccatcttcatcgtggggtcgctgccctgggcgccgtggctgcgcaagaagatccaggcctgggccgagggcgacccgcatcgcgccatcgtcgccgccccgcagaagggcaacaccgccgtgccgccctgccaggtggtctgcgagggccccgtgcccgtcggtcgcgctcgcgccgtgaccgccgtgaacgtgctcgccgacgtggctcttctggccgtcttcgtcctgagctgcatgtcagtggtctccagctcgtacaacccgttcatttacttccagttttagggg

SEQ ID NO: 10542 - DNA, 4868 bp, Unknown
  gut microbiota DNA sequence
cgccgccatggatgtcttcacctgctgcgtgaagctggccgccctggaacagctcgtcgagggataagactttcggctccgaacaggctcgcgctgcggctcgccggcgggggcgcgccccgcgcgcaggttgcgcagcgaacagaacaggactaaatgtcctgttctgccgagcgagccattgcttgagcacggggtgtgcccccgccggcgagccgcagcgccctgtcgtaaggaaaagttacgccctccttacgctttcgtcagcttttgctatgggaagcgtaatggagggctttcctatcatttctcccgaacgcagacgagcaaagttcaggagatgagccctatggagaatatcgacgtccccgatgtgctgccggtgatcctcggcggagacatcggcgcctacagcctcgcccgggccttccacgaagcttacggcatcgtgcccttggtactttcccaggccgactgccacatgtgcggcgactcctccatcctcgtaaatcgcgtggtgccgcaccttgagcggccggcggtgctcctctccaccttggccaacactgccgagtgcttcggcaaccgcccgctgcttctgctcggctgcggcgattggtacgtgcggctcatcgtcgagaaccgcgccgtgctggagaagtccttcatcatcccctacattggcgaagacctgctgaaccggctcaccgagaaggatcgcttctatgagctgtgcgcggaagtcggcgtgcccgtgccgcgcaccgtggtgttcgacgccagcgcagacggcgacgacccggccaccgtgacacttcccttccccttccccgtggtggcgaagcccgcatcctcggccgcctaccactatgccgacttccccggcaagcagaaggtgttcttcctgcgcgacgcggcggagctgcagtcgacgcttgcggcggtgcaggccagccgctacgaggggaaattcctcatccaggagatgattcccggcgacgacacgagcatgcgcattctcaccacctactccgaccgtaacggaaaggtgcgcttcgcctctttcggccagacgcttctggaggatatgcggcccatgggggtgggcaatccgctcgccatcgtgagccgcaccgacgaggccatcgtggccgaggccgcgcgccttttggaggctgtcggctacaccggattcgcgaacttcgacatcaaggtggatccgcgcgacggcagccaccgtttcttcgagataaacacgcgtctgggtcgcagcaactactacgtgaccgccgccggcgacaacgtggcccgctggctcatggacgacctcgtgcttggccgacccctgcccgaagggctcacggtggcacggggcgagtcgctctacaccgtggcgcccaaggccatcctgctcgactacatccgcgacgacgccctgcgtcgggaggtgcgggggctgtacgcgctcggccgcgatgccgatccgctggactatccggccgagaagagcctgcgccggcgcctgtaccccctcgtcttcgcgttccgccaatggaagacctgccgggccgccatggcggataagcgggcccgggagaaggcggcggaggatttggaaggcgccggggccacagccgatcaccgcacgaaggggactgcctccggcaaagacgacgagcacgttgcctccgcctcgccggagctcccgttggcagacgggctggcggcctgtgcgaaagcggcatcgtgagcgggcgcttggtaggcgtgctcggcggcactggacctgcggccacggcctacttcctgcagcggctcgtcgagcgcaccgaggcccgctgcgaccaggatcacgtgcgcaccctcgccttcaacgacacggccatccccgaccgcacggcgtttctgctgggacgaagtgaccgctctcccctcgaggcgctcatcgaggatgggcgtcttctggaagcctgcggctgcgatcttctggcgctgccctgcaacacggcccacggcttcttcgacgaactgcagggcgccttgggcatccccgtcgtccacatggtgcgcgagactgccgccgccgcatctgctgtgggcttggcgcgcatcggcgtgctggccacgagcggcaccgtggccgccgacctgtacgggcgcgaggccgcacggctcggcgtggactgcctttatccggacgcgacgacccaggggcaggtgaaccgcgtcatcttcgacgaagtgaaagcaggacggcccgtggatgcggcggcactcgagcggctggcggctcccttgcgggctgcgggctgcgatggcgtggtgctcgggtgcaccgagctgtctttggccttcggtggcgtgacgcaggcagcggggcttcccatggtagacgccctggatgtactggccgactgcgtcatcatgcgtgccggccggccgtcgaaaacctcgaaaaacttgtcacttcaaaactagccatttgacctgcagttttctttgatatcaccaggtcaggagcttggcaagttttccgcgctttgcgacacgagctttcaggaaggatcccttatgtgcggctttgtcggctttatcgacgagaacgaccagacttacgaccaccgcgccgccatcgtcgccatggccgatgccatcgcacaccgcggccccgattccgaagggtatttcgaagacggccgcgccgccttgggcttccggcgcctggccatcatcgatctcgctggggcgaaccagcccctctacaacgagaatcgctcgctcgtgctcgtcttcaacggcgagatctacaactaccgggaactgcgccggcagctgatcgctgcgggccacgccttctctacccagggtgatgcggaagtggtgctccacgggttcgagcggtggggcgcaggggtgctcgaccgcttgcgcggcatgttcgccttcgccctgtacgacaccgccacgggcgagctcttctgcgcccgggacgccttcggcatcaagccgctctactacgccgcggaaggcggccgcatcctgttcggctcggagatcaaggggcttctcgcgcacccgcacgcacgccggagcctgaacgagcggcggctcgcccactggctgtgcatggaatacctgcccgacgaggagaccctcttcgaaggcgttcgcaagttgcccgccggccattggctgcgctggcgcaacgggcgcgcggaacgcggccgctggttcgtcccgcgcttcgcccccgacgcggggcgcagtctggaggagagcgccgaggccatcgaggctgccttgcgggagtcggtggcggcccacgccatcgccgacgtggatgtgggctgcttcctctcggccggggtggattccagcctcgtggcccgggaggccgcccgcatcatggaggcgcgcacgttcaccatcggctggggtgaggggcgcttttcggaattggaagccgccgcaaccttcgcccgggccacagggttgccgaacgaggggcgcattctcggcgccgagcagttcttcgcctcggtgcccgccgtgcagtacgccatggacgagccactgccaaacccctcggcggtgccgctgtaccacctgtgcgcgatggcggccgagtcggtgaaggtggtgctgtcgggcgagggggccgacgagctgttcggcggctacccctactaccaggagtgcctcgcctttgcgccctacatggcagtgcccgcacccatgcgccgggccgcgggcgccgccgcgcgtcgcctgcccgagggcacccacgggcggcgcttccttttgcgaggggcacatccgctgtccgagcgttacatccgcctggagtacaacttcacctgggccgaggcgctggggctcttggcgccggaggtgggcgcgcgctgcgccgctgctccagctccttgggaactcacggcacccctgtttgcggaaatcgagacggatgaaatcaccgccatgcagaccgccgacatcctcacatggatgcagcaggatatcctcttgaaggcagacaagatgtccatggcgtcgtcgctggagctgcgcgttcccttcctcgatcgcgaggtgttcgccctggcaagcacgctgcccgtctcccagcgcgtcggacgccgcgagacgaaaatcgccctgcgcgccgccgcagcccgcacgctgccgcaagccacggccgccatgcccaagcagggcttcgtcaccccgctcgcccagtggctgcaggaagagccctggcacaaccaggtacgcgaggtgctgaacagcgaacgagcccgacgctttttccgcaccgaccgtttgaacgccctgctcgacgagcaccagcgcggccctcgctcccacatgaagaagatctggtcagcctactgcttcctcaactggcacgagcagtacttcgactgacgatccctttggcttgcgggaatgcccaaagtcaatcctcatggaagattgcacgagcatcgcagatgcctaagcgcttttatctgccagaagtaagatgggattgcataaacaagaaaacgactgaagttcgtctagagaaaagacagggtttgaaacaagacaggcgaggcaccgggcaaatcgggagggaggggggtgaatctgtccggtgcccgcctctacgtgggattatacagactggaagagtattcttcgcgacattagcgaggttcatgaaagggtcacagttcgatcacctggaggagagtcgcgaaaatcactcccgactaaaaagaggtaagcatcttcagaacgccccgcagtttgcaactactcgaaatcacgccgccagaaatgacaaatgttttgctgacacggcaacccaccctatgctactgtga

SEQ ID NO: 10543 - DNA, 3775 bp, Unknown
  gut microbiota DNA sequence
aggaggcctcatgagatttgtcatcgcccttgtcatttcctttgcgttggtctggctgtgcgccaagcccctcaagaaataccccgtgcccttctatctcggcgccatcgcgcttctggggctgtacttctggggatcggccaccggcgtgcgcaacgaggcatggtcgtacttccagccgctcatgcagcggtgcgccctggcgtttctgctgttctccatcgtgatgttcgtgggcgtgctcggcgagaagaaccccctgcgcacccacctcatgcccattcgtcgacagctgtccatcctcgcctgcatcttcgccgtgggtcacatcgtcttctacgccgcctcctacgtgccgcgcctgacgagtgcattcacgggcaatctcgccttctcgctgggacttgcggcgctgatcaccgcactcatggcggtgctatgggtcacgtcgttttcagaggtaaagcacgccatgaaggcggccagctggaagcgcgtgcaacggctcgcctaccccttctacgtgctcacctacgtgcacctggcgctgctgctcatgccaagcgcccttgcgggcaacgatgtggccgtgctaagcatcgccgtatactccatcgtcatgggcgcctacgtggtcctgcgcctccgcaaagccctcgccgaccgccgcaccgaggccaccgtcgccacccccgacctcgacctggaagccgttgcagcttagcgtcaaaccaccagtctgaaatcactactgtgtctaaacggctagtttttctccaaaatatgcctcacgcagaaaactgcgaccacttacgcggaaacggcttgaacaatggcttctttaagagcggccacaaggggcttttccggaacgccgagcttagtggccagcccaagagtgagcgtgaaatcatcttcactcgcaaggggccgataggcaattccctcatgaggtctttcgacattgtgcgctggcgagaaatcgacaccctggcccgatcgtacgaattcctgagctgcttccaaactaaaggggacgggggcgtaacggggcgtgaggccataacgggcaaacccttcgacaatatgccggtaggtcacatccagatcaggcgtgggaaacaggtcaatctcggccaaatcggagaaactaatcgcctcctgcgttgcaagcttgtgcctttcaggcacagcgacaaggaggcgcccctccatcaggggcgtgaattcgaacaccgcagaatcgggccgacccgcaaccaacgccatatccactgtcccgcgctccaacgccttcagacaagcatcactcgtcaactcgaatagccgcagatccgcatcgtcgtaggaggcacggaaccctcgcagggtcgccagggtgaaaccggggccgctttcccgcaagcttgcggtggcgtaggcaaaagtggccgtatggcgcgtgctctcatgccactggagggcaaacccctcagcttcccgcacggcttccagaacgcgctcgcacttcggcagaaagcgggcgccgaagtcggtcaactcgataccctgacgccggcgatggaataacggcgtcttcacctcgccttcaagggacgccactgaagccgacaacgtttgttgagtgacgaaggcgctcttcgccgctgcagagaacgagccggcctttgccgccagaacgaaatactcaatttgccgcacatccatcgctgctcccctttcccttgtccccatcataccccaaagcggctagtaaaccgatttccagcgcgcaaaagagcggacgccgcgcaaacggcgcccgcccgtggggaggcgatagcaatcggcgctggttcgcagatcgcgccctcgggaagagcgcaaaccaactgccgccaagacgaccccgattcttagccctgggcggccgtcaccccggcaagatacccggagcccacgcagaagccctgggccgagccgccctcgaagtagggaacggcccaaaaatcgccgtcgacgccggccacgaacagaccagggatgggattggcatcggcatccacggcgcggcagtatccgtcagtcttgatgccgcccaaggtcacccaagccgcgatgtcgagctccactacatacagcgagccggtgtccacggcgcgcaggaattgggcctccttgaacatttcctcgtccacgccagtggcgcaatagccgttgtaggcctccagggtgtcggcaaggttctccatcccgcaggcctcagccagcgcctcggccgaatcggccttccaaatccagccctcgtcgatgccctgctgaaccttttcgggaagcgcggtcagcgtcttgtccatgaagcccatctgaacgcccggcgccatgttgccgaaagcgtcctcggaaatgaagtccataataggcgtggtgaccagctcgtcgatgagcccgtcgtcgatcaccatgtagtatacgccctcgcgcagaagcggctcgccgcagtacatggtgtgcttggccatggtgccctcgtccatgaagcgcgacccgtgcttattcaccatgaggccgccgaacaaaggcaggctgaacaccggcgtgtcgttacaatccgacaggctcacgaagcggtcggcggacttcatgttgcaggcgccggactcattgatagaggtgctgaagttcttgcccatctgggcaccggccgactgggccagcctgatgcccgcgccgtcgttgtactggttgcccgtgccgtacatgaccgagccggagtagtagtcgcgcagcatgccctcgttctgaataaagccgccggtggcgatgatgacgttgctcgcgcgcacgtcggtcacgatagatccgctttcatagcgcacgcccaccacagcgccgtcctcgatgagcaggttggtgacctcggcatcccaacgggaatcgacgccgaacttgtcgagcatgccctgcagcgcctcggcgcgctccgccccactggtggcataaatgtgaccgccgcggttcagcataagcgtgttctcgtcagcgccctcgaaagcgaacatgaagggcacgccgccctcgatcataagatcgatgcccttgcctgaggccggcagcacattgcgcagaagcggggcgttggtctggtagtgagtcgacgtccagatgaagtcgaacatatccttagtggtcaggtggttgtcgtactgaagctcggggctggattccacggcccacacgccagacaccatcgcggcattcgtggcgcccatggaggccgagcgatcaaggccgatgaccttcgcgccctccttagccgcggcagaggccgccaccagcccgctcgttcccaggcccaccacgaccacgtcacagctctcctcggtatcggcggcgggaagctcctccgctgtcggcgcctcggccgccacatcggccgaaccggcctgcgcggcgttgttcgcttgaggggcgcagccggcaagccctaaggccgccagccccgccgcgcctaaggcgccaaggccgaggaacgagcgccgggagatgccctcgcccatcggcgcggcatcttccatcgcgcagctggccttttccatcgcgttcgtgttcttttccacgggaaccctccttcgtcgttgcctgtttccctgggaaaagcatacgcgccgcccggctccttgcataacaaacgctgccgagggttcttcgggaagattttgcagctgcgttcgtcagagaaacccctcctttttgcatgagatcgccgcttatgagcgtctcgagtggagggaat

SEQ ID NO: 10544 - DNA, 6006 bp, Unknown
  gut microbiota DNA sequence
aggggcgaccaaggtcgccccctacgggattgccctgcaaaacttccgctaccatcatacacgagaaaggccgctccgaagagcggcctttgaaaagtcactggtcgttcgcagtcgcacgaacccgcagaggctactcggcgtcgacggtctccacctcgacgacctcggcctcggccggagcctcgtccttcttgcggcgggccggcttctcctcggcctgcaccgactcgtccacgtcgatctcgaagccgagctcctcggcagcagccttcatggacagggaaatgcggcggcgatccgggttgatctccatgaccttcaccttcacatcgtcgcccgcatgcacgacctgcgccggggtgtcgatgtggcggccggccatctcggagatgtgcaccaggccctcgatggagtcgcccagctcgacgaaggcgccgaagggcacgatcttggtgaccttgccgtcgacgatggtgcccaccgggtagttctccaccagctggatccacgggtcgggcgtggtctgcttgagaccgagggagatgcgctcacgctgcagatcgacgtcgagcacctcgacctccacctcgtcgcccaccttgacgacctcggagggatggttgacatggttccaggacagctcggagatgtgcaccaggccgtcgatgccgcccaggtccacgaaggcgccgaagtccacgatggaggaaacgttgcccttgaggcgcatgcccttggagagcttggagaggatctcggcgcgctcgttcttgcggccctcctccaagagaacgcggcgggacagcacgacgttgttgcggttgcgatccatctcgatgacgcgggcctcgatctcggtgcccaggtaggcatccagatccttcacgcggcgcaggtccacgagagaggccggaaggaagccgcgcaggccgatgtccaggataagaccgcccttgaccacctcgatgacctcgccggtgaccacttcgccggccttgaacttctcctcgacggaaatccaggcacgctcgtactcggcgcgcttcttggagaggatgaggcggccgtccttgtcctccttctggagaaccagcgcctcgatcttgtcgcccaggctcacgatgtcggacggatcggcgtccttgcggatggacagctcgcgggccgggatgacgccctcgctcttgaagccgatgtccaccagcacctcgtcgtgctccagcttgacgacggtgccgtcgacgagatcgccctcgtcgaactcggtcagcgtgccgtcgatcatctcgttcatctgctcatcggagatgtcggagaagtcgatcacggaggtgttcttgatttcggtcaaaacggacccctttcaaaaactaaatcggggacccttcgtcatgatggttgatacgtaccatgttcgcttgcagaagcaaggatcgcggtgcaacaaacatgtctcgggggccaacagttacttacacttgccgcctatcggcaagcccgcccagtatagcaccgctcgcgcgcgcttccttgtgaattttccccgagtgccgacatttttcgcagggcgcccacaaggcgaccgcagacccgctctgaccctgcggcggcgcggcagggtcagacagcggcgcccgcgatttgccctgagccgcaaggtcatctttcgtgcgtgcagccgttgcgctagaataggaaggtgcgtttgcgtccggtcggcttcatcgggataaggctcaggcatggaattgactctttcggtgttcctctcgcaggcaggagaccatccggtcctgctcggcattctggcgctggtcatcggtgtgaccatcatctcgggcgccaccgacgcccccaacgccatcgccagcgcggtctccacccgctgtctcacccccggcgcggcgctcgcgctggccgccgtgttcaacttcgtgggcctggtgggcatgacctacatctccaccgccgtggcccacaccatgttcaacatggtcgatttctccggcaacacccaccaggcgctcctcgcgctcatagccgccatgataggctctatcggctggggcgtcttctgctggttctggggcatccccgccagcaagtcccattcgctcatcgccggcgtcaccggcggcgccatcgcgctgaacgggctggccggtgtcgtgctctccgagtggatgctcgtcatctacggcatggtgttctcgctggtgggcggcttcatcctcggcatggtcaccaccaagatcatcgagtttctcttctcccgcgtcaaccgccagcgcggcaacaaagtgtgcatggtgctgcaggacatctgcgcctgcgcgctgtcgttcctccacggcgcccaggacgggcagaagttcatgtccatcgggcttctgggcatcgcgctcgccttcggcatggagacaagcggcgccaccgacttccccctgtggctcatgatcatctgctcggcggcaatgtctctgggcacgctgctcggcggcaagcgcatcatcaaatcggtggccatggacatggtctcgctggagaagtaccagggcgtggcggcctccatctctaccgtgatcacgctgttcgtggcctccatgaccggcatgcccgtctccacctcccactgctccaccgcctccatcatgggcgtgggcgcatcgaagagcttccgccgcgtgaactggggcgtcgcccgccgcatggtatgggcctgggtgctcaccttcccctgctgcggatttatcggctgggccttggccaagctgttcatgatgctgtaaggccttttctataagggaactttccttttatcaccaatatgatatcttgtagaatttcctactgaaagcgtgatatgatcaacctagctaaatcctaggaaatgaggtacgccatggttgcccccaaaggctccatctattcgtctaccgccctcgcctcgcgccaacgcgaggtaaaggacgtggccgatcgccaagtcgtctacatcaccgagaacggcaacggcgcttacgtgttctgctccgaagagatattcgatcgagagctcaagcaagcccgtgaagacgctcgctacgaagcggagatggaattcgttctccgacgcggcaagcgcgatatcgaggaggggcgtttcaccaccgatgtcgatggtttcgtcgcccgcattcgcgagaagcgggggctctgatggccgaagtgcgcatctccgagggcttcgaggaggatttggggatcgttctgtcggacaaagttctcgatgacatcctcagggtaatcgagatcttgcccacaatacccagcatggggtcgaccgacgtggcggccgcccttgcatacgagtacggcgaaggcgtgcgcaaaatccccggcggacctttcgatatcgttactttctacgaggacgaggccgatcgcgtcaccgtgctcggcctcgttcatcagcgtgccgcttggtgacaacacgtttcccagacgagctcttgcaaccctggcttaaaggctagcttacgacataaagggggcccggatgaaacatccgggccctggaacttgcctcattcgggcgattaggcatacagccgataccttacgcctgctcggcgtccttcgcctgggcctcgcgtatggccttggtcatttggtcgacgcaggaggtggagcgccgcccgcaggtgtgaccctccatcatggcgacgatgtcgtcgacattctggccggccaccaacttggagatggccttcaagttgccatcgcagccgccggtgaactggacgctcttgatggtgtcgccgtccagctccacatcgatctggcgggagcagacgccgcggggaatgtaggtgtgcatgccggttcctttctcgcaacttgtttcggcgaaattgtaccgcatcttgacctacaccgccgacgcgccccgctcgccggtgcggatgcgcaccacttcctccacgggcgccacgaagatcttgccgtcgcccacctcgccggtgcgggcggcgcccacgatggtgtccaccagcgcgtccaccgcgtcgtcttccaccaccacctcgaacttcaccttcggcaccatgttcagcatcacctcggtgccgcgcacgtactcgctccagccgtgctgggcgccgcagccgtgcacctgcgagatggtcatgcccttcacatcggccgcgaacagggcatccttcagcggctccatcttctcaggccgcacaatagccgttactcgtttcataatatcctcctatttacaccatccaactttcttggcaaagtcagcgagggtccgacaggtgcctgcaattgccccgcctttgggccaagttgccttcgcgcaacgccgagcccaaaacaaggggcaagggcaggtgcctgtcggatccgcagcgtcggccggtccgttcgtcccgcagggcgaacggaacctttagtccaggcccaggtaggccgggtaggccgactcgccatggacggccacgtcgagccccgccgcctcgtcctcagcgctcacgcgcaggctgcccgcaaagcacgccttgatgatgagcccgagcaccacatcggcgatggccacgaaggcgatagtcaccagaatgcccagcacctgcgctcccagaagcgaccagtcgcccgtgtacagcaggccgccgtgctcggtccaggagagcccgggcacgcagaacaggcccgtgaggataccgcccacgatgccgccgacgcagtggcagccgaaggcgtccagcgcgtcgtcgtagccgaggcgccgcttagcctgggagatggccacatacacgatgggactcacgatcagccccatgacgatcgccgcccagggctccacgaacccggccgccggggtgatgaccacaagaccggccaccaggcccgtcgccgcgccgacgagcgtgcacttccccaccgtgatgcgctcggtaagcatccaggaaagcacgccggccgcgctggccgccacggtgttcagcagcgcgagcccggccacgccgtcggccgcgaactcgctaccggcattgaagccgaaccagccgaaccacagaagcgccgcgcccagggccacgaacggcacgttgtggggacggtaggacagcacggcgaaccccttgcgacgccccagcatgaggcacaggatgagtccggtgaggcccgaggagatgtgcaccacgtcgccgccagcgaagtccaaggccccgatcatgtcgccgatgagcgagccgtcgccgccccacaccatatgcgccagcggcgcgtacaccacgacgacccacacggccacgaacgcgcacacggcgccgaacttcatgcgcccggccaccgcaccggtaatgatggcgcaggtgatcatggcaaaggccatctggaagacgatgtcgatgatggccgggtagcccgctgccagctcagggtcattggccagcgcaccctggccggacagcaccgcgaaggcatcgggcgtgccctcggcctcggccaccatgtcgttcacggcgctcaagcacccgatctggtcgaagccgccaaagaacggcagcgacccatcgccgccgtaggcgaacgaccatccgcagacaacccaaaccaccccgacaatgccgagcacgccgaacaccatcaccatggtgttcacgacgttcttgcggcgggagaggcctccgtagaagaaggcgagtccgggcgtcatgagcagcaccagcatggcgcagacgagcatgaacccggtggaaccggtgtcaatcatcgcgatcaacccctttcacagttcgcgggccctcggcgaaaagaggtcgggaggcgccgcgcgccgcaccgcgcgggcctccccaccccttgtcgcccaaggcgcccaacggcaaggacaacccgattgttccacggcacctggtgacccgcgcgctcaacgatgattgttaaccccctcaaaaataagtgttaacactggcgaccaatccttgttactgggcggaaacaaatgcc

SEQ ID NO: 10545 - DNA, 16018 bp, Unknown
  gut microbiota DNA sequence
gcccttgatggtgtcgtcggaggcgacgaggcgctccacttcttccatatcggggccgtcctcgcaaagggggacgggaatcatctcgatgccgagatcttcgcaaatcgagaagtgacggtcgtagccggggacggggcagagccatttcacctcgggcaagcgcccccagggcgtacttcccaaggcgccgaacaccaggtagcgcaccatggcgtcgtacatggccgtgaggctcgcattgccgagcacgatgacgttctctggctcatcgtccagaagcgttgccatgagccgtttcgcctcggggatgccgtcgagcacgccgtagttgcggcagtcggtgccgtcctcggcggcaaggtcggcggcggagtccagcacatccagcaggggcagcgacagttccagctgcgcgaccgaaggcttcccgcgggccatgttcagcttgaggccccgggccgccatctcgccgtagcgggcgcgcacctcggctagctcggcctccaattccgccttggacatctctgcgtagcgcggcatatcccgtcctttcgccgtaaaactgctcgtctgcataagatacggagtgtcactccatcgcggtaaagtataatcccaaaggtcagtgaaacgacacggaatatggcgcttcgcaagaatggctggccatacggtgtcggtttcggcagggcggcgttgggggctggcccgctggcgcctcttgccgaaaccgaccctgggagttccaaacgtgttgcaaggattctcacggaagggaaaacatgatcgaaagcgatatgcaagtcgtacttgccatgctgctctacttcgtcgtagtagtggtcatcggctttgtgtacgccaagcgctccaactcgtcgtctgaggagtacttcctcggcggccgcggcctgggaccgtggctcacggccctgtcggccgaagcgtcggatatgtcggggtggctcctcatgggcctgcccggcgtggcctacttcaccggcgcgtcggatgccatgtggacggccatcggcctggccatcggcacctatctgaactggaagttcgtggccaagcgcctgcgcaagtactccgagaaggccggcaacgccatcacggtgcccgacttcttctccaaccgcttccacgacacgaagcacatcctcatgaccatcgccgcggtcatcatccttttgttcttcaccatctacaccgcctcctgcttcgtcaccgtgggcaagctgttcgcgacgctgttcggctgggactacggcgtgatgatgatcatcggcgccatcatcgtgttcctctacacgttcatgggcggctatctctcggtgtgcaccaccgatctcgtgcagggcacgctcatgtttctggccctggccacggtgtttatcggctccgtcaccgctgcgggcggcgttgagaacacggtgaccttcctgcagaacattcccggcttcctctccggcactgagattgccacgcccctgctcgatgaggcgggcaaccagctcatcgagggcaacgagcccatgttcggtccggccggcacctacggcatcatcaccatcgtgagcggcctggcatggggtctcggctacttcggcatgccccaggtgctcatccgcttcatgtccattcgccactccgacgagatcaagaagtcgcgcatcatcgccatgatctggcttgtggtctccctgtcctcggcggtgtgcatcggccttatcggccgcgcggtcatcccgaccgagttcctcacccagtcggcggccgagtccgtgttcatcgtgctgtcgaagatgctgctgccgagtttcttctgcggcctggtggtctcgggtatcttcgcggcggctatgagctcctcttccagctacctgctcatctccggttccgcggtggccaccaacatcttcaagggcctcatcaagcgcgatgccaccgacaaccaggtcatgatcgtggcccgcattacgctgacggtcattctgcttctgggcatcttcttggccatggatcagagctcctccatcttcgacatcgtgtcctacgcctgggccggcttcggcgcgtccttcggcccgctcatgctgtgctcgctgtattggcgccgcacaacgctgccgggcgcggtggccggtatgctcaccggtgcagtgacggtggtggcctggaagaacctcattgccccgctcggtggctggttcgccgtgtacgagctgctccccggctttttgctggcgctgctcgtgatcgtggtggtctccaagctcacgcccgagcccagcaaggaagtcaccgacgacttcgacacctatatggagcttgacgtgtagatcgtctctcgccctgcctttgagccgcctccgggcggctcttttggttcacgttgcaaaaacttctgaaaaaatggtcacaaactctagttttgggtttctcttctcctctctttgcggcatatggcgctgtaggatgaaggatcagtcgagagaatacacgagaaacgatattagtttttgaaagaagatgcggtaggttagattattgcggactcggaaaacccaaaagtcgcttttgtgaccaatacctccaaagtttatgcaacgcagatccaaacgattctccaacaggggctgtttgcgtggcttcgtggtcgcgtttcgggctaccatgcgaacgtcaaccgcgagacaaggagagcgatatgttgaaggccatcgagatcaagcccgacgtgttctgggtgggcggcatcgattggaacgagcgcaacttccacggctacaccaccgagcgcggaagcacctacaacgcctaccttatcctcgacgagaagatcacgctcatcgacacgtgcaagaagcccttcacgggcgagctcatcgaccgcatcgccgatatcgtcgatcccgcctccatcgactacatcgtgtcgaaccatgtggagatggatcattccggcggccttccggctctggctgaaatcgccccgaaagccactatcgtcaccggcgcgcccaagggcgtccaggggcttcgcgcccattacggggacggtcttaacctcatgggcttgaagaccggcgacacccttaacatcggccggcgcaccctcgccttcgtgcagacgcccatggtgcactggcccgattccatggtcacctatgacgagttcgacggcatcctgttctccaacgatgccttcggccagcactacgcctcctcgaaacgcttcgatgatgaggtggggctgccggaggtgctcgttcaggcgcagaagtactacgccaacatcgtcatgccctacggcaagaatgtggaagcggccctcaaggcgctttccggtcttgccttcgatatgatcgccccggcccacggcatcatctggcgcagccatgtcccggagatcctggagatgtacgaaaagtggagcagcggcgttcccgaggagtacgcgctcgtggtctacgattccatgtggcacactaccgaggccatggccaccgagattaccgaggccttcgttgagatgggcgtccccgcgcgcctgctcgatctgaaggtgaaccacatttccgacatcatggccgaggtgctgaatgcgcgctacatcgccgtgggctcgccgacgctcaacaagacgatgatgcccacggtggcgtcgtttctctgctacatgcgcggtttggcgccggccgggcgcgtcggcatccccttcggcagctacggctgggcgcccatgggccccaacgaggtgtaccaggccctggagagctgcaagttcaccctgccggaggccccgcttacccaccaatgggtggaagatgaggagggcctgaatgccctgcacgacgctatcgtcgactatgtgagcctcttccacgggaaggcctaaggaccggcacgaaaaaggggctcccgacgggagccccttcgctagctggcagatgcgccctagtagcgcgtgtagatcatgccggaatgcacggcggagatcttcacgacgtcgccggtgcgcggcgcgtggatcatctggccgtcgccgatgtagataccgcagtggtgatcgttgcagcagatgtcgcccggcttggggttcgagacgcgcgtgtagcccatgaagctggcggcggtacccaagcggctgtggcggccgagcaggcagtagctcaccaggccggagcagtcgtaggaatccggccccacggcgccccaggaatagggcttgcccagctcgccgtaggcgcgatcgacggccgtgccgccaacggtctggggcttcgagttgttcgacgagccgccgccggagctgccggagccaccgctcgagctgccgccggaatttccgccggagccagatccgccacccgaatttcctccggagttgctctgctgctgacggcgctcttcctcctcggcctggcgacgggcctcctcttcggcggcctgggcggcggcgagtgccgcggcctcgcgggccgcctcttcctcggcgagcagctgggccgcttcctcggacagggagttgtaggtgtcctgcatctgggagacgaggctctcggcctccttcttgacggcctcggcctcctcggccttctgggcggcgacgttgcgctgctcctcgtagacggccttctcagattccacctcggagcgcagggtcttggtttcctccaccatgtcggcgtcgttctggttcatatcgttcaggaggtcccagttcgaggcgaaggcctggaacgtggtggctcccagaagaagatcgaggaacgtagacgagccggaacggtacatggagcgggcgcggttgccgagcttgtcctgcagctcgctgatgcgcgaggaagcggaatcgatgcgaccctgagcctcgtccatgcgggcctgggcatcgtcgcgctcggtttcagccgcatagagggagacctcggcgcggtcgagcttctcctgcatggcgttgagcttctcaagtgccgcattggcctcggcctgcttttcagcggccgtgacggcatgggctttgacaggcgtaagcgggggcaggcacagcgagatgccgaaagcggctgctccgccgacgaaggcgcgtctgctgaaaggacgtgtatgctcactcatataaaagtatcctcctggttgagcatctggtgcgttggggcaaactagtttcgtatcatagcacggatggcgcctcttcacgacccccacagaagggattcacaagccgacctcagcccatccgcgcgggaattcgcgccgttcgcggccgaaaaaaatcatgagtgagggaggatttccataccttgggggagaggtgcgctttctcatccaacatatggtgtccaagtgtctctatatatagtaagaagaaagcgcggttgccgagttcctcgttcgaggttggggaggaatcgtggagacacgcccgggggcgtgtaaatggttgacacgcttgttgccgtagcgtattattccgttcgctcgcttttcgcggaacaacgcgaaagacgggtggcagcttgaaaagtacacatgaattaagcgccgaaatgggcgtgtgcccgagtggttaaaggggacgggctgtaaacccgttggttatgcctacctaggttcgaatcctagcgcgcccaccatttctgcctgtgtagctcagtcggtagagcacttcgttggtaacgaagaggtcaccggttcaagtccggtcgcaggctccacttggcggtgtagctcagttggtcagagcacacggttcatacccgtggcgtcactggttcaaatccagtcaccgctaccatttagatttaccgcgtcctttctgggcgcgtttattttgttgcaattcgtttcgcaatcacccttgaaggaggatgaaacatggctaaggagaagttcgagcgctcgaagccgcatgttaacatcggcaccatcggtcacgtcgaccacggtaagacgacgctgacggccgccatctccaagactctgtccgagaacgacggctcccacggcacggcgcacgctgacttcactgccttcgacatgatcgacaaggcccccgaggagcgcgagcgcggcatcaccatctccatcgctcacatcgagtacgagaccgatacccgtcactacgctcacgtcgactgccccggtcacgccgactacgtgaagaacatgatcaccggtgcggcccagatggacggcgccatcctggttatcgctgctaccgacggccccatggcccagactcgcgagcacatcctgctcgcccgtcaggtgggcgtgccctacatcgtggtcttcctgaacaagtgcgacatggtcgacgacgaggagctcatcgagctcgttgagatggaagttcgcgagctgctcgacagctacgagttcccgggcgacgacaccccgatcatccgcggctccgctctgaaggccctggagggcgacaaggagtggcaggagaaggtttgggagctcatggaggctgtggactcctacatcccgacccccgaccgcgacgtcgacaagccgttcctgatggctgtcgaggacaccatgaccatcaccggccgcggcaccgttgccaccggccgtgtggagcgcggcgtgctccatgtgaacgacccgctggagatcgtgggtatccgcgagacccagaacaccgtttgcaccggcatcgagatgttccgcaagctgctcgatgaggcccaggccggcgacaacatcggctgcctgctgcgcggcatcaagcgcgaggagatcgtccgtggccaggttctctgcaagcccggttccgtgaccccgcacaccgagttcgagggccaggtctacatcctgaccaaggaagagggcggccgtcataccccgttcttcgatggctatcgtccgcagttctacttccgtaccaccgacatcaccggtgtggcgcacctccccgagggcaccgagatggttatgccgggcgacaacgtgacgatcaagggcgagctcattcaccccatcgccatggaagagggcctgaagttcgctatccgcgagggtggccgtaccgtgggctctggtcgcgtgaccaagatcttcaagtaagtccttcttactgagtgatttcgcggggcctgtcttttgcgaggcaggccccgccccctgcgcttcatgtgtatgatcaaccctgcgtttcgctttataggtaaaaggagaattcatgcgtactctggtcactctggcctgcaccgagtgcaagcgccgcaactacacgaccaagaagaacaagcagaacaatcctgaccgcatcgagctcaagaagtactgcaagtggtgcaacgcccacacggtgcacaaagagacccgataagaggttaaggaagaaacaggcataggccagtagctccaattggtagagcggcggtctccaaaaccgcatgttgggggttcgagtccctcctggcctgccagcttgttttcgtgagcagcctagaggctgcttttttggcgattagacaagagactttccataaggaattccatggcaaagaaatccaagacacagaaggccaaggcctccgctgcccgtcagcagcgcaaggccaaccgcgagctggaagaacagaacccgactcccgttgccgaggcgacggaagagaagaagggcggcctgttcaagaagggctccgaggacaagtctgcgtcttccaacgataccgcgaagtcctccaagaaggacgacaagccgaagaagaagcgcttccagttcttccgtgacgtgaagtccgagatgaagcgcgtgacgtggccgacccgcaccgatgtgctccgctggagcggcgtcgtggtggtggccctgctgtttttcggcatcttcgtggcgttgctggataacgtgattatcacgccgctgctcgtgttcatctctgggattggggcgtaatcgatggctaagaaatggtacgtgctgcacacctactcgggctacgagaacaaggtgaagtcgaatctcgagcagcgcatcgaggccatgggtctcgagaacaacgtcttcggcatcgagatccccacggagatggtcaccgagatcaaggagggcggccgtcgcgtggagagcgagaagaaggtgttcccgggctacgtgctcgtccgcatggagctggacgaccgcagctgggccgccgttcgcaacacgccgggcgtcaccggtttcgtgggtagccagggcaacccccaggcgctgacccgcgacgagtacaacaagatcatgaagcgcacgagccgcgaggctccgaagaagacctccacgaacctcgaggtcggccagtcggtgaaggtgacccacggtcctctcgccgagttcgatggcacgatttccgaggttatgcccgatgcgggcaaggtcaaggtcatggtctccatcttcggccgcgagacccccgtcgagctttccttcgaccaggtggccaagatctaattttgcaagcactttgactcgatcgccgtgcccgcgtggaccggggcttctcgcggccttcgagttttgagtgatagagaagtaaacgtcgattcatctgaaaggtagtcacagatggctgacaagaaagtcactggatttgtaaagctgcaaatccccgccggcgctgccaacccggccccgccggtaggcccggcccttggcgcccagggcgtcaacatcatgcagttctgccaggcgttcaacgcccagacgcaggaccaggccggcaccatcatcccggtcgagatcacggtgtacgaggacaagtccttcaccttcgtgtgcaagaccccgcccgcggccgtgctcatcaaggagaagctcggcattaagagcggcgccgccattccgcagattcaggtggccggcacgctgaccgaggatcagctccgcgagatcgccgagatcaagatgcccgacctgaacgccaacgacatcgaggcggccatggagatcgtggccggcaccgcccgctccatgggcgtgcgcatcgagggccgcgagatgaagaagaagtacgtgcccagccgcaaggttgccgccatgcttcagggcaaggccgtcgactaagtttgattcaacagtggaagggtgagaagcgcccgccattaccacgaaaggaaatgcaatgactaagcacggaaagaagtacgttgaggccgagaagcagattccggccgagccggtgagccccctggccgctatgaagctgctgaaggagatctccgtggccaacttcgacgagacggtgaccggcgacttccgcctgggcatcgatacccgtcaggccgaccagcagctgcgcggcaccgtgagcctgcccaacggctccggcaagaccgtccgcgtggccgtcttcgccgagggcgccgctgcccaggccgccgaggaggccggtgccgacatcgtgggcaccgatgagctcatgcagcagattcaggccggcgagttcaacttcgacgccgctgtggccacgcccgatcagatgggcaaggtcggccgtctcggcaagatcctcggcccccgcggcctcatgcccaacccgaagctcggcaccgtcaccaacgacgtggcgaaggccatcaaggagctcaagggcggccgcgtggagtaccgcgccgaccgttacggcatcgcgcacgtcgtcctcggcaaggtgagcttcacccccgagcagctcgccgagaactacggcgcggtctacgacgagatcctgcgcatgaagcccgccgcggccaagggcaagtacgtcaagtccatcaccgtgtccggtaccatgactcccggtgtttccgtggactcctccgtgacccgcgcctacaccgagtccgccgagtaaatcgacgattctctatcgaagagcaagggccccgcttcggcggggcccttttgcatgttgggacattctgcgtgcgccatgcaggttgttccgtgggggccgaccttggtcggccctcccgacagggttgatcttgcttgcggcgaggggagaccgaggtcgccccctacgggtcagcctgcgaatgcttctttactccccgaagaaatccgtgctgatgcgctcgtagaaggaggcgccgtcggcgcgcaggagcgtgacgtcgaagggcgcgcactgcacgtatatcttccgcaggggcgcgtcgaacggaacgatatcgccgtcgacgaacaaggtcgcctcgcggaactcgtcggtgtcgtcgaagcctacctcgataacgtcgctggcatcggtgaccacggcgcgggaacgcagggtatggggagcgagcggcacggcgatcatgcccttgaagccgggggagaccaaagggccgccggccgagagcgcgtaggccgtcgagccggtggccgtggagacgacgaggccgtcgccgcgcatgcgggccacgtccacccccgagacgttcagggtcagctcgatgatgcgtcccatggcaccgcgggtgatggccgcctcgttcagggcgaagaactgccgtgcgccggagagcccccggccgttgacgccgaagcgacccgggacgggcgtccagggggcgccttcggtctccccgggcctgcgaaccgaaggaggggtggcggcgctcgacttcgcgttcacgtcgggcctgtcccagacggcgccttctccggccccgttcgcctccccgtacggatcgtgctcgccttcgcaaaccacctcgatggagagaatgctgcggcgctcggcgcgcaagtcgccggccagggcctcggccacgagcggcaccacgccatcggtatcggcattggcgagaaaccccagccgtccgaagttgatgggcaggatgggaacctggcggtcatggagcaggtgtacggtatgcagcacggtgccgtcgccgccgagcacgacgaccagcgccagctgcccgggcagctgcgcgcgcacgtcgcggcgtcccgcatcggtgcccagcgatgaggaatcgacgagcagcgcctcgattccctggctcgtaagataggcggtgagcagcagcgaggcgtcaacagcttgcgggttggagttattgcgtacgacaagtatgtgcatggggctctgctttccgagtttgctatgatagatgaattataccgctcatcatcgaagagttcgcccatgtccgacaagctccaacgagcccgtcatatacgcccgaatccgcccgacccgacggataggaatgctgcgcctttgggccgccacggccggccgtcggcgagcggcgacggcgacgcgccccaggcccagggagccccccgcaacaacccgcgggcgaacgctgaagcgcgcattcccgcccgcggtcgccatcgcggcgtggacaagacgctcctgcgtcctccgaccgacccgggcgccacagggctcattcccgtcgtcggctcccatgcgggcctcgaccgcaccatccccggcgccaccgccgaggggtccatccgccagcaggaggtgatcgtcgccgaggccgccgagaccgaggtcgcgaaccggggcggcgagggcggcggtgcgctgtcggccgaatcggtgggggcgagcgcggccctcatttccatctgcgtcattatctcccgcatcaccggcttcgcccgcacctgggccatggccttcgcgttgggctccaccttcgtctccagctcctaccaggtggcgaacaatctgccgaacatgctctacgagctggtcatgggcggcatgctcatcacggcgtttctgccggtgtacctctcggtgaaaaagcagctcggcgacaggcggggcaacgagtacgcatcgaatctgctcaccatcgtcgtggtgctgctcgctatcgtctcggtgctctgcatggtgttcgccgggcagatcatctatacccagagcttctactcgaaccaggacgagatggcgctcgcggtgttcttcttccaattcttcgccatccagatcgtcttctacggcgcctcatctatcgtgtcaggccttttgaacgcgaaccgtgagtacttctggtcctcctttgcgccggtgttcaacaacctcatcgtcatcgcctcgttcatcttgtatgccatcatcgcccaaaccgaccagaatctggccttcctcgccatcgccattggcaatccgctcggcgtcttcgtgcagatggccttccagattccggccttgaagaaggtgggcatccgtctgcggccgcgtatcgattggcacgacccggcgctggccgacacgctgcgcctcggcgcgccggcggtgttcgtcaccgtgtgctcgtttgccacggtgtccgctcagaacgccgcctcctacgtattcgccgacaacggtccttcggtcatcgcctacgcgcggctgtggttcacgttcccgtactcgttcctcgcggtgcccgtgaccacgacgctgttcacggagctctcggacatgcaggccgacgggaatactcgcggcgtcgtcgccggcatcatcgacggcacgcggcaaattctctttctcatgatccccatggcgctttacctcgtggtgttctccacaccgctcgtgacgctgtaccatatcggcgcgttcaccgccgatgccatcgggcagatcgcgagctatctggctgtcatggccgtggcgctgccgttctacggggtgaacgcctacctgaacaagatcttcagctccatccggcgcatgggggtcttctcggtcatcaactttgtcgccgtggcggcccaggtggcggtcacgctgggggcggcctgggcctaccagcaggggctggacgtgacgctggagtccatcgcggcctcgaccatcgtctcctatgtgatcggcgacgtgatcgccttcgcgtacctgcggcgtcacttcggccccatggggctcggcgcggtgatgcgctcgttcttcgtggcgctcgccttgggcggtgccggggctgtggtgggctatggggtgctcgtgggcctcacgctcggcttcgggcccatggacggcagtgtcgcccgcgccttcgcctacgtggttgtcggcggcctggcggccctagtcgtgacgttcggccctgccgtgcgcggcaactggcccgaggcgtcgtttatctccggtgcagtgcggaaggtcgcccggaagctgaagcggtaacaacgagaaagcgtgattccatggcagtgaagttgaagtctccggctcagatcgaggccatgaaggaggcgggccgcgtgtcggcgctggcgctgcggcgtgtgggcgaggcggtcgagcccggtatcaccaccgccgagctggacgccatcgccgagaaggtcatccgcgccgagggcggcattcccgccttcaagggctacggcggcttccccggctccatttgcgcctcggtgaacgatgccgtcgtgcacggcattccctcgaggaagctcgtcctgcgcgagggggacatcatctccatcgacaccggcgccatcgtggacggctgggtgggcgacaacgcctggacgtacccggtggggaaggtggcgcccgaggtgcagcgcctgctcgaggtgggggagcgctgcatgtgggagggactcgacaacgcgcgtcccaccaagcgcctcggcgatatcgggcacgcggtgcagtcgctggccgaggcggccggctactcggtggtgcgcgactatgtgggccacggcatcggccgcgagatgcacgaggatccgaacgtcccgaacttcgggcgtcgtcgcacggggttgaagcttctgccgggcatggtgctcgccgtcgagcccatggtgaatgcgggcactcgcaaggtgaagcaatgctctgacggctggctcgtgcgcactcgcgacgggaagccctcggtgcacttcgagaaaaccgtcgccatcaccgaggacggcccggtcgtcctcaccaccgaggaaggccacgagcgacccgtgtaggcttatgcccccttgcgctcgttggcggcctccacgaaagcgcggaacaggggatgggggttagtggggcggctcttgaactcggggtgggcttggctggcgacgaagaagggatggtcgggcagctcgatcatctccaccaggcgctcgtcgggggagaggcccgaaatcacgagacccccttccacaagggcgtcgcgataggcgttgttcacctcgtagcggtggcggtggcgctcgtagacgatgggctcgccgtaggccgctgccgcgcgggtgccaggcaccaccttgcagggataggccccgaggcgcatggtgccgcccttgtcttccacgtcctcctgctcgggcatgaggtcgatgacgaggggcgtcccctccggtgccgcgtcggcgaactcggcggaagtggcgccttccaggccgcacacgtcgcgggcgaaggagcagacggccgcctgaagccccaggcagatgcctagaaacggcacattgttctcgcgggcgtagcgggcggcggcgatcttgccctcgaaggcgcgggcgccgaagccgcccggcacgaggatgccgtccatggcgccgagcactttctcagcgttcttgtcggtgagctcctcgccgtcgatgaggtgcacgttcacgtggcgccccgccgcgatgccggcggccacgagcgcctcgttgatggagaggtaggcatccggcaggctcacgtacttgcccaccacggcgatgtccagatcgcccgaacaggcgtccttcgccttcaggaaggcgcgccagggagcgagctttatcttgcggggcgcgagtcccatcttcgccagggccgagatgtcgaatccctgctcgtagaggctgatgggtacctcgtagatggacggcgcatcgggacaggccagcacgtcgtcggtatcgacgtcgcagaacagcgcgatcttctcgcgcacgccgtcggtgatctcgtggtcggaccggcacacgatgaagtcgggctgcacgcctaaggatcgcagctccttcacggagtgctgggtgggcttggtcttcacctcgtgggccgcggcgatatacggcacgagcgtcacgtggacgaacagcacgttgcccgggccggcctccttcttgaactggcgtgccgcctcgatgaagggcaagccctcgatgtcgccgatggtgccgccgatttccgagatgacgatgtcggcgccggactgctcggccgcgcggcggatccgctccttgatggcctcggtcacgtgcgggatgacctgcacggtgccgccgaggaaatcgccgcggcgctcgcgggcgatgagcgtctggtagatggagccctgggtgaagttgctctcgcgggagaggttctcgtcgatgaagcgctcgtagtggccgagatccagatcgccctcgtggccgtcttcggtgacgaacacctcgccgtgctggaaggggctcatggtgcccgggtcaacgttcaggtacgggtccatcttctgcatggtcaccttgtagccgcgcgccttcaaaagctggcccagcgaagcggcggtgatgcccttgcccagcgacgagacgacgcctccggtaacgaagatgtgcttggccatacgagtctccttatcattgcgagcgaatctcttgccatgaggcagcgcgcctgttgcgggctccgggcataaaaaatgcgcccgaagccgcgcgcccgcgcaacttcccaacgcttatccagcatagccccgaaatgtttccaacaggaaacggatttacagggtatttcttctgccgtggctttcttatgttgcttcagtcccacggcttctcgcgtctttccgaattcccatggctttcctcccgcgtcgcgggcctttcctgtgttggagagcgctttgtcctccatttttttggatttcccgaagtaggtgccagttgagggtcgaaatggcaaggaacagctgccagttgggggccgaaatggcagaaattgccagttgagcccagaaatggccggacgaacgagggggcttcgtgccatttcggggtcgaactggcattttctcacggacccgctgttaaaccaccattgac

SEQ ID NO: 10546 - DNA, 1310 bp, Unknown
  gut microbiota DNA sequence
ccactagattgaaaagttatccctatgcaaacaggacaacataggtattctgtttcaacaaatcaaaggagtggtgtgctagggtcatcgtgtagaatgcacactatagtaaagagaagggagccataaggtggacttcacgctgaccgacgggcagaagaagctcgtcagcgccttccgtacgttcggggccgataccttcacgccggagcgcgtggccaagtggtgccgcgaccagggtctgcccgatacggtgatgaaggagttcgtcgatctgtactacgagaccgccgagccggacatcgcacccgatctggcccacagcctgctctcgcaggtgctcatcgtggaggaactctcccgctgcgccggcacgacgctgccgttccagaacgacttgttcaacctgcagatcatgagcgggttcgccggggccgccgaggccgcctccatcgccgaggattatcgcgccgacggccgcctcatgttcgcgctggccatttccgagcccgacggcggatccgacaccatggccatgaagacctcgtgccagaccgtggacgggcgcctgcttctgaacgggcgcaagtcctacgtgaacaacggcgagtacgccccctatatattggtggccgccatcgacaaggacgcgggggatacgggccgctacccgtcgctgtccttctggctcgtgccgcgcaacgtgcccggcatcaacgccgtgcccatcagcaagatcggccagtccatgctgcccttcgcgctcatctccttcgacgatgtggagctgtcgccggagtggcgtctcgatgcgagcgagggagggttccagcagctgttccatctgctggaatacgggcgcgtgcttctgtgcgcctccagcttgggcatggcccaggcggccatggacgacgcggtggcccacgcgcgctcccgcaaggccttcggcgtgcaggtggggcgcttccagcagatagagacccttctcaccgatatggaagtgcgcctgcgcaacatgcgctccatggtgtaccgcgcggcctggtccatcgatgccgccgacgagaccgagcggctcgacgtggccctcatgaagcgctacgtgcccgaggcctcggtgcgggtggcctcggacgccatgcagattctggggggcctcggctacaccgagggctcgcgcgtgagccgcatctgggaggactgccgcggcaatcagatcgccgagggaacggaccaggtgatggtgtacatcgccgcgcccttgataatggagcactataggtctttctagaagcggctgtgagcattct

SEQ ID NO: 10547 - DNA, 43581 bp, Unknown
  gut microbiota DNA sequence
gtgctttctcgacaatcgcatcgtagcgggaggcccctttccgcgtgtaccgaaagtgggtctatgtcaatggtggtttaacagcgggcagcatgttcgcgatttcccgctttcaaaaaagcatgttttccaaataggcgagtccaaaatagcacattttccaagatacctgattaaaactgattgctccgtaaatgaagtatgaaaattggcaagcgtttgaactggtaaaactctatttccgcattccacacccccttacttctcgtctcatacaagttggaaaatgtgctttttttgttttactcgatcgcagtttcgaagatccccgccagctgcaagcagcagaccgccgtcgccgaggccctcgccgactgcaagcagcaggccggcctctagaacgcaaaagaaccccggttcgttctcaccggggttcttttcacgtgacccacaggtcgttcgtaacgtcagcgagcggctcttcctacacgatgccctgggccatcatggcgttggcgaccttctcgaagccggcgatgttggcgcccatgacgtagttgccctcgtgcccgtagcgcttggcggcgtcgtcgatggcgtggaagatgctcaccatgatgcccttgagcttcgcgtccacttcctcgaaggtccaggagaggcgctcggagttctgggacatctccagaccggaggtggccacgccgccggcgttggccgccttgcccgggaagaacacgatgccgtgctcctgcacgtactcggtggcctcgagggtggtgggcatgttggcgccctcggcgaggatcttgcagccgttcttcacgagattctccacgtcctccatgtgcacctcgttctgggtggcgcagggcagcgcgatgtcgcagggggtgacccacacgccgcggccctcgtggtactcgacgccctcgcggcgggcggcgtactcggtgaggcggccgcgctccacttccttgacctgcttgagcagcgcgacatcgatgcccgccggatcgtacacccagccggtggagtcggacacggtaaccaccttggcgccgagctgctgggccttctgcgtggcgtagatggccacgttgccggagccggagatgcagaccgtcttgccgtcgaaggagtcgccgttgcacttcaggtactcctccacgaggtacaccaagccgtagccggtggcctcggtgcgggcgagcgagccgccgaaggaaaggcccttgccggtgagcacgccctcgaagacgttcttgatcttcttgtactggccgaacatgtagccgatctcgcgggcgcccgtgccgatgtcgccggccggcacgtcggtgtcggcgccgatgtggcggaacagctcggtcatgaaggcctggcagaagcgcatgacctccatgtcggacttgcccttcgggtcgaagtcgcagccgcccttgccgccgcccatgggcagcgtggtgaggctgttcttgaagatctgctcgaagccgaggaacttgatgatgccgaggttcacggaaggatgcaggcgcaggccgcccttgtaggggccgatggcgctgttgaactgcacgcggaagccgcggttgacctgaaccttgccgttatcgtcgacccacggcacgcggaacatgatgacgcgttcgggctcgacgatgcgctcgaggagggctgcctcctcgtattccggatgggcctcgatgaccggctccaaggactgcaggacctcggtgacggcctggatgaactcgggctgctcggcgttcttcgccttcacctgttcgatgacgttgtcgacgtagctcaaaggaacctcctttatgcggaaagggctcgcggcggtgccacgatgcacctccgccttcgcgccgcattatagaacggggaatttccaaacgatgactaattaactgagccgaaacaaagcccgcgaatttgcgcacgcgggagcggcgaacgggctagagcgaggcgcacaccttcgaggaggggacgttcagggacgtgagcagcacgacgcccacctgcccgcgctccggggcgtagacgatgtgcgcgtttccctcgccctcgccgcggccgggctcggcctggtcgtcgtcggcgacgatgaccacgttgaagtcgtcggtgctcgcaaggcagctcaggcgcggcacgaggcagacgaaggactcggcgccggcggaagcgagctcgtcgtgcagcttttccagctgacgagccgaggcgtagtagtccacggccacgacgccgatcttgcggtcgccggccatgaggatgcgcggcttctcgtagcgggcgagatcgtccaggttcagcgtgaggacgccggcgcccttctcctcgtagaacgagcgcacatccgaggcgtagacgggccgctcgcgcatggacagcggcaaccgcgccagctcggcggccaccatctcgcccagcgtctcgggacgctcgtcggcgtccccgtccaccgaggggagcttcgtggggcgcagcgcgtccaggacgtcataggtgccgtcgaagacgatggccgtatatccggacatctgcccgaaggcgtcgtccacggcggtggcggccatgttgaaggagcggcccgtctcgaagtagcgcagaagcacgctgccgccgagcacgacgagcagcgcgaacacgagcagggcgactttttcgcgggtacgcttcttcatggggaaaattataccgaagccccgccgcgaaggcgcgacggggcacgaggttccatattccctcaccggggggcgaccctaatcactggatggtttccgcagggggcgaccttggtcgcccctcccgagcgaggttattccactcgagagggcagaccaaggtctgcccctacgggatagagtgcgacgcctagctggcagcggccagttggcggtcggcctccagcatgcgcttgacaaagtgcccggtgtaggagccctccacctcggccacctcctcaggcgtgccctgggcgacgatggtgccgccgcgatcgccgccctcggggcccaagtccacgatatggtcggcgcacttgatgacatcgagattgtgctcgatgacgagcacggtgttgcccgcgtccacgaggcgctgcagcacctccagaagctggcgcacgtcctcgaaatgcaggccagtggtaggctcgtccaagatgtagaaggtcttgccggactggcgcttctgcagctcgctggcgagcttcacgcgctgggcctcgccgccggagagcgtggtcgccggctggcccaggcggatgtagccgaggcccacgtcgaagagcgtctgcagcttgcgcttgatgcccgggatgttctcgaagaagtgcagggcgtcctcgacggtcatgtcgagcacctcggagatgttcttgccgcggtaggtcacctgcagcgtctcgcggttgtagcgctcgccgttgcagacctcgcagggcacgtagacgtcggggaggaagtgcatctcgatcttgatctggccgtcgcccttgcaggcctcgcagcggccgccgctcacgttgaaggagaagcgccccggcgcgtagccgcgggccttggcctcggccgtgctggcgaacagcgcgcggatgtcgtcccacagtccgatgtaggtggccgggttcgagcgcggggtgcgcccgatggggctctggtcgatgttgatgaccttgtccagcttctccaggcccgtgatcttgcggtagggcccggtgcggcgatgggcgtggttcagccggttggcgagcgccggcgccagcgtgtcggtgataagggagctcttgccggagccggagacgcccgtgaccacggtgagcgtgccgatgggcacctccagcgtgacgttttgcaggttgttctccttggcgccggtcatcttcagcgtgccgcggcccggcttgcggcgagcctccggcaccgcgatgcggcggcgccccgacagatagtcggccgtgacggagccctccgtggccatgacctccgccggcgtccccgccgcgatgacgtggcctccgtgctcgccggcgcccgggcccatgtccaccacgaagtcggccgcccggatggtgtcctcgtcgtgctccacgaccaccacggtgttgcccaagtctcgcaggcgctccaacgtggcgatgagccgctcgttgtcgcgctggtgaagcccgatggagggctcgtccagaatgtagagcacgcccatgagcccggcgccgatctgggtggcgagccggatgcgctgggcctcgccgccggagagcgtggccgtggcccgctccagcgtgaggtagtccaggcccacgtccacgaggaagcgcagccgctcgcggatctccttcacgatgggcagggcgatgaccgccgcctggcccgtgaagtgcagcccctcgaagaacgccagcgactcggccgccgacatctccgtgacgtcgtggatggacttgtcgttcaccgtgaccgcgaggacctccggcttcaggcgcttgccgccgcaggtctcgcagggcaccgtggcgaaataggccgacagcttctcgcgctgggcgtcggactgggcctcggtatagcggcgcttcaccgcggcgagcacgccctcccactcgatgtaccagtaggtgtcgcggccgtccacggtgcggtagtccacgcgcaccttctcgttgccgaggccatgcaagagcgccttctgggccttcttcggcatgtcctcccacggggtgtcggcgtcggtgcccacatgctgggccacggcgcgcagcacctgggggtagtagttgccgctcttgaacggcgcgatgacgccctcgttcagcgtgagggacggatccggtaccacgagcgagggatccacctcgtcgcggctgccgatgccgaggcagtcggggcaggcgccgtagggggcgttgaaggagaagtcgcggggctgcagctcgtccatggagtggccgtgctcggggcacgcgagggccagcgagaacaaatgctctccctccccgaggccgcccgtggcgcccgaggaggtgcccccggcctcgccgagcggtttcccgtccggcccgagcacctgcacgagcacgcggccctgcgccagcttgcaggccagctccacggcctcggcgatgcggctttgggcggattccttcagcgtgacgcggtcgaccaccacgtcgatgaagtgcttgatcttcttgttcagggtgacgggctcaccggaaagcttcacgatctcgccgtcgatgcgcacgcgggagaagccctccttctgcagatcggcgaagagcttcgtgaactcgcccttgcggccggccaccaccggggccatgaggatggcctttgtcgactcgccctgggcgtcgtcgccgaggcgcaggatgtcgtcggtcacctggtcggtggtctgcttcttgatctcgcggccgcactccgggcagtggggcacgcccacccgcgcgaacagaaggcgcaggtagtcgtagatctcggtggtggtgcccacggtggagcgagggtttttcgacgtggtcttctgatcgatggacaccgccggcgacaggccgtcgatggagtccacatcgggcttggacatctggcccaggaacatgcgggcatagctggagaggctctccacatagcggcgctgcccttcggcgtacatggtgtcgaaggcgaggctggacttgccggagccggaaaggcccgtgatgacgaccagctcgtcgcggggaatagtcaggtcgacgtccttcaagttgtgctcgcgggcgcctttgatgacgatctcgttggccattggctggatttccttcgcagacgtgaagcaacgggcgccgcgcgggccgcccgttgccgaattctcttgtttcgcctgcgtattctagcgattcgcgcggccgctggctagcaatttagggaacttttgttcgggttcacggattttgcatagatgagcgctcaggttatatgagcgcgagggcagcgacggaggcatcctcgggagcggcctcccccgtcgcgggctcgggcgccgaggactcccccatgcccttcatcttccggaaacgggacagcgtgaggcggccgtccttcttcttctcgctgggcgctcgcaggcagatcgccacgaacaggctggcggcgacgagcacggcggccatggcggcgaacacgaaggcgaaggaggtcgcctccagaaggatgccgcagaccacgccggtgatcgccgagccggcgtaggccacgaggttcaccgaggcgaggatggccgagacgcgcagcacgctcacgcgcagaagcagaaggcgcagcgacacggacaccgccacgcccatggcgaagctgaacagggcgcagtcgcccatgaacagaagctcggcgcccatgaggacgcatagcgccatcagcgccgtggtggccgtcacggccgccatggagacgacgagggtgcgcttgggctcgaagcgctgcacgagggggccgccgagaagcgacggcgccataatgagggccagaatgaccgacccggccagaggcgaggtctcgccgaaacactgctgggcgatgggcgccgagaacgactggtagaagcaggagacgagccaggtggccaggtagcacacggccaccacggcgaacaggcgccggttgtcggtggggatgtagacgcgcaccctcatcacggcgcgcagcgagagcgtctggtcgaggggctcgtgcaccacgggcatgaggaacaggcacgcggccaggatgacgatcatgatgccgtagagcacggcgatgctcggcacgacgtcgtagaggatgcccacggccaccgacccgatcatgatgcccaccatggcgccgcagctggcaacggtggacccccagccgaggtgtctctcccccacgcagtcgatgacgagggcggacacggcgctcatgccgaagccggccgagaggccctggacgaagcgggcggcgagcacggccgcgccgctgtccgccatcatgaacatgatgcagccgacgatggcgagcatgagggtgaggctggtcacgggagtgcgcccgaaggcgtcggagatgcgcccggcgagcaagagcgtcaaggccacgccggtgaggtaggtgaacatcgtgttggagatatccgccgtggtgagcccgatggtggcctggtagtcggcatagaggggaatcgggatcgccgtggcggcgaaaatggccagaaacgcgatagtggcgagcgcgaacccgcgcagggactgcccgtcggtgagctcctctttgtgcatcctttcctccgtttgaacgagatgtgccagcctgccttgcgggaacggatatcccgaaagggtgggtgaagtatgaacctcgcttcaggggaattcaagggattgcgctgagttttccgctcagcgatgaaacggccccgcaagccgcgcgagggttcagagtcccgtgccgcccgccgccgccttaaagccgccgacggcgggcgccgcgagcagctggccaagcgctccccgcaaccgacagcgagcgcaaaaggagccctctccccctgagggctcctgtgtgggtttccgctgtggtgtatccggaagctacatgacggcgtggctggcggactgcatgaggtagggaatgtaggcgagcacgacgagcgccgcccaaaacagcattttcgccttcttgcgactcatggctcctcccttccgcgcaatccgtccgatcgacggtccatctggatcgtcaccgtgattcttgcacaaaacacaggaggggaagactcgaaaaaaccactagtcacgatggcgcaaccgccccgatgaccccgcgcaacgcccctgttcgccgtttgtaaattacgcgcatatcggccgcagtgcgcccaaccgtaggaggcgacttacgcgcgcggatgggcgaggccgtggatctccttcaggcgctccggggtcacgtgggtgtagatctgcgtggtggtgaggctcgcgtgccccagcatgtcctggacgctgcgcagatcggcgccgccctccagaaggtcggtggcgaaggagtggcgcagggcatggggcgagagcgactcgtccaaccccgcagcggccagagcgcgcttgaacatcttgcggataccgtcgggcttcatctggttgccccggttgctgacgaagaagtagtcgctctgcctgtcgccgagcagctccggccgcgccttctcgagatagcgggccatggcctcggcgccccggcggctcaagggcacgatgcgctccttggcgcgcttgccgaacaccttcacctcgcgctcggggaagttcacccaggaaaggaggagcccggaggcctcggagacgcgggcgccgcaggagaacaggaattccaggagcgccgcgtcgcgcatctgcgccgccgtctgctcgcggggcgcgccgtcggcgtcggtcgggccgtagacggccagcaggcgctccacgtcgccgtcggacacgaccttcgggagccggcggtcgaccttgggggccgacagcacgctggcgggatcggccggggcgagaccggtcacgcacgcccagcggaagaacgtgcgcagagacgacaggtgccgcttgatggtggtgcgggcgtagcgcgcctggtcgagctcggcgaggtagcgcctcagctggcggtaggtgggagcgagcggatcgacgcccgcccgctgcgcccagcgcaggtagccctccatgtcctcgcgataagcgcgcaccgtatgggccgaggcgcccatctcggaggcgaggtgatcgccgaaccgcgccaccgcctcttcgacggacagcggcgccccgtcggcggcgtttccgccgccagcgcctttgcgccccatcacggcagcagccccgcctcggccagggcctccttgtagcccgcaagcgcctcgttgacgcggtcggcgtaggcctggtagcgggcgcgcttgttgcgcaccgggggcgagagcggagccatgagcccgaagttcacgtgcatgggctggtagtccttcgtcgccggatccgtggcgtaggccagaagcgccccgaacaccgtctccgtcggcagctccggcagcgcgatccccgcaaggtcggcggtcacggccagcgcgacgtgcagcccgctgcggatggcctcgcagtagccctcggtgccggcaagctgccccgccacgtagacggggacgccgaggacgtccgcttgcggcgtgacgagccggttacgacggtcgagcagccgcggcgcgtcgatgaaggtgttgcggtgcatgacgccgtagcgcgcgaactccgcctcttccaggccggggatcatgcgaaacacgcggcgctgctcggggaaggtgaggttggtctggaacccgacgaggttgtagctggcgccgtgggcgtcctcggcgcgcagctgcagggccgcccaagggcgccgtccggtgcgcggatcggtgaggcccaccggcttcagggtgccgaagcgcggggcgtcgcggccggcccgcgctatctcctcgatgggctggcaggcctggaacagctcgcgggtctcgaagtccttcgcgatgacgcgctcggccgaaagcagctgctcgatgaaggcgtcgtactcctcccgggtgaacggggcgttcagatagtcgccgccggcatcggcgtcctcgtagcggctttggcggaacaccttcccgaagtcgatggaatccgccatcaccaccggcgccgcggcgtcgtagaaggccagggcgtctcgccccgtcagggccataagcgacgacgagagcgcatcggaggtgagcgggccgctcgccaagacgatcgcgtcggagccggcggcaagggacggaatgtccgtcgcctcgcggcgctccatggtgatgcacgggctctcctccagctggcgcgtcacatcccgggcgaacaacgcccgatccaccgccaacgcgccgcccgcggccaccgcatggcgcttcgccgccgcgatcagcggcgatcccagagtcgcgagctccgccttcaagagccccgccgcgctgtcgggcttggtgctcttgagcgagttggagcagacgagctcggccgcgtcccccgtatggtgcacggcggtcggatgcgcggggcgcatctcgacaaggcgcacggagattccgcgcgaggcgaggttcagggccgcctcgctgcccgccagtcctgcgcctactatggttaccgtattgctcatggggcaaaaggataccaaacaacggtgccgtaaggcccgtcaattccgcttgggcgccccagcttctccctattgacacagccatggcctacaccgccgtccgcagggccggatgcgggccgtagcgcccgtcggggtactgggcgatgagcccgtcgcgctgggcctcggcgagccaaatcatgagccaggtgaacgtgtcgccagccggagcatggtcctcggccaactgacgcagggcctccatgcccaaaggctccgcttgcagcgccgcgagcagagcctcctcgccgcgatagggctgactcgccttgccgcgatcgtccgcagcctcggcccgctgctccttcagacaaccgaaggttgagaagagcgcgtcggcgaaggcttcgtcgtccacaatggggagcgccccctggtacagcaggcggttcgcccccttcgacgccgcagaggtgatggcccccggcaccacccatacctcccggcccgcgagcagcgcctcgtcggccgtagagaacgtgcccgagggcagccccgcctccacgatgagcgtggcccgggagagccccgcaatgagccggttgcgggcgcggaaggtgtggggctggggcgggaagtcccattcgtgctcggagaccaccgcgccgcctgccgccacgatgcgctggaagagccccgcattctccgccgggtacagctggttgcagccgcccccgaggaaggccaccgtgggcgcgcccgcggccagggccgcctcgtgggccacggcgtcgcagccccgcgcgcccccggagatgatggcgacgccgcgctcggcggcagccgcggcaaagcgcttggcgcagccgcgcccgtagggcgtcgcgcgccgcgcacccacgacggccagtccctcggccagcgcgccggggcggcccacaccgtacaggcgcgccggcgggtggggtatgctcttcagcgccttcgggaacagcgaatcctccaaggcaagctcgaagcgctccccttccaatctcattaccttcaccggcatcggtcactttcctcctattccatcgcgcacgcggaagttcacggcctccgcgatgtgcgcgctctcgatttcctgggattccgccaggtcggcgatggtgcgggccaccgcgagcgtgcgcgtgatggccctgccgctcatggcgtgcagctccgcctgggcgatcatgaagcggcgcggcccgtcggccaaggcctctatggagccatcgggctccttttgggccatctgcgatgcgcgccacgaggcgaagtcccgggccgccatcaccccctcccgcagctgcgcggagctcgtcccccgcctccgctccaaaatctccgccggacggacgcggcggacgtccagatgcaggtcgatgcggtcgatgagcggaccgccgatgcggttctggtagccccgaatctggggcaccgtgcaggtgcactcccgctcctcgtcgccgaagtacccgcagggacacgggttgctggccgccacgagcatgaaccgcgccgggaaggtcacgttgccgtcggcccgggtgagcatcaccgatccgctctccataggctggcgtatgccctgcaaaaccgagcttttgaactccgccagctcgtccaagaagagcactccgtggtgggccagggacacctcgcccggccgcagggggctgccgcctcccacgagcccggccaaggtggcgctgtgatgcggatggcggaaggggcgctggcccgcgatgatggaatcgatgggctcggcggccaccgaatggaccacggccacctccagcatctcgtcgggacagagcggcggcatgatggtggacactcgggaggcgagcatggtcttgcccgacccgggcggtcccatcatgagcagcccgtgaccgccggccgcggcgatctggaaggcccgcttggccgtctcgtggcccgcgacctccgcgaagtcgagcgcctcgacggccgccggggccgcccgtcccccgtgggccggcagcaccgccgccgcgcctccctcacgggccgcctgggccagcgacgtcatagcgagcagccgcacgtcgtctaagggcaccggatcgctgtcggcggcgcagacgaagtccagcccgaggcgccgggcgcagatggcgcaggcgagcgtgcccgccaccggccgcacccgcccatccagcgagagctcgcccacgtagagcgcgtcccgcgcccaagccggatcgatctgccccgtggccgccagaatgcccaaggctatgggaaggtcgaaccccgaacccgtcttgcgcagatggctcggcgccaggttcacgacgatcttctcccccggcatggagaaccccgctgcccgcagcgcggcgcgcacccgctcccgcgcctcctggatggccgcatccggcatgcccacgatggccatgcccggcaggccgccggaaacgaccacctcgacccgcaccggcaccacttccacgccgcgaaccgtcgcccccatgacggcgcattgaccccgcgccacggctcaacccaccgaataggcgcccagatggtgccggatgaaggcgcggtcgtcggagagcacgataatggccaccacatcgaagcgcaccacggcctcgccgaagaaatggtcttggatgtaggcgagggcgatgcgctcgtacttctcgcgcttggcccgggtgaccgcctcgctgggcagccccttgtcggcgttgcggcgcgtcttcacctcgacgaacacgagcgcctcgtcgttgacggcgatgatatcggcctccccggcgaaacaggtccagttgcgctcgaggatggtgtagccgttgcgctggaggaaccgcgcggccgcctcctcgccccgcgcccccagcgcctggttgcggcgtccctgggcgttcgggtcggcaggccgccgcttcctcgatccctccctcgccttgcgtttgggcgccgacgcggacttgggcttcttctccttaatcgcgggacgctccaacacgcccgcctcactgctcgcagccataaggtgcgctcctttcctctcgatggagcacaccttagtcgagcacgaccgtaaaaatgacgcgggaatgtcccgtttcgttcctcgcgccgaccgcactggcgtcgcaacagcgtcgcactagcgtcgcatcgacgtcgcaaaatccctagaacaggctctcctgggcggcgaaggagcagaagctgcgccggtggatgggacaaagcccccgctcacggatggccgccatatggccctcggagccgtatcccttgttcgattcgaagccgtagccggggtactgctcggcataggcctccatcacatgatcgcgcgccaccttggccacgagcgacgcggcggcgatggaggcacacttcccgtcccccttcacgacgttcacctcccgcggatcaagatgcagcgggttgccgtccagaagcacgacatccaccgcgacgccttgggcctccacctcggcgatggcggcggcaaaggcccggcgcagggccgccgtcatgcccacccggtcgatgtcggccggctccacgtactgcaccgtccacgcccgggcgcgccggcgcacttcgcctgcgatggcctcgcggtcctccggcctcacctgcttggagtcgttgagcccggcgatggggtcgtccgcatccagcaccacgccccccacggccaaaggccccgccaagggcccgcgtcccacctcatcgagcccgatgaccaccgaccctccccgctcggcggcgagctcccgctcgaaagcgtacatccccgcgagccgcgcctcctctgcggcctcggcctcaagacggcggcgcgccacctccacggcggcccgtacgcccttgcgcgtgtcggccacaagcgaccgctccagcacggcgaaggcggccgcatcggcctcctgcagcttccgtcggatctcggggacggtcagatcaatcacctcgggctccttcccaccggcgaggaatacgaaaaagggcccccgaaggagccctcgcaaacacaaaagataaggcctagcggaacgccttctccttgatcttggcggccttgcccaccttgttgcgcaggtagtacagcttggcacggcgcacatcgcccttgcgggtgacctcgatcttctcgatcttcggggaatgcacggggaaggtgcgctccacgccgatggagaagctgatcttgcgcacggtgaaggtctcgcgaaccgactcgccctgacggcggatgacgtcgccctggaacacctggatacgctcgcggttgccctcggtgatgcgatagtgaaccttcacgttgtcgcccacgtggaactcggggaggtcctgcttgatctgctgctgctcaatagcgcgaatgatatccattgccttttcctactctatacttctaaatggtcttgcatcatttctcgtttggacgcgatttgacagtatatcgcccctataccctcggcgcaagggaaattatcgcgcctttctgggaaagtccacgaacggcacacggaagctcgaagcggcgcgacaaaggagctacttctcctcttcctccacgatgacgaactcgtcggcgccttccgtctcctgggccacgagcatctgctcgaacatggaggccgtggccgaaaaatcgctcggcagcaccaccgtggactggcggccgttgcgggcgaactcgctcatcatgtcggtccactgggtgaagatgaacagctggttggcctcggccgccgacacgccggagctcttgatgaccgcaagcgactccgagatgccgtcggcgatggccttgcgctgggcggcaatgccccggcccgcctgctccatggcctcggcgcgagcccgtgcctcggtgaccactttgatgcgctcggcctcggccagcgactgggcggcctccttctcgcgctgggcggagttgatgcggttcatggactgctccacgtcggcgggcaaatcgatggaggtgatgagcgtgctcaccacgtcgtagccgtaggccaccatgaggccggaaacggtctggttcacgtccgacgcgatggcgtcctttttgtcgaagacctcgtcaagcgtgtactgcggcacgctggagcgcagggcgtcgatgaggtaggagcgcatctgagccgtggggttggccagcatgtagtagctgcgccacacgcccgagggctgcccgttggccgccggctgggcgctcacacggtactgggcggcgatggccatggtcaccgtcacgttgtcgcgggtcttcgcatcgatcccgaactgctcctggcgcgtgcgcatgtccaccttagcggcaatggtctcgaagaacgggatcttaatgttcaggcccgcgcccacggtgcggttgaacttgcccagccgctcgatgatgtagacgctctgctgcggaacaataaacagcgcctgaggcagaagcagcaccaaaagaacgatgatgatagcaagtccgatcataggattcctttcgtcgagggggccaggcgatggattggcaacgcctcgcctgattcgcctcccatagtactacaatggagcgaacctaccgcgaagtttaaggagttgccgtgatagaaccagcccgcgccgccttcctgctcatcgatatgcagaacggattcatcgacggcgcctcgcccctgtgcatcgccggtgccgccgccaccgttcctgcctgcgcccatgccctggccgccgcccgcgagcacggcctcgccgtcttccacgtgcgccgcgcctacgctgccgacggcagcgatgtggaggccgtgcgctgggaagcgtgggcagaagggggccggccgctttccagcgccgatccgatgagcctttcgtgcccgtctgagctggcgccggcccctggcgagcccgtcgtcgtgaagccgagctggtcggccttcttcggcaccgatctggacgtcctgctgcgcgcacggggcatcggcaccctcgtgctcgcgggcaccaccacccccaactgcgtgcgctcgacggcctacgacgggctggcgcgcggcttcaacgtcgccgtcctgcgggacgccacctcctcgcgcagccccgaagcacaggaggcgaatctggcggacatggaggccgcgggcatccagcttatccacaccgacgacttcgcggccaacgggcttctgcacgtccgcgacatcgaggccgaggtggcccgggccgtggccctggagctggaggcgaaggcgcggaacacggaaacggacgcggcagcggatacggcggccgcaaatggctcgggggctcccttgccccctaccccgacgctcgagtccatcgagaccgtctctaccggctggatcaacaagtaccacctgcactacacgctgcccgacgggcgcccctacacctacgagggcgtctcccgcaaggggcccgagcgctacgaggccgctttggaggccttagggagcaccggtgcgcccgaccccgacgccgtctgcatcgtgccccttctgcccgacggctcggtgctgctggagcgcgagttccgctatccgctgaacagctggtgcgtatcgctgcccgccggcctcatcgacgccggcgagtctttggaagaggccgtcgctcgcgagctttccgaggagaccggctaccggctgcgcgacgacatcgccccggcggtgcgtccgctgccccagcccggcttctcgtccacgggccttaccgaggagaacgtccaggtggtcttcgcccaggtggaggccgccggaaaagcgcgccccgacagcgccgagctcatcgagcccttcaccgtggcccgcgccaacctgcgcgccttcctggacgccaaccagctccccatcggcacccgctgccagctcatcctggagttgctcgcgatctagcatcgccggaaccccacatcctcctctctcggtaagtaccgagcggcgccacaaaatggcggccgacccttcgtgaaccatggaaggcaacgaaaaaggcgacgacctccgtcggtcgccgccttccgtctgcctcgcatcgcgtcgcgctcgcgcgatctctcggggctcctcgttctgtgctcggcgctactcgcccagaagctccgcgaggtcggcctccggggtggtgatgggggcgatgccgtagttctcgacgaggacgtcgagaacgcccgggctcacgaaggccggcagcgtggggccgagcttgatattccgaatgcccaggtacagcagcgtgagcaggatgcagacggccttctgctcgtaccaggacagcaccatggacagcggcaggtcgttcacgccgcagtcgaaggcctcggccagggctacggccacctggatggcgctgtaggcatcgttgcactggcccatgtccatgaggcgcggcagaccgccgatctcgcccagatcgaggtcgttgaagcggtacttgccgcaggccagggtgagcaccaccgtgtcgtcgggggtggccttcacgaactcggtgtagtagttgcggcccgggcgcgcgccgtcgcagccggcgacgaggaagaagtgcttgatggcgccgctcttcaccgcgtccaccaccgtgtcggccacggagagcaccgtgccctgggcgaagcccgtggtcatcgtcgtgccgccgttgatgccgggaatcgtgtggggctcgtcgtagccgcccagctccagcgccttctggataaccgggccgaagtccttgtcggggccgatatgcgtgcagccggggaaggcgacgacttccgtggtgaacacgttgtcggcgtagctctccttgggaggcatgagacagttggtggtgaacaggaaggccgcgggcacgccgtcgaactccttcttctggttctgccacgcggtaccgaaattgcccttgagctgcgggtacttcttcagctccggataggcgtgggccggcagcatctcgccgtgggtgtagacgctcacgcctgtgccctcggtctgctccagcagaagcttcaggtcgtgcaagtcgtggccggagatgacgatgaacgggcccggctccacctccatggcgacggtggtgggctccggcgtgccgtaagtgcccgtgttggcctcatcgagcagcctcatgcagccgaggttcacctcgcccaccttcagcgccaggggcagaagcgcgtccaccgagcccggctcggccagctgcgccagggcgtcggcgaagaactcgtcgacagtcgcgtcgcggtagcccagcacccgggcgtggtaggcgtaggccgccgtaccgcgcaggccgaacagcacgagggacttgagcgagcggatgtcctcgtcgtcgccccagatctggtcgacgtcgtagtcggagaccggctcgatgccggccgcggcggccacggcgaccgtctcgacgcgcactgcgtccttaagcgcggtcacggcctgcccgtcgaagttcacgttggtcatgcaggtgaacaggccgtccacgatgagatcgcagatacggtcgttcttgacgccggcctcccgggccgtgcgggccaaagcgatcatcgccccggtcagcgcgtcctgggcatcggccacatcggccggcttgccgcacacgccggcgccgccggtgcaggcctcgcacttcgccacctgctcgcattggaagcaaaacatttgctctgtcgccatagacactccctttcgggtcgcggcccttgcggccgtgttccagtagatagacggcaccgttgcgccgctgttgtgaaggtactggcacggcagggcattgtatgttgtaatcacaacaaacgaagcttccttcaatgaaaaggttgacccatggaacgaaacgccttcctggctggaacgccgctgttttcgggcgtggcatcgcaggaggtcggcgcgatgctcgattgcctcgatgcccatgagcgccgctatgcccagggcgagcgtatccatcatatgggggattcggtgtccactgccggcatcgtactcacggggcgcgtccgcatcgagcacgtcgacccctggggcaacgtgagcgtcgtgggcatgcgcgggcccggtgccatgttcggcgaggcctacgccgccgccggcgagccgctgctcgtggacgtcgtcgccgaccaggactgcaccgtcctcttcctgaatctcgcgaaggtggtcggcccctgctcgtgccgctgcgaccaccacgccctcgtggcccgcaacatgatcgccgccatcgctcggcagagcctcgccctctcgcgccgcatctttcacgtagcgcccaagtccatccgcggcaaggtgctcgcctacctctccaatgaggccgagcgcaccggcacccgcgagttcgacatccccttcaaccgccagcagctcgccgactacctgggggtggatcgcagcgcgctatcggcggagctgtcccgcatgcagaaggcggggctcatccgatgccgccgcaaccacttcgcgctgcctcactccccctcgaacagcaccgtggagaagtagcgctcgccggtgtcgggggccagcgttaccacggtcttgtccgggccgagcttgcgggccaaccgcagagctgccgccacgttggtgcccgaggagatgccgcagaacagtccctcttcccgggcgaggcgccgcgcgcacgccagagcttcctcatcggtcaccacgacgatcccgtcgatgagtgaggtatccatgatggcgggcaggatgccatcgccgatgcccatctgcacatgggtgccgatggcgccgcccgagagcagtgcggcatgctcgggctcggcggcccagatctgcacctcggggaagaccgcgcgcagctcggagcctatgccggtgatggtgccgccggtgccaaacccggagcagaagccgtcgatggcgatgccggccgcacacacgtcggcgaggatctccgcggccgtgccgtccacgtgggccgccaggttgtcgcggttcacgaactgctggggcacgaacacgcgcggatcttccgcggccatcttctgggcaagcgcgatgcactcctcaatgcacgcgccgatgtcgccctcgtcgtggacgcagatcacctcggccccgtaatgctccatgatgcgccggcgttctaccgagcaggagtccggcatgacgatgcgagccgcgtagcccttcacggccgccacaagggcgagccccacgccctggttgccgctcgtgggctccacgatgatggaatcggatgccagctccccgcgctcctcggcgcgctcgatcatcttcagcgccgtgcgcgtcttcaccgagccgcccacgttcaccgcctcgaacttcacgaacacctgggcgtcgtcgggcccggtcatgcgccgcagccgcacgagcggcgtcgatcccacggcttccagaacgttatcgcagatcatagcttcccctaacttccggggtcatcgttttccacgacagattctagcatcgggtctcccccgccccctgctccgtcgcctcgaaacgccaaatccccgccccgaggggcaggtaccccgacatagcaaaatcgccgccccaaaggacggcgattcaatttcgaatggcgggatgtacgagactcgaactcgcgacctccgacgtgacaggccggcgctctaaccaactgagctaacaccccgaatggtgtcgtgctgaaaaatggcgggatgtacgagactcgaactcgcgacctccgacgtgacaggccggcgctctaaccaactgagctaacaccccgtgtttcagcagcccgtatagtttaacagaatcgctcttccgcacaagcccctttttcgagattttttcctactgtgcctcgcgataggagccctcgaaggtgaagcggcccatcttggtgccgccgagcacgtgaatgtgcaggtgattcaccgtggccgccgagtcggggcccgtgttcaccacggtgcggtagccggactcgccgacgcccttcaagcgcgccacctcgggcacgacgctcatcatatgcccgatgacctcggccggcacgccggcggccaagttgtcgtagtgggtcttcggcacgatgagggtgtgcaccggcgcctcgggctcgatgtcgtcgaaggcgtagcacacatcgtcctcatataccttggccgacgggatctcgccggacacgatcttgcagaacaggcaatcgtccatgggtcttcctttcatctcctgacttctacatcatacccgaaatcggccgctactgcccgtcggctgcgcgctggtcgacgcgcaggaaggtgatcggccgcagatcctccgaagcgtggcctgcggcgacagtctcgcggacgagctcgcgggcgaaggcgtcggcgcgcaaggatcccgtgggcttggcctccagagaaaagcgcaccgtggctccgtccagggacaccggccctacaagaaagtcggacggcacgagcgtcttctccttcttcttgcgcacgacggtgattgcctcgggaaccacgacggcacgcggggcctcggagagcacgacttcgtaggtgctcaccggcagcgccacactggcggcggcatcccgcgcctcgatgtagcgtgcctccgtggggtacaggtcggcggggctcgcctcctgcaacgccgtaagggcacggggcgccggtacgtagtcggtgaggaacagatcgaatatctcggcggtgcctcccacccccacgggcagagccgccccgaaggcaatgcgcatatgcggcgaaaaaccctggctcaccgcgaagggcagctgcgctcggcgcacggcgcgctcgagggcgcgggccagctccagatgcgacagcatggccaaacgtccagtctcatggaaggtgacgcgcaggcggaacaaacggggatcggccattatcggatcgcctccttatcggtagatccttcagcttgccgcgcttgatcgggatggcatgggggctcggcctctctgggatgcacgaccttgcggtacggattggccgccggggccgcttccttgccttcgcgctcctgctgcagctcgatgtcgacgcctagcgtggggcaggcgccgcaggcggagcagttctcgaaggtgcagtccggcgtggtaatgccggcagcggcgcgctccctctcccgcgcgaggaacttcggcgagaccgcggcggtgatgtgcgcccagggcagcacgtagtcggtcgggaactcggcctgggcgatcgcggcgggatcaagccccagctcctcggcggcgcccgtccacgcctcttcgttgaaaagctccgtccaggcgtcgaatcgggcgccgcggcgccacgccgcttcaacccagtcggccacctcgcggccgccgcggctcatgaccgcctcgacgaacgacgtcgcggggtcgtggtagtgcacgtccacggccttgtacttcaccgagcgcttgagcagtcccacacgccgcagcgtctcctccggggaaatctggccgtcccattggaagggcgtctgggccttgggcacgaacaccgcgcaggacacgctcatgcgcacgctgccgcgctgctcgggcggcacggcggccttggcgcggtcgtaggcgcgctgggccagactcgcgatgcccttgatgtcgtcgtcggtctcggtgggcagccccaccatgaagtacagcttgcagcggcgccagccggcggcgaaggcggcgtcgatggcggcgaacaggtcgtcctcggtgacgttcttgttgatgacgtcgcgcagccgctgggtgccggcctcgggcgcgaaggtgaggccgcccttcttctggccggccacgagctcggccatctccaccccgaaggcgtccaggcgctgggagggcacgctcacgcgcacgccggcccctgcgcagtcggcgttcacccgcgagaggatctcggcgatctgggagtgatccgtggaggagagcgaggtcaggctcacctcgtcgtagccggtctcggccaagccgcgcgccacggcgtccacgatgttatcggccgagcgctcccgcaccgggcggtacatcatgcccgcctgacagaaacggcaaccccgcgcgcagccgcgcaggatctcgacgttcagccggtcgtgcaccacttccgtatagggcacgatcatgggctcgagcgccggactgtcggcgaaaccctcgaagacgcgcttgtgcaccacacgcggcacgtcgtcgaacaggggctccgcccagctgccggcagcctgggcctcgtcctcgctgcgccagcagtacaggctcggcacgtaggcgccccccacgcgtcgcgccacctcgcgcagaatctcggcccggggcgcgccggatgcgcgcagctcgcggatgagcgccagcacctcgggcagctgctcttcgccctcccccaccaagatgacgtcgaaaaacggcgcgtagggctccgggttgtaggcgcacgggccgccggcgagcacgatggggtcgccctcggcgcggtcagcagtgcgcagcgggatgccggcgaggtccagcgtctccagcacgttggtggcggccagctcgtggggcagcgtgatgcccaccacgtcgaagtcggccacgggccggcagctctccagcgagaacagcggcacgccctcctcgcgcatgaggtcggccatatccaccgcgggcaagaaggcccgctcggcccccatgccgcccatggcattcacggcgttcacgaggatgcgcacggcctggttggcctggcccagctcgtaggtgtccgggtagatcatgcagaaggcgaaatcgccctcggccaccggcgcggcgcagccccactcgtggttcaggtagcgggccggccgttccacccgggagagcaaaggctccacccgaggccacagatcgcacctagccacgggcgtctcccttgccagcgcccttccccttgccgcgcagggcgcggaaggccgaggccccggccccgcgggcggcctcgatcaccttgccgccggcaggggttgccgccgccttcgacgcggcctccacggcctcgtcgcgggccttctgcaccaccgacgccacgccgacgatgtcgccgccggcctcgaagtactcgatggccgcgtgccccatggcctcggtgcccgcaaatcccacagctcccttgatggcccagccgagcaccggcaccacgccgacagccgtgcgcgcgatgttgcggaacaaaaacgccccgcccacaacggctgccagctccttgatgcgctcggccgacagcggctggccgtaggcggcggcgatctgcagcagcatcttcgcctggttgagcgtcatgatgggcatgtcggccccggggatgaacaccaccacgcccacgccggcgttctgcaccgaggtggcccgcaccgcgtccaaggacagcgggcgccgcacgaaggggaacgccagcgcgaaggcgaggcgcttgtccttgcaggcggcgatgatccactcccccatgcggcggtccagcgttgaggcgccctccccgtccagcggaatgggctcggcatcggcgggctcggtctccacaggcagggcgtgctcgatgtcctcgatggccgcctcggccgcgctcgccgcctcaaccgctgcggcattcggcgcctcgttggcggtgctgccagccgtgatgcggcgtgccagcgcccgggccgcgtccccgaagggcgtggggttggtcatgttcggcgcgacgatgtccccctcgggcacgggccagccggccgcctcggcagctgcggccacggcacggggcgctgtggtggccaccatgaccggaatgccggcgccgcggatgtgcgccgcctgctcgccgatgcgcggcgaatccccggcgacgatgaccgccatgtcgtcggccccgtagggctcggcgagcaggttgtcgtccaaatagccgatggtcacccgggtcttggcccccgcgctcgcaaaggcgctgcgcacgtgacccaccacatcaccgggggccgcctcgtcgatgtagaccgacaccgccagaggcgtgttgcgcgcctcgtcgatgtcggtggccgccttcaggagggcggggatatccaggggaagattcatgaggccttccttccgtgagagggagtccgggcaaagccggactgcgtggacgtatgggagtacaccgagccgatgagcccgatgagcgcgaagttcacgaccatgaacgaggagccgtagctgacgaagggcagcgggatgcccgtgatgggcataaggccgcagtccatgccgatgttctccaaaatctggaagagccacatgccgatgacgcccatgacgatgagcatgccgaagaggttgtcggcgcgccgggcgatggagaggcacgccacgatgagcagggcgtacaggccgatgagcgccatgacgcccacgaacccgaactcctcggccagaacgcagaagatgaagtccgtgggggcctcgggcagaaagccgtgggtcgactgcgtggcgttgccgatgcccttgccgaacaggccaccgctgccgatggcaatcttggcctgggcgaggttgtaaccgtcgccggagaggtccccctcggggttcaggaacacgagcaggcggctgcgctggtagttcttcaagaggcggtactcccacgtgccgtcggactgctggtacttcagcagctcgtcgacggcgaacacggccgcgatggccgcgatgccggcgataagcgtgatgagcaggtagcgccccttggcgcctcccatgacgagcaccaccgccgagatggccaggtacaccagacccgtgcccaaatccggctgggtcatgatggccgcgaacggaacgagcagcatcccgagcaccttgcagtactcgcgccaatcgtccagcgtgccctggtagcgggccagaaggctcgcggcgaagagcaccaccgtgaccttcgcgaactcgccgggctgcacctgcatgccgatcttgatccaggacttcgcccccatgcccgcgtcggtgccgaggcccggaatgtggggcagaaggatgagcaccacgttgatgacgagcagcgccgtggtgaggttcgaaagacgccggtagtcgaaggcccacagggccaccatggccacgagccccaccgccacgccctgcagctggcgggtgaagttgtagtcggcatccccctggactgccgaccagcagaccaccaggccgtaggcgacgagcaccgcgacgacggcaaggaagccccagggcacccgcgagagcagcgagggtgcggccgggcgcgccgagccgtgggccggtcggcgctggctggaatgaaccgagtggatttggggaagctgctgggccatgctagtcctcacggccgccggaatcgttggcgatggcgaccgactcgccgggcgagccggagatgcgcgccggcttcacctgggacgtgccggcggcgcaatccatgagcgcccccatgacctcggccaccaccggcgccgccgtatccgacccgccgccgccctgctccaccacgcaggccacgacgtacttcgggtcgttgtagggggcataggccacgaaccaggccgtgtcgttctgatcctgcttctcgccggtgccggacttgccggccgcgtcgattcccagctcctcgaacaagggccccacggaatgggactcctgcaccatgccgtgcagcgcgtcgcgcacgtaggccagatgggcctcggtcacctcgggcgtgcgctcgacgaccggctcgtaggtgacgaccgtctcgccctcgctgttgcgcacctccttcagaagatggggccgcatgatgcggcccgtggccacgccggcgtaggcgcaggccacctgcaaaggagtcacgagcacgtcgccctggccgatgatcatattggtgtagtcgccgccgcggaaggtggcctcggagggcacgttctgccagcgctcggccttccaggccggtgtggggatgacgcccacggcctcgccgcccaaatcgatgtcggtcttctcgccgaagccgaactgccccaggtagtcctggagcgccgtctccgatatctcgccggtgccggcgggcccgtggtcgtagaaagccttgccgatctcgtagaagaccgtgtcgcaggagttcacgatgcccccgtgcagatcgagcgtcccatggccgtcgtgcttccagcagcgctgcacgtccccggtgccgaagccgtcccatttgcccgtgcagttccacgagctgccctccgtggcgaagccgtactccaggccggctaaggaagtgaaggccttgaaggtggaggcggccatgaactggccggacaccacgttgttgttcaggggggcgtaggcacctttctcctggtatttgtcccacagctccgtgggaatggagccggtgaagttcgtcgggtcgaaggtggggaagctcgccatgacgagcaccgacccgtcggtcacgtcgagtgccacgacggcgcccttggagcccttgcccgtgccgatgacgccgcccgatggcgcgatgagcttggccagggccgcgtcggccacgtactgggcgcgcgcgtcgatggtgaggtagaggtcgttgcccttggtatccttgatgtcgctcatgaccgagatgcgccgaccgttggcgtccaccatgacctggctctcgccgtgctcgccggacaagtacgcgtcgtaggtggcctccactccggcgctgccgatggtgtcgatggcgagcacgtcgcggccggcagcctggttctccagagactcgggagtcgccatggacgtgtagccgagcacatgggccgcgagcgccccgtaggggtactcgcgctgggagcgctcctccacggtgatgccggggaaggcgtcggcgtgctcggcgatgaaggcgacgtcgcgcaggcggacgtcctcccccaccacgcgcaggctctgggcgccggcggcggcatcgttgatgcgctggagcaccacgttggcgggaagccccagcaccgtggagagccgtcgcacgacatctcggttgtcggccacctccgggtcggccacgacggtctggctcgggcggttcaccaccaaagcctcgccgttggtgtcgtagatgcagccgcggggggcgggcgtcttcaccgtggtgtacaggttctcctccgccgcctgggcgtaggcctcagatcccgcgatctgcatggaccacagcttcgccgacagagcgccgaagatggccacggccgccgccgccagacccgcgaagcggcgtcccagctcgtcggagggcttcttagacgcggccccgggctcggagctggccacggtgacgtcgccctcgcgggcggcctgggccttggaacggcgctcgaaaggcgagcttcccacgcccacggtggaaagttccgagactcccttggcgcgcccgaccgagggcgtctccttgcgggcgcgcagggcgagggccgctgccaccgccacaatgacgacgaccgccgccagaacggcgacgatgatagctacgagcacggctcccccttcctagcgaaggaccggcgtcccgggttggacgcgcgggcgatcgaccatcacccgggcggcgatcggatacagcaaaaggccgatgacgcagtcgtagagcatgcagggcagcgtgcggtagaggaaggcctcccccaagggcacgtcggcgccgcagaccacgacgatgagcccgtacatcacctcgacgagcatgatgcacgccagcatgatggccaccggcatgaacagggtatcgttgttgagcgccatgaacagccgcgaggccagaaacgttaccagcacgagcacaaaggccatccctcccacaggaccgccgcccatgaggtcgaagagaaggcccaggaccagcggcatgaccgacccggccgaagccggcgtggccacggcgcgcacgatgcagaaggccacgatgaagttgggcacggcctcgaacagcgtgatggccggcgccacggttatctgcagaagtacggcgatgacggcgccgatgacgcccgccaccgtctcgcgggaaagttccatcatgcggcctcgcctccttcggtgccgtcggagcggcccgcatcgtcgccggagccgtcgccgctgccgctgtcatcaccaccgccggtatcgttgccgtcgccagaatcgcccgagtcggagccggacgccccctcgccgccgtcggcgctcgtgggcgccgtcacggtgcgatcggcggcatcgtcggccgcggagaacaccacgagcgcctcttccatgaggctcacggtgtcgttgggagccacgacgatcttgcgggtgtcgctaccggcgctgccctcgacgcgcaccacggtgccgatgatgaggccccgggtgtagctgccgcccaggccactcgtgaggaccacgtcccccacctgcacgttcacgtccgcgccgatgttctccagatagagcaggccgtccatggagccgcgcacgatgccctcggcccgactcgactgcaccatggcggccgccccggactgcgggtcagtgagcaggcgcacccggcatgagccgccgtccacggagatgacctggcccacgacgcccgtggggccgagcacggtgagccccgtttccacgccggagctcgatccgacgtccaaggtcaccgtctggttccacgcgtcggtggtccgcccgatgacgcggccggacacgccggtgatctcgtaggtgtcgcgcaggttcagaaggccgcgcagccgctcgttctcgagacgctgctcctcggcggcggccagctgctgcacgagctgctcgttctgctggcgcaacgtcgcgtaggtctcctcggtgacgccgccctcggccgctgcggcgccggcatcgtccacggcctcggtcagaggcgcgctcgcccgctgcaggggcaccatggcgccttccacggcggactgaagggaatgcaaggggccggtggcaccttcggcctggtacaggccgacgcacaccagcgagaccgccagcgcgataatgagcgagagccggcccgtggaggccggttcgtgttgctgaaagttgagagccataggaagcgaatgacctacttcgagcgcatgagcgtctgcttgagggccgtcggcgtctcaagcaccttcaggcagcccgacaccacgttggtcagcgccgtctcggacacccacacggggatctcaagcttgtcggtgaggtagcggtcgaggcccgagagcaggccgccgccgcccgtgagcaggatgccgttctggatgatgtcgctggccaggtcggggttggtcttcttgaaggtgtccttgatgtgcagcaccatctcctcgatgggggcctgaagcgccgcgcgcacgtcctcggactggatggtgacctccttgggctgctcggtgtagacgtcctggccggagatgatcatgtcgcgctcgcgcccgtcctcgaagggcaggatggagccgatcttgatcttgatgacctcggctgtgcgctcgccgatcttgatgccgagcagatcgcgcaagtgcatggcgatggcctcgtcgagccggttgccggccaaacgcagactggaggacgtcacgatgccgccgagcgagatgacggccacctccgtggtgccgccgccgatgtcgaccaccatggacccggtcggctcggtcacgggcagatcggcgcccatggcagcggccatgggctcctcgatgaggtaggcctggcgggcgcccgcctgaatggtggcctcgaacacggcgcgcttctccacggaggtggcgccgcaggggatgcacacgacgatgcggggcttgggctgccacgggtacttgcgctcggccgccttgttgatgaaggcagagatcatggcctcggtcacatcgtagtcggcgatgacgccgtctttgagcgggtgctcggcggagaacgcgtccggcgtgtggttgatcatgttcttggcctcgtggccgacggccagcacgcgctgagtggacttttctatggcgacaacggagggctcgttgatgacgatgccctcccccgtaatagcaacaagggtattggcagtgcccagatcgatggccatgtccgcggacatctggccggtcaggcccgaaaaccaatcaaggaatgacatacaggcaaacccttcggatacgtataggttacagtcagccttagattttatcacacggggcctaggggcttagaaactccataggtaggcttagtgcacgctgcaggagaggcaggggtcgtaggcgcggacgagcttctccacttccagggtgatgaggtcggcgtcgtagcccccggcgaccatcttctcggcgagctggcgcatgtccgcttccaagttcgcgatgttctgggccgtgggcgtcatgatggaggcgcgctcgatgcggccctcgccgttgatgtccaggatgtggaacagcgccccgcgcggggcctcggtgaatcccacgccgcgaccggcgcgcaccgtgaagggcaccggctcgctcgacccctcgaactcgtcggcggccaggcgccggcagagcgctgagcagcggtcgagcacgtccaccagctccaccgcctgggcgatgttgttggcgaaggggttgtactccggagggcgcagccccgccttggcggcggcgtagcgcgcgtccttggaaagcgcgtcccagctggcgttcacgcgggccagggccgccgtcatgtagggatgccccgtgcggcgcgcccgggcgaggaaggcggcagagtgccccaccgggtactcctcgatctcctcttccacatcctgggcactgaaatcgtagccggcgcgaacgaagcgcagggtgtcggaggtgcacaccgggtaggcaccgggcgccaccatggcgagcaggtcgccctccgtctgcacgtccacggtgtcgaagtcgcggaacagatcgacgctggctaaggcgaactcgcgcgtggcatccatggcctcggccagacgcaggtactcgtcggcggagatctcgtgggtgaacccgcccaccaccgccgtgatgggatggatggaccggccgcccaccaggatgcacagctcgttgcccagcgccttcagccccaatgcgcgctcgaacagctccgggttgccctcggccaacgggaacaccgacttgtggcccaggaagtccggagcggcgaacacgaacaggtgcgtgccgtggttctgcaggtaggagccgtagagcagaagctcccgcagggcctcggtgcggtcggtcacttccacaccgaagacctgctcgatggcgcgcaggtcggtgacgacgtggctcgacgagcagatgccgcagacgcgggaggcgatgtagggcacctcttcgaaggagcggccccgcaccatggattcgaacaggcgcgccggctccaccacggccatctcgcaggtcgtgacctggccgtcctcgataacgaggcggatgtcgccgtgcccctcgacgcgggcgatgtggtcgacggaaatctcggtggcggccatgaggttactcctccccttgtgcggcgtttatcgccacggcgttgaacatctccagggcgtcgttgaagcgcgcgacctcaaggccgcgctttcccacgacgtagcgggcggcctccacgttggaatcgggagagagccccgcgcagccgttgcagggacggcccagcgccgggcacttcgccccgcagccggcccgggtcacgagtcccaggcacattacgccctgcttgtagaagcaccccttctcgttgcgggagcactcgccgcacagggccgaggtggccggcagccggttgcttccatagagaacgccgtcgagcacgcgcacgaactcgaaggggtcaatcgggcagcagcgcacctctgcgtccacgtcgatcacgtccgacacgggccgcggcgccaacagatcgccgcaggcatcgggcgccgcatcgccgtagacggcctccacatgacccgccagatcgcccgaggccatgccgggaatgccgccggtgacggcgcacgatccgatggcgatcacgctccccgcgcgctcgcgggcgcggcgtaccgtctcggccgcctcctcggtggtgacggccccctcgatgacggccacgtcgaactcgtcgggcatcggcaccgagcttgtcagctgccagtatcccagatcgatctggccgagcacgtccatgaggtggcgctcgatgttcgtgatgttgatctggcagccgaagcagctggccaggccgataacgaccacgcggggagcacggcgctcggcggtcggtgacaggttctcgctcatttacatcgacccctgaatgttcttggcttcccaatagttgaagacgggcccgtcgatacagcagtactggtgccccacctggcagtgcccgcacttgcccacgccgcacttcatgtggcgctcgaagctcatgtagatgcgatcgtaggggatgtccttcttgcgcatctcctgcacgacgaaccggtacatgatcggcggcccgcaaagagcgccgaaggtgttcgtcgggtcgatctccaagtgctcgaacggcttggtgaccaggcccacttccccatcccacgtatcgtcgggatgatccacggtcaggtgcagctcgaagtccttgcggtgcttccacatctcgaactggttgcggaacatgacctcggaggggtttttggaaccgtagatgatggtgactttcccgaactcgctgcgctcgtcgtggatgttgttgatgagcgagcgcagaggcgcgatgcccaggccgcccgccaccaaaagcacgtcgtggccgcgcatctcgtcgatggggaacccgcggccgaagggcccgcggatgccgacgatctcgccgcactgcatctggtgcagccgctcggtgaagcgtcccgtgcggcggacgcacagctcgatgaagccctgcttggtgggcgacgacgagatggagatgggcgcttcccccacgccgaagatggacaactccacgaactggcccggctcctggcggaaggcctcgcggatgcgctcgtccacgaagcggaactcgaagagcttctcggtgggcgtgagctcggtgatggaggtgatgcgcgccggccacgggcggtaggggttcgcgtgcatgagctcggcgccggtggcctcgcgcccggcgtcgcggaagggatgcacggccacgatgttgtcgttcgccatggctcttaggccccctttcggtcgaagaacttcagcacctcgatgggactgatgtcgactttgcaggcggaaacgcagcggccgcagcccacgcagaggttgcggtcgtgcttggccagaaagccgttgagcttgtggtacatgcggtgccgcacgcgggaggccggcgtgggccggaagttgtgaccgccggcgaccatggcgaactgcggcgaggtgcaggcgtcccacacgcgctcgcggcgccccgtggccgcgcccggatccagcgtgtcgcggatatcgaagcagtagcaggtggggcatacgttcgcgcaggcgttgcaggaaaggcagcggccgcccagctcctcccagaactcgtcctcgtggaaggcgtccatgagcatggggatctcctggatatcggggatgtcccggttgaaggcctcctggcgcgcgcgggtggcggcgcgaaacgcgatgcggtcctcgtcggtggcctcgcggacatcgcaggccgcctccaagatgttcgccgccacgacgctgccgatggaaacgaggtagcggccgccgatgttcgtgaggaacaggtcgtaggcggcccgtgcctcctcggcatccataaggttgcagaagcagttcgccgacggcgtgcaggcgacgccgacgatgagcgtggcggcggcatgggccgcgtagtagggatcgggatagcgcgggtcgttgaagacgctgctcaagttctgcaggccgttgatgtcgcaggcgtgcacgccgaagagcacccgggggcgcacctcatcggcgtaatcggtcacctcgttattctcggcatcgaactcgaagagggtctctttggccggcaggaggtacttcttgggagaggcgatggtcgtggggtagtccagcgcgatctcgtcgaaggaatcgacggcggagaacacgtacttgtccccccgcttgaccggcgccaccacctcgtagcgctccatgaaggcggcgacgagcgccggcgcctccgtctcgtcaatgacgcgatacagcataggcgattctgttccttacgtcctgcgcgcgcaacggttcgcgcaacggttccgtccccttccatagtaacggctcttccgccgccccactccctcgcgcaggccgatggcccagaaaaaccagacagagacgcaaaaagccccgctgcgccaaccatcggcacagcggggcctcacggaatcaaccagcgagtttaggcgaagaagatcccgatctcgcgctcggcggactcggggctgtcggagccgtggatcacgttctcgtccatgatgaggccgaaatcgccgcggatggtgcccggggccgcctcggcagggttggtggcgcccatgagcgaacggcacttggccacggcgccctcgccggagacgaccatcttcaccacggggccggaggtgatgtacgcgatcagcccgtcgtagaagggcttgccctcgtgctcggcgtagttcgccttcgcctgctcgggggtgaccatgcccagctccatgcgctcgatggtgaggccggcgcgctcgaagcggttgatgatctcgccgatgtgcccgttgcgcacgccgtcgggcttgatcatggagtaggtctgctggatagccatggaaatcctttcgtttgagggtcttgcttgcagacggcccgcaaggcgcgggccggggttgctgaaatcggaaaacggcccgatgcgctttaggcctggctcgggaagtacagctccacgttactgaccttccacgtgatgccgtcgcgcaccatggagatgcggtactgcacggacccgccctcctcggttttggccgtggcgtacaccgtagactcggtcatggagcgactcacgccgtcgatggtcacgttggaatcggtcaccaccggatcgagcatggccgggatggcatctttgtccacatcggcggagaacaccttgtcagccgcaccggacgggtcgctgaacagctcctgggtcaccgtctgcaccgtggggtagccgtagccctgggtataggcgaacacgccggccgcggcggccagcacgatgacgatgacggagaacagcaggatcttcaaacccacgttgcggcgcttgcgatcctgcttggccaaaccgcgcgaccactgctcgagctcggcgtcggtggccgtgaagaaccggtcgttgtcgacgttctcgtaggcgcccacgtagccggggaagctcgccgggtcggcctcgtaggtgccctcgtcgtaatagaaggcctcggagacgtcgccgccctcgtaggcgccctcgtcgtagacgctcgtgccgtcggcggccacgtcgagccccgacatatcggccagctgcagcacctgggtggcctggttctgctcggacgttccctgggccacggcacccacggcgcgctggtagtcgacgctggccgagtcggacaggtagtacgtcttgtcggcgatggcctcctcgaaggcatgcaccgccttctccatctggccgcaggccacataggcctgccccaggctcgcctgcaacttgttgcgcgtggccggctgcatatcgaactgcagggcgctctcgtaggaggccacggcgtcggccgggcggttcaaggccatgaaacagacgcccaggttcaaaagcgccttggtgggatcggggttcgactcgtccagggcggcctcgcggaaggccacgccggcctcggcggacttgccgagcttcatgagcgcgttgcccatgcccatgtaggacttgtagggggtggggttggtcgtgtcggccaccgacttctcgaagcagttgatggcgttcgtgtagtcgcgcagcgacgcgtaggccatgccgaggttgcactccaccgtcgccagcgcccggtaggccgtatcggccgtggcctggctgtaggcctgaatggcctcgcgcgggttcttcagcttcaccaggcagttgccgatctggtggtagagaaggcccatttccccgggagtgagcgggaagttcgtgtcctgcaagcattccgtgaaagccatcagcgcgccgcggtagtcacgcaggcggtagcgctcatttgctcgatcgaataactcgttgttcatagacttccttcactcgacattcggaggggccgccaaggcggcgcggcggtggggcgagacggctcggacggcgggcgccgacccctctcgcggggcggtacttactcggcggcgttctcgatgacgacggactcgatgacatcgccggcgcgcagctggccgatgacgtccttgccctcgatggtctggccgaacacggtatagccggagtccaggttgtgctgggggcccaggcacaggtagaactgcgagccggcggagttgggatccatggagcgggccatggcgagcgcgccgtcctcgtgggagttgttcgggttggtggtgaactcctccttgatggagtagcccgggttgccggtgccgaagggagccatgcccggagcgcggccggcggccacctgctcgggggtcgcctcgcgggtgttggggcagccgccctggatgacgaagccgggcacgtagcggtggaacttcaggccgtcgtagaagcccttctgggccagttccacgaagttgccgacgtggatgggggcgtcattgcccgccagctgcacgcggatggggcccttggaggtgttgatgacggcgatctcctcgccggtgggctgatattccggggtgtagagagccatggggctcctcctttgttctcggcgacgcggacggccggcgcttgcgggcgctgcgggcgcgaacgcgtctcattgcatacggggaatgattctagcaggttaggagccggaccgctcgaaaatgctaaccacttccacatggtaggtctgcggaaagaggtcgacgggggtgacgcggataaggcggtagccctcctgttcgaaacgggccacgtcgcgggcccaggtggacgcgtcgcagctgacgtaggccacgcgccgcggcgaggcggcggcgatggaggccacgaccccgtcggcaagtcccgcgcgcggcggatccaccacgagcgcgtccagctcgcccagctctggcagctcccgggcggcgtccccgccgataatgtcgatgtcggcgcccgcccgctcggcgttgcggcgcagatcgcgcacggagctgcccgccgactccacggccaccacgcaggcaccggccgcggccagcggcagcgtgaaggtgccggcgccggcgtagaggtcggccacgtagtcgccggcgtccacttccaggcccgcgagcaccagctcgaccagcttctcggcctgggcggtgttcacctgggcgaacgagggcgcgctcagaaggaggcggccgccggccacttcctcctcccagcagcccttgcccgagatggcctccaccttcttcaccttgcgcgcgcgcccgggatcggccacgacgcggacgacggaggtgttcttgagggcgctggcgagggttttggccgccgcggcccgcgggaaggggcccggcgtcgtccacagggcgatctccacgtcgcgggtgcgcaggctgccgcgcacccccacgcggaacaggcccaggtcctgacctccggagaggtagcgcagcgcgccccgcagcgccttgggggcaccttcgatgttccggtgggccaagggacacgcgtccagcgagacgacgtcggcgcctccttcgggacgcatgcccaagatgaggcggccggcaccgtcggcgccgcaggacagctccagcttgttgcggtagccccactggcgcttcgagggcacgcaggcagcgacgagggcctcggcgcgggcggcgtccatatgggccgtgcgcacgagggcgtccaccacgttcgcccgcttggcaataagctgggcctcgtaggaaaggggcgcccaggggcaccccccgcaccccgccgcgcacgggggcgtcacacggtcgggcgaggcctcgacgatttcggccacatgtccccgggcgaagcggtgcttctcctccgtcagctccacgcgaacgacatcgcccggcaccgccccttccacgaacacggtcttgccgtccggcaaatgccccacggccgccgacccgaagctcatgcgctcgatgggcaccacctcgccgggcgtgtctgaggcgcacgaagccgaggcgggagccgtcgcgacctcaggggccggcgcgtcctgagccttcgccgtgtcgacggagcggtcgggcgcggcgttatcgttcctggtggacgtatcgatcactgggggctcctgttccgttctcgttccatctggggggtattttgcggatttgccgtccgcggcggcgcaattgccctataatagcgcagcacccgcctgtcgggaccctgaattgtgccctcgtagctcaggggatagagcacttgcctccggagcaaggtgccgcaggttcgaatcctgtcgagggcaccacctacgttcaccaagccccgcccgacggggctttttctttgccctaccgctggcccacgacgacggtgagggcatcggggacgcagtcgatgacgaagtgcgtgccgcgcaccggctccccgtccatctgggccggcggctcctcctcgaagtcgagcacgagggaggacgcccgccggaaatggatgtggtcgcttcccgtgtgcttgccgccccgggcgcgcagaagaagcgccagcgcccgcatgggcgaaagctccggcgtggcccagcagatgtcgagcagcccgtcgtcgaggcgcgccttgggcgtgatgcggaagtggccgccgtaggtgggccccacctgcacggctaccaggtaggcatcgtcccattccggatgaggggcgcatcccggctccgctcccaggacatccatcttgaaggaaaacacctgcaagtggtggaacagttgatcgacggcgctttccaaatagagcatggtgccggcgcggccggacttctgacggcgatccatggtgtcgagcgcgatggcggcgtccaaaccgaaggagagcgtctcggcgaagtagcggccgttgacgcgccccacatcggcccgcaccgtttgaaagcgcaggatctcggtgaccgcggtggggacggagtaggccatgcccagcgtctcggcgtaatcgttgccggagcccacagggatgacggccaggacgggccgatcctcggggatgcgggccataaggccgttcaccacctcgttcaccaggccgtcgccgccgagcgcgatgacgcagcccacgtcggggcccagctcgcgggccagcgactccccgtggccggcccaggccgtggtaagcatctcgaagcgctcctggcccacgcgctcgcgcagaagccgcgccacctcggaggccgccaccgcccctcgcccgctcttcgacacggggttcgcgataaggacgatcttcccctcttctacggacggaaccacaacctgcctcctaaccgagcgaccggcccagcgccgacctgcgatttccctcattctagcaccgagtaccgtgtcacccacctaccaagtcgcgctgttcgcaactcgctttcgaaacggaggggtcgcccgttcgctactcgaggacggcgccggtgtcgccgtcgaggaagaccttgcgcgtcacgaagttgtagaccatgacgatggccgtggcgacgattttcacgatgaggtagctcacgcccagaaccgacgagccgagccacatgagcagatcgttcacccccaggccgatcacagagagcaccacgaagatgacgaactcgcgccggcgcgagagcccctgcttgtgcgtgaacacgtagcgcatggaggccaggtagttgaagacgaccgacaccgtgaaggagatcgtggcgctgatgaggtagttcacgccggccagctccgtgagcaccaccatgaggccgtagtcgatgacgaaggcaataacgcccaccacgccgaacttcatgaactgtgaaataagcttctccatagttccttcccagatttttgcggccgcaacccttgcaaagcgggggcggctctgccatactatgcaagctgttttgaacgagtccccatagtctaacggttaggacgcggccctttcaaggctgaaatacgggttcgattcccgttgggggcaccacttttgctacaaacgaaaccccgcttcgcgcggggtttcttgttttcggaacgcgccgaaaaccggcagcggcggcaccaagcaccccgcatcgcgagatccgcacagtgcgcgacgctcaggtccctagcgctcggcatccgcctccatcacccggtacacgctcatctcccactggcgtcggtgggacttcgccacggtgtccaggatgaggccggccgtccaggagagcgccgccacgatcatgagcgccacggcgagcaccgccgaggggagcttcgccacgtagccggtgtcgaagtactcggccaccacgggcagcccgaagcagagccccaccacggcgagcgccaggccgagccacccgaagaaggccatggggcggtagtcgcggaacaggctcgcgatggccgccagcacgagcatgccgtcggagaaggtggacagcttgctctccgagccctcgggccggtcgcggtagtcgatgggcacgtcggccacccgccagcggcggtccaccgcccagatggagatctcggtctctatctggaagcccccgctcatgacgggcatggtcttcacgaaggcgcgggtgaaggcgcggtagcccgtcatgacgtcctcgaaggcgtagccgtagatcaccttgatgagccggcgcaccaggttgttgccgaagttgtggaagggccgctcgttctccttgccgtaggcgccgttggagatgcggtcgcccacggtcatgtccgcgtcgtcggccgccaggggcgcgatgaggtcgccggcggcctcggccgggtaggtatcgtcgccgtcgaccatgaggtagtactcggcgtcgatgtcgcggaacatactccgcaccacgttgcccttgccctggcgggactcccggcgcaccacggcccccgccgccgcggcgatgtccgcggtgccgtcagtggagttgttgtcgtagacgtagatcgtggcctcgggcagcgccgcgcggaagtcggccaccacgcgggcgatggtgggcgcctcgttgtagcacgggacgagcacggccaccccttcgccgcgccgggccgcctcgacggcagacgccgtggcctcggcgttggaaactgtcgctatatcggtcatgggaagacaaacctcctgtccattgttgaccgcgtccattatcttaaatgaacgcgggggcgcggaaaatcccccgagaaaaactttgaccgaatcggcgaaaagctcttgcgacccataagcggattttctggcatcttggcgggcttgccgccgacgcggggccgatgcggggaaaataggctatgatagcttccatgaacacacctgcactgaaatcgacggagccctcggctccgatcgcccccgacgcccccgcccagacgctcgccgtcccggccgagccctcgccctcccccctcgccgcgggcgcccaaggcgccacggccgccgaggccatcgcgtgcgcgctggccgcgccggagcgcacggccgaggaggccgccgcccatccgctcatcttagtggtgcacgcctcggtgggctcgggccatcgctcggcggccaacgccatcgccgaggccctggaagaggccggcgaggccgcccgcgctgccggggacgacaactcgctggaagcgcgctcggaagtgcgcgtcctcgacatcctcgatttcgggcgcatcgtgttcgacggcgacaagaccgcctccatgttcaccggctggacgcgccccttctacgacctcacctggcgctacaccctcaccgggcgccttctgtggggcggcggcaccatttgggcgcgcctcatgtacccgaagttcaccgagtacgtgcgccgcctgcggccggcggccatcgtcgccacccacatcaccgccgccaacgtggccgtgagcgctcgcatgatcac

SEQ ID NO: 10548 - DNA, 4295 bp, Unknown
  gut microbiota DNA sequence
actggggggaatattctcccagtttcttttatttgtgaaacctatcaatcataaattctttcgatattaggacaaattaactgaatctgtcctatttttgcaaagattatgggacaaagcatccctttttgaccatcctcaagggaatcgttctacggtacaaatacgatagcggcgaaagatcgccgtccacggctcacgccaacaggggttcgacgtttgcgcaagagtagaagaaatcgatagaggaggtttaccttgagtgggaccgctaccaaagagaagctgaccgtgcgtcaccttctcgtcgttctgacgggcatcatgatcacgttcggatgctcggctctatgcttctccacctggggcctgttccagccggtcgtggctgagggcctgggcgtggaggtcaccgccttcgccatgtacgtcaccgttatgtacctgaccatgaccatcgcctcgccgtttgcgggcaagctgctgcagaccatggacatccgcatccttttgtccgcctctgccgcgctcgtgggctgcgccttcttgctgatgagcttctcgaacaccatcgtgctgttctacgtggccgccgtcatgctgggcttgggcgagatcaccatcctgtggctggccattcccacgctcatcaaccgctggttcgtggagcgcgccggcttcttcatcgggttgtgcatggccttcaccggcatcggcggcgccatctggtccgccgtgttcaccgcgctgaccgcctcgggcgtcgacttccacacgatttacctcatctggggcgtcatcgcgctcgtcacgagcctgcccttcacgctgttctgcgtgcgcaactctcccgaggactgcgggctggccccctacggcgcctccatgcagaaggcggcctcgggcgctgaggtggccgcgaagcccgcgggcctgtccgccggcttcgtcatgaagaccccgatgttctacgccatctgcgtcttcgccggcctcatcaacatcgccatcctcatcgccatgcagttccccacctacaccaagtcgctcaccgacgtggccttcgacgtggccgtggtcggcggcgtcatgacctcggtcatgatggtggggcaggccatcttcaaggtggtgctgggcgcggcggccgacaagaacgccaagggcgccctcatcttcgccttcgccgctggcgttgcgggcatcctgctgtgctggttcggcaccttctccgagtacgtgatgtacgtgggcgccttcatcttcggcggctgctacgccaccgccgtggtgctcgtgccggtcatctgccgccagtccttcggcacccgcgagtactcggtcatctactctcgcgtctccacggtgttcaacctcatcgccgccttcgccgctatgatctgggcgtggctcggctcgtcgttcggcttcaccgtcgagttcatcgtggcgctcgccatgctcgtggtcatcctgctgctcggcctgtacatcttcaaggctgctgccggctacaagaaggactggacgaccgaatagtcgggtccctcataccgctggcgggctcaaagggaaaagcggggagtggagactccccgcttttcgcacttataggaaatctctatgagccaagccaagcctgataaactacgatcaagagagaaacgcgcaatctgagatcgggccgaacgcacgtcctttgccttaaggggaaaccatgaacctctctcagctgaactacttcaagaagctcgccgaggtgcttcactacacgcgagcggcgcaggagctgttcatcacccaaccgaccctctcgggggctatttcgtccttggagaaggagctgggcgctcccttgttcgagcgcagcggccgctcggtgctcctcaccccctacggcgaggtgttctgcgagcacgtgtgcctcgccctgcgcgccatcgacgacggcgtggcggccgtgagcgcgcgctcctcggcctcgttcggcaccgtgaacctcggtaccaccttcaccacccaggaccactatctgccgagcctcatccgcgacttcgaggaggccttcgacaagcgggtcatcgtgaaggtgtcccagggattcaccaactacctcaccgagcagctgcatcggggcacgctggatgtggccttctgcggcaagcgcgacaacgagcccgatatcgcgtatttcccggtgaagcactgcgagctggccctctacgtgcgcgacgaccatccgctggcgtcccgcgaaacgatcaccttcggcgagctgaacgacgtggatctgcacacctaccgccgcggcacccccatcggcgagcgcgtggcgaagatgctggaggaggccgacgtgcggggcgcctccttgggctacgacgacgatgtgtccatggggtcgttcctctcctacaacggcggcaacgccggagcgcttatgctggactcgctgggcgcccagctgttcagcaacctgcaccaggcgcgcgtcgagggcgtcccggagcacttctacacggtgtacatggcctatcacaagaagcacgtgcactcgcgggccgtcaccgacttcatcgacttcgtcaaggcctacccgggcaacgacctcatcggccaggtgctgcccgaggcggcgggcgagtaggggcgccgggcccgatcggccgaggcgggcgctcggcggacgtttgggtgtctggtcgtccgaccgccggagccgcccgaccgcctgactgccgtctgtggtcattttgcgccgtatgcggccacttgttgcgggggggctggcaaagcgcgacccgttgtggtataaatacgactgctgtgcagatcggctgcacggacatactttcgcttctggagaaagtgggacttttcccgctttcttttgttgtagggggctttttgaggcccggaaagtatgggagcgtaggcaacggaaaaggaggcagacgaggtgctgacggccaaggagaaatcgcttctttccgccctggagccccgagcggcctccgagggcgtcgagatcgtcacgctggagatcgtcggctcgaagaaggcgccgaccatccgcgtctacattgatgcggccggcggcatcagcttcgacgagctggcccgcactcaggcctgggtcggggacgtcatggacgagctggacccgttccccggggcctacatgctggaggtgtcctctccgggcatcgaccggccgctgcgcacgccggagcatttcgcgcgcttcgccggcgagacggtgacggtgaagacgaccggccccatcgacggccgcagctcgtttaccggcgagcttctcggctttgaggacggctgcgtcatggtgtccgcagacggcgccgacgccttccgcattccgtacgacaacatcaaaaaggcccgcgttaagggcaccatcgacttcagcgcctagggaaaggattagatacgtggcaacttcagaactgatcgaggccttgcaggcactggcccacgagcgcaagatcgacgagttctacctcatcgagcgcttggagcagtccctggcgaagagctacgagcgcatcctcgatctggaatgggacgcgcgcgtgaccatcgaccgccagaccggcaagatctacgtctacgagctcgtgcccgtgggcgagcccgacgaggagaccggcgaatacagcgagttcgaggagcgcgacgtcactcccgacgacgtgagccgcatcgccgcccagaacgccaagggcgtcatctcgtcgctcgtgcgcgaggccgggcgccagtccatctacgacgagttccgcggccgcgtgggcgatttggtcacgggcaccgtgctgcagggcacgccggacttcaccatcatcaagatccgcgagggcgtcgaggcggagctgccccattacgacgccaagcgcaacccgggcgagcgcaacgagcgcccggccaacgagcactaccgccacaaccagcgcctgaaggtgctcatcatcgaggtgcgcaaccccaacgccgacgcgccccgcgcccgcggcgagcaggcgcgcccggccatcgtcgtctcccgcacccaccccgacctcatccgccgtctcttcgagatcgaggtgccggagatttacgagggggtcgtggagatcaagtccgtggcccgcgagcccggcgcccgttccaaggtggccgtgttctcccgtgaggcgaacctggatccggtgggcgcctgcgtggggccgaagggctcccgcgtccgcatggtggtcgaggagctgcgcaacgagcgcgtcgacgtcatccagtgg

SEQ ID NO: 10549 - DNA, 20167 bp, Unknown
  gut microbiota DNA sequence
cgtggccaacgccctgtcgccggcgaaggtgagccatgtgagcatcgacgaggacaacaactacgccacggtcatcgtgcccgacgaccagctgtcgctggccatcggcaaggaggggcagaacgcgcgcttggccgcccgcctcaccggctggcacatcgacatcaagccccagagcttccagggcgcgtctttggtcgatgtcgagatggacgacgaggtggaggaggacgacggcttctgcatcttcgtcgacgaggacggcaaccgctgccgcaaccacgcccgaccgaacagccagtactgcggcgtccatgccgatgccgaggcagaggcctaaggggtagaacctgatggcagcacagacgacaaagcgccagcgcacctgcatcggctgcggcgcgacccttgggaagggcgcgcttcgccgcatcgtgcgcaacggcgagggccttgtgagcttcgaccctacgggccgcctcgccggccgcggcgcctacgtctgctctgaggactgcctcgccgcggcgagaaagaccaggaagcttgagcgcgccctgcgctgcaaagtgaccgacgaagattacgagcgcgttcttcgcgagcttgccctcgccgaggcaccgggaaagaatgaggagtgatatatggccagcatgcgcgtacacgagttggcgaaggaattcgatatgtcgagcggggatctgctcgatcgtttgaaagagatgaagataccggcgaagtcccatgcgagcatgctcaacgacgcctacgttgacaagattcgcaagaacctggagccggagatccgcgcccgcgccggcgccctcgaggccgaggaggccgcggcgctggccgccgagcaggaggaggccgagcgcaagcgcgccgaggaggaggccgagcgcaaggccgcgcgggaaaaggagctcgccgagcgcgaggccgcccgcgcccgccgcgaggggtcgcgctccgacgacgacgccgagggcgaggagcaccaggcgcccaagcaggcgcccaagcagccctctgctttcgcgagcctcgagcagcagatcgcctcggagaaggagcgcgtcgagcgcgagcgccaggaggcccgggcccgcgcccgcgccgagaaggcggccgccgaggtggccaagaagcgcgctgtggaggaggctctgcgccgcggccataagaagcccgcgaaggctgcgcctgccccggtgccggcacgcccggccccggctcccgcgccgtcccgccccaagaacaacttcgactcgctgctttcgcagatcgaggccgagaagcagcgcatgaaggcggccaagagcgtccaggccgatacccgtgccccccgtggcggcaagaagggcaagaagggcggcgcgcaccaggtggtgcccgagctcgaggcccagatgaccgtcggcgaggaccgttacgcccagatggccgtgcaggccgagaagctgcagcgcgacaaggtgctcgccgaggctcgcgccgccgtggctgcggccaacacccacgagggggagggccgccgcaagaagcgcaaggagaagcgcgaggcggaggcccgcgagcgcgccgagctcgaggccatcgagcgcggtctcgacccgtcgctggtgttggacgactccgtggtggagattccccagggcgcgtcggtagccaagttcgccgagctgctcggcgtgcagcccaacgacgtcatcaagcgcctattcatgctcggccaggtgctcacgctcacccagaccatgaacgatgagaccatggagctcatcgccgacgatatgggccgcaaggtgcgcgtcgtgtcgccggaggaggagtacgccgtggtgtacaacgactccgaggccgacctgaagccgcgtccgccggtggtcaccgtcatgggccatgtcgaccacggcaagacgtcgctgctcgacgccatccgtgacaccggcgtggtggccagcgaggccggcggcatcacccagcacatcggcgcgtcggtggtgaacatcggcgaccgccagatcacctttatcgacaccccgggccatgaggccttcaccgccatgcgcgcccgcggcgcccaggtcaccgacgtcatcgtgctcgtggtggccgccgacgacggcgtcatgccgcagaccatcgaggccatcaaccacgccaaggccgccgaggtgcccatcgtcgtggccgtgaacaagatcgacaagcccggcgccaaccccgaccgcgtgcgccaggagctcaccgagtacggcgtcatccccgaggagtggggcggctccaacatgttcgtcgaggtgtcggccaagaagaagctgcacatcgacgacttgctggagaccatcatcctgcaggccgacgtgctggagctgaaggccaacccggacgctttggcctccggcttcgtcatcgaggcgaacctggacaagggccggggccctgtggccacggtgctcatccagcgcggcaccctgcacaccggcgacgtcgtcgtggccggcacgagctacggccgcgtgcgcgctctggtgaacccgcgcggcgagcacgtcgccgaggcgaagcccgccgacccggtggagatcctgggcctgaactcggtgcccaccgcaggcgacgagttccgcgtcttcgaggacgagcgcgacgcccgcaagctggccgaggagcgcgcgctgcgcgcccgcctggccgcccaggagaccaagagccacatgagcttggacgacttgttcagtcgcatcgaggacggcaagaccaccgatctgaacctcatcgtgaaggccgacgtccagggctccatcgaggctctgcgcgacgccttcgacaagatggaccagtccgaggtgcgcatcaacatcgtgcactcggccgtgggcggcatcaccgagaccgacgtcaccctggccgccgcctccgacgccatcatcatcggcttcaacgtccgtcccacgggcaagagccgccagcaggccgagaaggagaaggtggacatccgcctgtaccgcgtcatctaccaggccatcgaggatatcaacgccgcgcgcgtgggtcttctgtcgccggatatcgtggaagaggacaccggcatcgccgaggtgcgcgagaccttcaaggtgccgaaggtgggcaccatcgccggctgctacgtcgtggaaggcgagatccaccgcgacgacaaggtgcgcatcgtgcgcgacggcacggtcatcttcgagggccacatggcgtcgctgcgccgcttcaaggacgacgtgaagtctgtgaagcagggctacgagtgcggcatcggcatcgagaagttccaggacctgaaggtgggcgacaccatcgagggctaccaggtgaaagaggtcgagcgcacggaataactcgactgtccggcgtcgaggaagccccgcatccccgtgctcaagcaatggctcgctcggcggaacagtccactggactgttccgttcgctgcgcaacctgcgcgcggggacacggggcttcctcgacgcctactgttacagttttgcttagttttccacgactggcgcatggctcttggtttcaactctatactaaaactatctgtccgcctcgattgaggagatgacgtcatgaagcagagcgcttccaaccgcaaggtcaacgagcaggcccgcgaggtgatcgcgagcatccttctgttcgatgtgtccgacccgcgcctccatctggtcaccatcaccggctgcgaggtcagctacgaccgttccgtctgcaacgtctactacaccaccgattccgagcgctacgccggggctcaggctgccttcgaggccgctgcgggccatatccgctcgctcatggcgaagaagctctcctggcgcgtggcgccggagctgcgcttctacgtggacacgtccgtcgatcaggccgaggccatctcccaggcgctgaattccgagcgcgagcatcaggagaagcgcatcgaggaggaaaccatcggagaggatcgggagtactagtttcatgacggtgacgtcccagaccaacacgacgctttccgagatcgcctccgcgctcgccgagcgcgaccacttcgtcatcggaggccatgtgagccctgacggcgactgccttggttcggcgctggggctcgcctgggccttgcgccagctgggcaaacaggtcacgtgcgtgcttgcccgcgacgaggagccgccgagcgatctcatgtttttgcccggggccgacgggctcgttcccgccgcgcgcttcgaagggccctgcgagtgcttcatcgccgtggacgtgcccacgccggagcggctcggcgatggggcgcgccttcacgaggcggcgcccttcacggtcaccgtggatcaccatgcggtgccccgggccatgagcgacctcagctacaccgatccggacgctgcctccacgtcgctgctcatttgggagctggcggcgcttttgggcgccgatcgcgagcgcattgtcgccacctgctgctacaccggcctcatgaccgacaccggccgcttccagcacggcaacaccgacgctgtcgcgttcaagggggcgtgcgaaatggtggccgctggtgcacggcctggggagatcgcccgggagttctaccagaaccgcagtctcgcctccatcgagcttgaggggcgcaccgtgagtcatatgtgcttgtccggcgacggcgaggcggtgctctcgtggctctcgctcgccgatttcgccgagtgcggtgccgtgaaggccgatgccgagcccatgatcgatcttctgcgctccttgcgcggcgtgcgcgttgcctgcatgctgcgggagcaggacggagaggtgcgcggcagcttccgttccaaggacgacaccgacgtggccgccatcgccggcgagttcggcggcggcggacataaggccgcggccggattcaccattcacgatgatttgcgcggggccgtggagaccgtcgcgcgccgtttgggcatcgagagcccgaccttgccggaggagcgcctgtgaagcgggggacgaccgatctgtgcctcgtacttgccgtggacaagccgagcggcatgacctcccacgatgtggtgagccgcgcccggcgcatcttcggcgagaagcgcatcgggcacacgggcaccttagatccgctcgcctcgggggtgctgcccctgtgcgtggggccggccacccggctcgatcagttcctcaccggccacgacaagtcctacgtggtctcggtcgtcttcggcgccgctaccgataccgacgactgcgacggagaggtcatccgcacgggcgttgtgcccgatgaggtgttcgacccgttcttcgccagcgtcttcgtgggcggtttggtggggaagtccaagcagctgccgccggtgtactcggccatcaaggtggggggaaccaaggcctgcgatgcggctcgcaaggggcgcgttatcgatctggcgccgcgcgacatcgaggtgtactccgccgagcttctgggcatcgggggcgccgacggcacggaaccggcccgctgggacatcgccttcaaggtgtcgaagggcacctatattcgcgcgctcgcccgtgacatcggcaacagcctggggtgccccgcccatgtgggggcgctgcgccgcacggcggccggcgcgatcggcatcgccgactgcgtgacgctggaggttttggaggagatgggggagcgctccgctctggatccgctgaaggtgctcggcatgcgcttcatctacctcgacgatgccgccgcggcacgggtgcgcaacggcaacccgctggacgggcgcgccgtggagctcttcgagcgccgcagcgtcgacccggcggcggagctgtgcgcctgcacggccggggtgcgccccagctgcgagccgccgcaaaatggcgaggtcgtggcccttgtggccgataaccgcatcgtggcattatatgagtatcatgtcgacaaggggcgtttcgccccccgatgcgtgtttccgataggagtttcccgtggctgcagtgatctctaggaacgatcccgccttcgacgaggccctgctcgatcgcgcctcggtggccttcggcgtcttcgacggcgtccacgaggggcaccgcttcatcatcggcgaggcggtaaacacggcccgcgaagaggggcgcgcgagcgccgtcatcaccttcgacatcgatcccgacgaggtgttcgcggctgatcggctgaagaagctcatgaccaacgaggcgcgcatcgccaagctggccgagctggatgtggacgcggtcgtggtgctgccgttctcccgcgagttcgcggcccagagccccgaggatttccttaacgcctgcttcggcggcggcgtgccgagccacatccacatcggcagcgacttccatttcggtcgcaaggccgcgggcaatgtggagagcttgcgtgtgtggggcgccgagcgcggcatggaggtgcacggccacgagctggtcgccgagggcggccgccccgtgacggccacgcgcatccgcggccttctgtccgagggccgggcccgcgaggcggccgaccttctggggcgcccctacgagctttcgggtctcgtgcgcccgggccgcggcgagggtcgcgacttcggcttcgccacggcgaatctggaggtgccgcccatgcttctcgccgtcggcgagggggtgtacgcctgctatgccgtagtggaaggcgcccgctacaaagcggccgtgaacgtgggcgttcctgccaccttcgccgacacggccaaggagaacattgaggtgcacctcctcgatttcgatgagaacatctacggccaggacatcgaggtggagttcatcgaatggctgcgccccatgcgcgccttcgagagcaccgacgagctcatcgccaccgtccagtccaacatagcctgggtacgcgagaatctgtagcgaaatcgggtcgagtcggggcgaacctatcggttcgagcggtctttgaagagctggtcgtactggacgatggcgtaggacttcagggcgtcctcggccttctgctgggcgtcggtttccacggtctcgccgaaccagtgccacgttccctcagcatcccggtatccgttcaggttcacggcgggcagcgcctggcgcagagccgatcggtacagggcgcgggagtcgcggggcagccccgttgcatccaagagcaggcttgaaagatagttcaagctcgtgacgtcggcgttctcgatgcgcgtgagtgcgtccccgtacttcccgcgggccgcagcgttcgcccagatgaaatacggcgtccggtagcgcgcctgcacctcttccaaactggcgccctccacgggcttgtcgaaggtttcctcgaagagccagtcggcgaacccgggctggtggtcgccgaagaatacgacgatggtgggctcgtcccgcgcgttcagctcctccacgagccagcgcagatcctcgtccgatcgccggatggccgccagaaactcgtccacctcggggttttccacctcgtccgattccagatgcacggcatcggcggcgggaacgagtcccgtgtcgtagccgccgtggttctggatggtgacgtcgaagacgaactggggcccctctccctcgtcgatcttctccagcacgcgctcataggtggcgcggtccgtgacaaggtcgcggaaggtgtcggcgtcttccatggtggtgatgtcgtcgaacgtgtcgaatccgagctgctcgtagatgcggtcgcgccgccagttggccgcctcggccgggtgaatcgcgtgggtgccgtaccccagaccgcggaagtaggaggcgaggttgtccaccccttccaaatcgtagagcacataggggtacacgccgccgcccatgttgcccatggaggcgccggtgaggaactcgaactcgctgttgcaggtgcccccgcccatggccgagacgtacacgtcgcccgcggccagggaatcgtcggccacctcgtgaaagaacgtcggcgcggcgtttgatccctcaaggccggggtattcggagagatcggagaacgtctcgttcatgatggcgatgacgttgggtccgtcgtaggggagtgcttcgggctgttccggtgctgcatcgccagtggtgggcgccgctgagttttggttgcccgttgtgtcgggcgagggggactctgccaccgtgccgtccgttcccgtcagcggatcctcggcgaagggggccaggatggcgtccacggcctcggcggagtagccctccggaggcttgggcgtcagctcttgggcccgcgagaggaagcagagcgcggtgccctgggtggcgtaggagccgcgcacatcccatacgtccacggttacgtcgcagtcgctcttgatgtcgatggcttggtactgcatggtgccgaggcacaccagcagggccgccgccagcacgttggcggctacgtcccagcgagcgcgctttcgttgggggcacagcttcgccaaggcgacgcaataggcggcgaacagcgcccagcagaacacgaggcgaccggtgagaaacaggctgtaaccaccggccacggaggcggcggtgccgagggcgaacagatccgccggcacgatgggctgccccttgaaggtaatgatgaagaagttggcggtgccccacagcaggcaaaagcccgtgaagacggccagcgatgcgcgggtgcgctgtcctgccagaaacacgatggcgcagcccagacccaagatgagcaggttgtctacgacgtagcgctgtgggatggcgaagacgccgtcgttccacggcagctcgaggagcaggaagcctaaaacgacggcgagtgcgaagaaggccccgcgccgcagcgcatccgtcgctcgcgaacggccagtggcgcccaagctggtttcagttcgttccctattcaaaagaccctccggttcaaatgcaaaacaacaacttaccacggtcgaggctgctttactttgggcgtcgcgaaacgtcccgcctgtctcgggaaaatctccatggcgatttgagccatgattttcgagttgttagcattgcgaatggcgttctgtggctcaatcagctccatgagaaggcagaaattatcgctaagcgaataactgatgaggcgaattcctccagtggcggccgaggaacgctgtaagcgatcccttcgatgctaacaactcgaattttttggcgaaaacgtgggtgaagaattgtccgagaagacaaggggacggccctgcgggtatactgcacccatgagtaaagaacgaatttcctgggaaaacgaataccccgacgagttggagcgcgagggccgcatgaggccgacgctcgcccgcgccgtgcgcgatcatgaagccgcgggcaacgctgttgacgaggccgtcgcggaggcagtctgggcggacggcgaaggcgaggcggccgccatggacgtcgtcgacgacgcgcccgccatgggagcggtcgacgaggcagccgtcgcggaagccgtgggcgaaggcggtcgcgtcaagtccggccgcccccgcgagacccagcagcagaagctcgcgcgcatcaagcgcgagctggaagcagtgcccaccgagcccggcgtgtacctatggaaagacgccgccggcgaggtcatctacgtcggcaaggccaagcagctgcgggcgcgcatgcgccagtacgtgaacttccaggacgatcgcgcaaagattcccttgctcgtggaggccatcgactccttcgactacctcgtcgtcgacaacgagcacgaggcgctcgtgctggagaagaacctcatcaaccagtacagcccgtttttcaacgcggacttcaaggacaacaagagctaccccttcatcgcgctcaccaaaggcgatgtgttcccggccatcaagtacactcgcgagaaacacaagtccgacacgaagtacttcggtcctttcaccgacgcccgcgccgcccgggagatgatcgacatcgcccggcgtgtggtgcccctgtgcgccgccacctgcgccgactggcggggactcacgcgcgcgctggagaaggacccgctcgctttcttgaagcgcgatgcgcgtccctgtttcgactgccacgttgggctgggccccggcgcctgctgcggggccgtcacgccggaggagtacgcccagaacgtgcggcgcatcgagcgcttcctcgccggcaaccaccgcgagttcgtcgacgagctgacggcggaaatgcaggaggccgccgccgagctcgacttcgagcgggcgggacggctgaaggcgcgcatcgacaccatcaactcgcttgccgacaagcagcacgccgtgtcctcccgcgacctgtccgccgacgtcgtcgggttcttccgcgaggagaccgtggccggggtgaacgtgctcgtcatccgcgagggccgcatcgtgaatgccaacgagttcatcttgaaccgcggcaccgacgtgcccgaccaggatctgctgcgcaacttcctcatgcgctactacgacaccaccacctccatcccgcgcgaggtgatcgttcgcgcgttgcccgaggacgcagaggtcatgggggagtggctcacgggcaagctcgattcggctcatggcgccaaggtgcgcttcaccgcgccgcagaagggggagaaggccgatcttctgaccatggccgagaccaacgcgcggcatacgctcatgcgctacaaggtgcgcacgaactacgatgacaagcgcatcaacaacgcccttctgcagctggagagcgccctggccttggacgcgccgcccatgcgcatcgagtgcttcgacatctccaccatccacggctccttcaccgtggcctccatggtggtgttcaccggtggcaagccggacaagaaccagtaccgccgcttcaagataaagacgccgctcgacgaggccaacgacttcctctccatgcaggaggtgatgcggcgccgctacgcgccggcgcgcttgaacgacgagcgcttcggcagcaagccggacctcatcatcctggacggcggaaagccgcagctgacggcggcgctcgccatgttcgaggagatggggatcgacgacatcgccatttgcggtctggccaagcgcgacgaggagctgttcgtgccctggcaggacacgggaccggtggtgctgccctcaggctcggcgtcgctgtatctggtgaagcaggtgcgcgacgaggcccaccgcttcgccatcaccttccaccgcgagctgcgcggcaagggcatgacggcgagcattctggacgacgtggcgggactgggtcccgtgcggaagaaggcgctgatgaagcacttcaagtcgttcaagaacttgaaagctgccagcttggaggaaatcaaggccgccaaggtcatccccgaagaggtggccgaggagctggtgcgcgttctcgcgcagtataatgagcggaaagaagagaaggaagaacagctggcggaagacgcttcttagggaaaggaggcctgtgtggccgaggagataatggaagaagaccagatgcccgacttcgtcatcgtgacgggcatgtccggcgccgggcgcacggaagccatgcacgtcttcgaggacttgggctactactgcgtggacaacttgccctcgagcctgctcgccgatctcgtgcgcgtgaacgagagcaccgagcacgagggcggacggcggcgcctggccgtggtctgcgactcgcgcaacggcgatttcttcggcgatctggaggccgagctttcctccatgcaggaggccggcgtctcctacaagacgctgttcctcgatgccgccgacgacaagctcatcgcccgttacaagtcgagccgccgccggcatccgctgtgcaccgacggcaccaccatctggcagggcatccagcgcgagcggctcatgctcatgggccttcgcgaccgcgccgactacgtcatcgacaccaccgatatgctgccccagaagctgcgcagcaccatccgggggctcttcgccactggcagcgagcgcaaggggctcgcggtcaccgtgtactccttcggcttcaagcacggcgccccctacgacgccgacctcgtcatggacgtgcgcttcctgccgaacccctattacgatccggagctgcggccgctgacggggctggacgccccggtgcgcgacttcgtgcgcatgcgcgaggagaccatcgagttcgagcagaaatggcacgatttgctggacgtcgtcatgccggggtacgtcgccgagggcaagcagcagctggccatcggcgtgggctgcaccggcggccagcaccggtcggtggcgcttgccgaggccacgggcgactacctgaagtcgaagggctatcgggtgagcgtggcccatcgcgatctgcgtctggccgagcgcggtcacgacgtgcagcgcgagagcgacaacgtgctggacgcccgcgccggcggcggaaaggaagcgtagaaggtggccggcataaagaagagcaccgaggccttccgcgtcgatccggcggccacagcggcgttctcggccctgcgcagcgcgcttccgaacctgcggcctttggatgaggacgcccgcgcgctgaaggcggtggtcgtcggcgggggcaccggcgctcccgtctccatccggacgctgctctccttgggcgtgcagacgagcgccgtcgtggccatggccgacgacggcggcagcaccggcgttctgcgcgaggaggccgacgtcacgccgcccggcgacatccgaaagtgcctcgtggccttcgcgaaggatcccgccgacccgcttgtgcgggcgctcaagtaccggttcgccgtggcccgcgaccatgctctgggcaacctccttctggccgcgctggaagatgcgacggggtcgtttcccgaggccatcgccatctgcgagaagctggtggacgcccaggggcacgtgtatccctcgacgctcgaccatgtggtgctatcggcccagacccaagacgggcgcattctggacggtcaggccgtggcctgccattccaagacggcgcttgcgcaggtgtggctctccgccgaggacggccggccaccgcgtccttacgagccggcgcttcaggccatccgcgaggccgacctcatcgtgctgggcccggggtcgctgttcacctccatcatcccgaacctgctcatccccggcgtcgtcgaggccatccgcgcctcccggggccgcgtgctattcgtgtgcgccctggccgacgtgcagggggagacgtgggggctgacggcccgcgagcacttcgaggcgctggcggcccacggtatggaaggcctcatcgactacatgctcgtgcactcgaaggtgcccctgcgcgcggaaagtcccgccacgggcagcttcgcggccatctccggggccgagctggagcacgcctccacgagtgatttgaacgacgaccagctcatcaagggggtgcgtcccatctccatctcctacgccgatatgctcgccatccagtcccgcggccccatcgtcatcagccgcaacctggtggacgccgagcagcccacgtggcactcgcccttcgcgctgcgcgatgccttccagaacgtcatcaagctctcgcgggcgcgccggagctaggctatgtcgttcacgtccgaggtgaaagacgagctggcccgggtcatgcccgcctgtccgcagtgcgagaaggcgacgctcgcggcgctggtgcgcatcgaggggacgctcttcgtgagcggacctgcccgctaccgggtggagatcgccacggacgcgccggcctcggcgcggctcgtcgtgcggcttctgcacggcatctattcgttgaggacgaacctcactatgcgccgttcggtgctgcacaagacgccgaactaccttatcgaggtgcctgcccagccccatctggccgacgctttgcgcgacatgggggtgctctcggccgagggaggcctggagatgggcatcaaggaatcgctggtggccaagccctgctgcgcggcggcctatttgcgcggcgcttttctgggcagcggcttcatctcgaaccccaaaagcgactttcacttcgagatcaccgtggaatccgaggcgctggccgagggactcgtggagctcatggcccgcaaggacatcacggcccgcatcatagcacggcgcagctcgtacatggtctacctgaagagcggcaacgccatcacggagttcctcgctttcaccggcgcccaccaggcggcgctttccatggaggaggagcgcgtcgtgaagtcggtgcgcaacgacgtgaaccgccagatcaacgccgagctggccaaccagcagaaggcttcgaacgccgccgtggagcagatttacgccatccggcgcgtggtggagcactacggcatggaggacctgcccccggcgctgcaggagttcatccgcctgcgggtcacctaccccgaggcgtcgctgaaggagctcggcgagcgggcgacgccgcccctttccaagagcgccgtctaccaccgcgtccgccgcctcgagtcgatggccgccgagctggacgcgggggagtagcgtcgccaaccccatcgaggtggtaaacggcttctctagcttctcccttgtgccgtatttcttccagtaagttgtgcccgagtcaatttactggaggaaataggcggcaagttgttgcgctcgcttttgtgcaggcgggacggttttcggggccgtcggctttatcgtggtgggaatcgcttagcttcgtagtaaacttgtgagaggcctaacagctgatacgtgcccatcgggcttcgcgagtatcttgtgaaaggagatacgcatgacaaccaaggtaggcatcaacggattcggtcgcatcggacgcctcgtcttccgcgccatggccgacgatcccgaggtcgaggtgatcgccgtcaacgatctgggcgacaaagccaccgctgctcacctgctgaagtacgactccatccacggcatccgcaatttcgatatcgaagtgacggatgacggcttggtggtggatggcaagcacgtgaccatgctttccgaccgcgatccggcgaacctgccctggggcgagctgggggtcgatgtggtcgtagaggccaccggcatcttcaagaccggcgagctggcgcagaagcacctggatgccggcgcgaagaaggtcgtcatcacctgcccggccaaggacgaggacatcaccatcgtcatgggcgtcaacgacgatcagtacgaccccgaggtgcacaacatcatctcgaacgcctcctgcaccaccaactgcctggctcccttcgccaaggtgctgctggagaacttcggcatcaagcgcggctacatgaacaccattcactcctacaccaacgaccagaagatcctcgatcttccccataaggatctgcgccgcgcccgcgctgccgccgtgtccatgatccccaccaccaccggtgccgcccgcgccgtgtccctcgtgctccccgagctcaagggccgtctcgacggcttcgccacccgcgttcccacccccgacggctccatggtcgaccttacggtggagctggagaagtcggtgaccgccgaggagatcaacgccgccatgaaggccgcggccgagggccccttgaagggcatccttgagtacaccgaggatcccatcgtgtccatcgacatcgtcggcaacgaccactcctccatcttcgactcgcagctgaccatggtgctcggcggcgagggcaacttcgtgaagtgcgtctcctggtacgacaacgagtggggctattccaaccgcgtgaaggatcttgttaaaattcttcttccggaggaataagaattttaatcaagatcgccgacgctgcggttccgacaggcacctggccttgccccttgtttggggcacggcgcggcacgaaggccgcttggccccaaggcggggcaattccaggcacctgtcgaaacctcgctgacttccttgggcgaaccagtgaggcaaaataattagtattttgagaatcccggttcccttaatgagccgggttttctctttgggaaaggaacgacatggcggatatcaagaccattgatgacgagaatttcgcgggcaagaaggtgctcgtgcgcgtcgacttcaacgcgccggtggatgccgatggcaacgtgaccgacgacacgcgcatccgcgcggcgctgcccaccatcaacaagctcatcggcgacggcgcccgggtgatcctcgcgagccaccgcggtcgcccggcgggggagggcttcgaggagtccttcagcctgggccccatcgcgcgccgtttgcaggagctgctcggccgcgacatcgtgctctcgcgcgagcttatcggacctgcggctcaggaagccgtcgacgcgctggaagacggtgacgtgctgctgctggagaacatccgcttcgacaagcgcgagaagaagaacgaccccgagtttgcccgtgccttggcagacctcgccgatgcctacgtgaacgacgccttcggcaccgcgcaccgcgcccatgcctccacggccggtgttgcggcttatctgccctcctgtgccggctacctcatggaacgcgaggtggccacgctcacgggtatgctcgacgagccgcgccgccccttcgtcgccattctcggcggctcgaaggtctccgacaagatcaaggtcatcgacgcgctgctggagaaggccgacaccctcatcatcggcggcggcatgtgcttcacgttcctggcggcccagggcaaatccgtgggcacctcgctcatggaggccgattgggtcgagcgcgccggcgacatgatgaagaaggccgccgaccgcggcgtgtcgctgctgcttcccgtggacgtcgtgtgcgccgatgccttcgcgaacgacgccaacctcgccaccgtctcggtggacgagattcccgacgacatgatgggcctcgatatcggcccggagacggccgagctgtacgccgaggccatcggcatggccaagagcgtcttctggaatggtcccatgggcgtcttcgagatgccctccttcgaggccggcacccgggcggtggccgaggccgtggccgccaacgaggaggctgacaccatcatcggcggcggcgactcggtggccgcggtgaaccagttcgacctggctgacaagatgaccttcatctccacgggcggcggtgcctccatggagctcgtccagggcgaggcgctccccggcgtcgaggcccttcgctagaaaggaagcaatatgccccgcaagaacctcattgccggcaactggaagatgaacaacaccatccccgaggccgtggtgctcgctcaggagatctcgaaccgcatggagcgcgactggctcgagctggtggacgtggccgtctgcccgccgtttgtggatctcaagcctgtgaagagcgtcttcgagttcgaccgcgtggatatcgccgtgggcgcccagaacgtttactgggagcccaagggcgcgtttaccggcgagatttccatcgccatgatcaagaacatcggctgcgccttctgcatcgtcggccattccgagcgccgcaatctgttcggcgagaccaacgaggaagtgaatttgaaggcccgcgcgctcatcgaggccgacatcacccccatcatctgcgtgggcgagtctctgtccgtgcgcgacgggggcacctacctcgatttcgtcacggcccaggtgcgcgcggcctatgccggcatggacgcggccgacgccgcccgtaccgttgtggcctacgagccggtgtgggccatcggcacgggtcgcacggccacgcccgagcaggccgaggaggtctgcgccgccatccgcgccaccgtgtcagacatgttcggcgctgaggtggccgagaacctgcgcgtgctctacggcggctcgatgaacgaggggaacgcggcgctgctcctcgccgagcccgacatcgatggcggccttatcggcggtgcggcgcttaaggccgattcgtttatccaaattgtgaaggaagcctgctaaatggaacgacttgttgtggcgccggcccgcgaagagctgcgccttcccgcctgtctcatcatcatggacggcttcggcctggccgagccgggccccggcaacgccatctcgctggccgcaacaccggtgctcgaccgcctgttcgccgaggcgcccaccacgcgcctggcggcctccggcgaggccgtgggcctgcccgaggggcagatgggcaactcggaggtagggcatttgaacatcggtgcggggcgcgtggtgttccaggagctcacgcgcatcaaccgcgcctgccgcgacggatcgatcgccgtaaatccggagatcgtcgcggccttcgagacggccaagaagcagggagccgcgctgcatctcatgggactgctctccgatggcggcgtgcactcctccaacgagcacctctacgcgctcgtggacgccgccgtggcggccggggtgccgcgcatcatggtgcactgcttcatggacggccgcgacgtgccgcccgccagtggggccggttatatggccgagctcgtagatcatctggaacgggccgcgtcgaaggccccggctggcgcgccctgcgagatttccatcgcctccgtggagggccgctactacgccatggatcgcgataatcgctgggaacgcgtggagcgagcctacgatgccgtcgtctgcgccgagcccttccgcgacctggctgccgtggctgccatggaggcctcctacggaagcgaggtgaccgacgagttcgtcgagccggtggccctggatgcccgcggtatgcgcgacggggatgccgtcatcttcttcaacttccgccccgaccgcgcccgcgagatcacccgcgccatcaccgatccggccttcaccggctttgaacgcaagacgtggccgagcgtgcatttcgtgtgcctcacggagtacgacccggacattccggcggctgtggcattccccaaggagttcccggaaaacgtgctggccgatgtgctggctgacgcggggcttacccagtaccacatcgccgagacggagaagtacgcccatgtcaccttcttcttgaatggcggtcgcgaggccgagaaggcgggggagagccgatgcctcatcgcgagccccaaggtggccacctacgatctgcagccggagatgagcgagcccgaagtggccgacaccctggcagcggccattgacgccgatgaggccgatgtgtacatcgtgaactttgccaattgcgacatggtggggcataccggcgtcgtggacgcggcccgcgcggctgtagaggcggtggatgccggcgtggggcgcgtgctcgccgccatcgagcgcaagggcggcgtggcgctggtcacggccgaccacggcaacgccgacaagatgattgccgaggacggcggcgcgttcaccgcgcacaccaccaacccggtgccgctcgtgctcgtggacgcgagcgggtcggacctcgccctttccggcgcagaagggtgcctggccgacatcgcgcgcacgctgctcgcgatgatcgggctgccgcacccgcccgagatgaccggcgagagccttctggcttgaaatcgtttcgatgccgccgcgtgacccttgaaggcgccggcggcatcggctatactagtcaacttgcgtacgcaaaacactggaaacgtaaaggaagcgtgacacgttgaatcccctggtaatcgtcttcttggttctgctggttctgtccggcgtcggccttatcatcttcattctcatgcattcgggcaagggcacgggcatctcggacatgatcgcgagctccatgtattctacccagacgggcacgagcatcatcgagaagaacctcgaccgcatcaccatcggctgcgctatcgtgttcctgctctcgctggtggttctcatgatcatttacccccacggaaccattacccagtaattggaaatttcttcttgcatcgcgcgggagttctgttagaataatcgtcgctgcaaagagcatgtcggagtggtggaacggcagacacgctagcttgaggtgctagtgcccatataccgggtgtgcgggttcaaatcccgcctccgacaccagagaaatgacagggag

SEQ ID NO: 10550 - DNA, 3429 bp, Unknown
  gut microbiota DNA sequence
gttttgggctcggcgcggcacgaaggccgcttggcccaaaggcggggccatatcaggcacctgtcggcccctcgctgacttccttgggcgttcgggggagtcgcacttggtccaattaaggagtgaatgatggagacaggcaaagagaaaacagctcatgggcggcaggtagagagggttctttggatcgttctcgtcttgaacctggtggtggccgcctccaagtacttctacggtctggcatcgggatcggcctccatgcaggccgatggcatccactcggtattcgactcgctgggcaacgtcatcgggcttgtcggcatcagcttggcggcgcgtcctgccgacgcggggcacccttacggccattccaagttcgagacctacggttcgctcgccatcggcgtgctgctcctcttcgccgccttcgaagtaggctcctcggctgtggagaagctggtcgccggcacctacacggctcaggtgacgcccgtgtccttcatcgtcatggtgggaaccctcgtggtgaacctgttcgtgaccttgtacgagcgccgtgcgggcaagcggctcaagagcgagatcctcgcggctgatgcggctcacacgctctccgacgctttcgtctccatcggcgtcatcgtcggcctcggcttcgtcgtggccgggttccccatggccgatcccatcatggcgctgctcgtgaccgtggccatcctcgcctcggcagtgggcgtgttccgcacggggctgcgcaccctttccgaccacgcgcgcattcccgccgccgacatcgcccgcgtggcggagaaggtggatggcgtgcggtcgatccatgccgtgcgcacccggggcaccgaggccgaggtctactgcgatctgcacgtgctcgtcgatccgcagatgacggtgcttgccgcccatgacctgggagacgaggtggaaggtgtcgtggctgcggccttccctcaaatcaaggaagtgctcgtgcatatcgagccggatacggccgccgagcgcgccgagggctagcgcaaaaaagccgccgtccgatttcgtgggcggcggctttcggtaatctgcggggacggccagggacggcttccctaggcttgggcggtgaaccggatgccgacgtagaaggcggtattcggcaggcccgagatgtcgtagacctcgtccagctcgatgaccgacacgcgccagttgtaggtaccgttgtccgtggacacgacgccggcctggtaggtgttgcccgagtcgtccacgccgctgtcggtgacctcggcattttccagcccctccacctgcatggccccctggacggccttctcgatggtgcccgaggcgaaatcagcgtagcgcaggcgcatgtcgtcgcccgccttgcgcgagacggtgagcgtccaggctcccttcaaaagcttcacggcgtcgccggccgacagcttgtcgatgccctgaacgtacatgagccccgcttcttccagggagacgtcggcgggcagcttgatgacctcgaagccgccgtcggggtcggtgcccacgggggtgcgctcgtacaaagtgtagccggcatcggtaagcgcggtcatgatctcctcgtcggaaagcggcatgagcgaagagagcaaagggaagtcgtaggaaacctcgcgggccaagttgtcctgcagcgtctgctgctggcggatgggctcgttcatgatctggtcgaagtagcgccccaagaaaaggcagccgacaacggcggccacgaccatggcggccagcatgatggccttcacgcgcggcggcatctccaagggacgtgagagctcggcgccgtcgtagtagcgaacgtctccgatctgcacggtgctcttcggctcgcgggccagcggatggaagcctgcacggcgggtgggaggcatctcggcttcgcccgatcgggcgtggctggccttgcggcggcgcgcctcctcggcggggcttgtagcggcttcggttgaatctacggaatcgcgcaggttctcgtcttgggtcatgaatggcgctcctgtacgttacggtgttgctgccgattataccattgcttccccgttggctctctgctaggataaacggactccatgggggagtagctggcgccaacgggcgcggctcgtcaacatcgtggccacggttgcgcgcatgggcggcaacggcggacctggcgagcctcaattagcgagactcatggtgcaggattgaccgcgaaggtctgttctgcaccatgagtcttttttgtgggtcggacgggccggcccgcgcggaccgaggaggaagacgtggatctttcgatttttgcgaccccggaggcatggatcagcctccttacgctcattttcctggagatagttttgggcgtggacaacctggtgttcatctccatcaccaccaaccgccttccaccggagaagcagcatatcggccgcaagctgggcctggctggcgcgctggttatgcgtatcctcttcttgtgcttcgcctcctatctggtgcacatgaccgcatcgctgttcaccgtgaacctcggcgcctacagccacggcttctcggtgcgcgacatcgtcatgctcgtcggcggcggctacctcatctacaagggcatcagtgagcttatcgacgtgctcgccctcaccgagatcaaggccgagacctccgaggagcacaaggcgcgccatctcatcgggctgccccaggccgtcggcaccatcatggtgatggatctcgtgttctccatcgattcggtcatcacggccgtgggcctggccgagcacctcatcgtcatgattctggccgtcatgatcgccgtgttcatcatgatgatcttcatcgatcccatctccaatttcatcaacagtcatccggagatgaagatcttggcactggtgttcatctgcgccatcggcgttctgctcgtgcttgattccgccggcatccacacctccatcgaggtgctcgacatgcacatggagaagctcatggtgtacttcgccatgatcttcgcggtcgtcttggagttcattcaaatggccttcaattcgcggctgaacgcgtggaagaagcagctggccgacgaggccatcgaggaggcggtgcgcgaggccgagggcggcgaggcgccggcgaaggtgggggagcaggcccgtgcccgcgtggacgcggccatcgagaacgccgagcggctcaactagcggcgcggctgcggaaggatgccccgggcggccgtttgcggacgagtcttgaatttcttgaaattagggcttgcatcgtctggctgcttcccttatagtatctcctcgcgatgcggacatggctcagctggtagagcatcaccttgccaaggtgagggtcgcgggttcgaatcccgttgtccgctccattgtcatcagaaggccggtcagg

SEQ ID NO: 10551 - DNA, 177142 bp, Unknown
  gut microbiota DNA sequence
gcctccaacctggaacctatatgcggacatggctcagctggtagagcatcaccttgccaaggtgagggtcgcgggttcgaatcccgttgtccgctccatgatttcacgagtcgagagcctgcgggctctcgatttttttgctggaagagccctctttgcgtcgtgctcggtgcggaaagctgcagcgttcggtttcccggcgagctgagatgactttgccttgatcgttgatcgcgtgcacaaaatgaacgccaccctatggtagtatggcagcacgaaaagattcggccgtgagaggcggttgcccatggagatgagcaaagtaaaatgccgcgagtgcaaggcccgcgccacccagtacgagggggcgttgccgactcggggcgttgcgaaggtcctcgtggcagggttcgccatctacatcctcggcctgtgggtgctcgtggctctggcgggtttcacgaccggcgatgccgccgaggtgggcatgatggacatgctcatcgtgctggccgtcgtcgtcacccttgccacggccggggtggtgtggtggatgttccgcccgaaggccggcaaggtcgttatctgcgagaagtgcggcgcccgctacgcggtggtgcagcctcccaagtacaccaacggttggaactacggcaagattgccccggcatcgggccgcgagcttcccgaaggggagccggcgatcgatgagggaagccaggctcctgcccccgcatccgcgccatctgccgccgattccaaggaatcctgaaaaaccctttgacagggagcggcgatctgttaaactactaactcgctgctgaacgaaagcgaggcggcaacccggaatgcgcgattagctcagggggagagcaccaccttgacacggtgggggtcacaagttcaaatcttgtatcgcgcaccatgaattcgcaggtcggaagacttttcttccgacctttttcgttatctcggcaagttttcgtaacacagcccttacgtggaaaagttgtggaagcgaaataacctcacctggggtatcattgttctcaatgttcccctaccgaggagttggtctttccatgagcacagaatcaatgaccacgacaggggccgccgtgccccaggccgcagcggacggggtgaccaaccccaagggcatcggcttgtttcgaatggtcaccacggtcatcacgctcatcgtcggcgcgggcgtgttctcgctgtcgggcgatgcggcggccggcggcgcgagcggctgggcgatactgaccgcctggggcatttccgccatcggcgtgttctgcctcgtcatgacgttcttcgcgctttcccgggttaagcccgacctcaagggcggcatctacacctacgccgccacgggattcggcgacttcctcggcttcaacagtgcctggggctactggatctcggcccttctgtgcacggtcagcttctcggcgcttctgttcggcgcgctgtcgtacttcttcccgatcttcggcaacggcacgaacctctacgccgtcatcggcgcctcctgcatcatctggttctacgccttcctcgtgagccggggcatcagcgaggtgaccctcatcaacgcggtcatcaccatctcgaagttcgtgcccctgctcatcggcatcatcgccatcatcttcatcggcgccttcaaacccgacatcttcatcgcgaacctcaccaccggagccgacccgtcgctcgccttcgtcgaccaggtgcagacggccatgatggtgaccatctgggtgttcattggcatcgagggcgcggtggccatctccggccgcgccaagaaggcgaaggacgtgggcaaggccactatcatcgcgttcatctgcgtgctgacgctgtacctgacggtgtccatcctctccatgggcgttatgccgctctccgagctggccaaccttgagaacccggctctggcctacgtgatgcaggccgccgtgggcgattggggcgccgtgctcatcaacttcgccgtgtcgctctcgctcatcggcgccatgctcggctatacggtgctcgccagcgagtcccccttcgaggccgccgaggagggcgtgttcatcaaggccttcgccaagacgaacaagaagggcgcgccggtggtgacgctggtggtcacgaacatcatcatcgagctgttcctcatcacttggctgttcaccgattccacctaccagttcttctacacgctgtccgctggcatgattcttctgccgtacctgctgtccgccgcctactttgcgaaagtggccttcaaggagcccgaggccttcaaggggcaccttagcgggccgattctctggtggcgtatcctcggctgcgtgggcgtcgtctacagcctgttcctgtcgtgggccgcaggcgtgctcggtgtcatcctcatgtgccttctgtacgtgcccggtatcgtcatgtacatctggggcaagaaggagcgcggcgagaagtacttccagagcaccttggacaaggtggtgctcgtcgttatcatcgcggcggcctgcctgtctatctacctgttggtgacgacgcccggcctcgtgtagcgacgcttcggtcgaaacgagaaagcggccccggcaatcgcgccggggccgctcttttcacggaaggggagggtggtggatccgtggaagggaaggagcgagccgggggcccttgggcgagcgcgctggcctcgtcgtgtgcgaccctagtcgagattaagcggcgaagcgctctcctcgccgaagagcttcaggcactcctcgctcacgacgaagcgcgccgcctcgggcagcatgcgcacggtgaagggcgtggtcgtccccgtcacctcgccgtcgtattgcacgtccagcggcgggtcggcgacgacggtgcattcccggcagcggaagacctccatcacatcggggcgcgcggggaactcgccggcgcggtcgagcatgcagcttaagatcgccgggatgaggcccacggcgtcgtgggtgttcatgaccacgatgtcgaacatgccgtcgcgcggcaggttctcgtggacgagcgagatgtcgaactgcagcttcgagaagttgatggcgagcactcccacgccctgggtctcgacggtcttcccgtcgatggtgagcgtgatgcgggagaactgcggcgcgaagttggcgaaggccgccgtgaagtaggccatggggcccagaaggcgcttggagggctccgcgccctccatgatggcggcgtcgtagccggctccggcgatcatggagaatccgaagcgctcgccgttggagagctcgatctccccgatgtcgaaatccatgaggcgctgctcgcgcatgagatgggcgagcgcgtggggctcggccggcgaggcgaggttcatggcgagcaggttcgcggtgccggcggggaaggggagcagcgggatgcccgtctcggccaaaaggtaggccaccgaggccaccgtgccgtcgccgccggcggctaccacggcgtcgaaattctcggcgtcgcgcagaaaatcggcgaggtcggtatcgccgtcggtgcagcgcacgcaaatctcgtcgccgtcggacgcaaaggcgcgcatgaagtcgtaaatggccccgtcgcggaagccggaggccaggttgttcacgatgaggagtttcacataattcctttcccttgctattataggatggtactacaacctcatctcttacagacagggaccgtcgtggaatacattgcaagccaagaaaacctggaggccttcgtgcgcagagcggcctcgtcgtcggtcttggccattgatacggagtttctgcgcgagaagacctactacgcgaacctctgcctcattcagctggccacggatgcggaagtggccgtcgtggatcccttcgccatcgaggacatgaaggtgctcgccccgctgctcaccgactcttccatcgtgaagctcttccacgccggcggccaggatttggagatcctctatcgcgagctgggcgttttgcccgcgcccctgttcgatacccaggtggcggccacccttttgggccacacccagcagatcggctacgggcctttggtgcacagcctgtgcggcgtgaacttgaagaagagcgactcgttcaccgactggtcgcgccgacccctttccacctcccagctggaatacgccgccgacgacgtgatctatctgccgaagatgtaccgcatcatggtggagaagttggaggcgaaggggcgtctgcactggctcgacaacgacttcgccgccatgagcgacccggcccattacgagagcgaccccttcgagcgctacaagcggctcaagcgcgtgggccagcttacgcgccggcagctctcggcggcacgggaggtggcgtgctggcgcgaggtgacggctcaggagcgcgatatgccgcgcaagtgggtgctcaccgacgagcagatcgtcgaggcctgccgtcgcgagtcccgcaccatcgacgatttgttcctgatccgcggcgtgcgcgagaagctgaacactcgggacgcccgggccgtggccaccgtgctcgtccggggtctcgatgccgcgcccgatacgtggcccgagctggacaagtcgccgaagagcgagcgcaacgtcgatgccgagctcgatctcatggaggcgctcgtgcggctgcgcgccaaggagaacgacatcgccatgcagacgctggcctcccggacggagctcgcccgcgtcgcccggggctacaccgccgatgtcgatgtgctgcgcggctggcgccgcgccatggtgggggacgagctgctggagcttctcgccggccggctcgccctgtccctcggccccgaaggactcgtggtgacgccgcgttcctgaggcggttacgtatctttcacgctttcggcgcctcccgggcgaccggggcgctcccatgcctataattgactgccaaaaatgcaaggcatacgcaaggagaaccctatgatttccagcagttacctcatgctcatcgtcgcgacgctcgtcatcggcatgggcgcccagtggtacgtgaaccacaaactgaagacctactcccatgtggcgaactccacggggctgaccggcgccgaggcggcgcgccagatgctttcctactacggcatctcgaatgtgcaggtcttccgcggcggtccgggccaggactacttcgacccgcgcagcaactcggtgacgctctcgcccgaggccttcgacgggcgcaccatcaccgccacggccacggcctgccacgaggtgggccatgcctgccagtacgcccaggactacacgcccatgaagatccgcggggccatcgtgccggcggtgaacctggcctcgaacgcctggatctttctgctcatggctggcatcgtcctgaacatcgccggtcttaccaccgcggccatcatcatgtacgcggtggtggtgctcttccagctggtgaccctgcccgtcgagttcaacgcctcccagcgcgccatggcctacatgggtcagatcggcctgcccgcccaggagcgcaagggcgccttcgacgttctgcgcgcctgcgccttcacctatctggccgccgccctcacctccatcctgcagcttctgtggctgctcggccagcgccaggagtaaacggagcctgctgtggcggtggaagagcgcgagacgacaacggaagaggaagccgccccggcgctgtcggtgtcggcggccatgggcctggccaagaatgccctggaagaggtggtggtgcgcctggtgggcgaggtttccgaggtgaacgacaagcccggctacaaggccgtgtacttcaccgtgaaggatgagaaggcctcgcttccgtgcatgatgtggatgaaccgctaccaggcttcgggtgtggcgctttccgtcggtgccctggtggagctcaccgggcgcttctcgctgtacgcggccaaggggcgcatgaacttcgacgtgttctcggtgtcgttggccggcgaagggcagctgcggctgcaggtggccaacttggcgcaggagctcgaggccatgggactgatggatccggcccgcaagcgtcctttgcccgcctatcccgagaccatagggctcgtcacctcgccgcgcggcgccgccgtccacgacgtgctgcgaaccctgcgacggcggtatcccttggcccgcatcctgttcgccggcgttcccgtggagggccccggggcggccgacgggctcgtggacggtctggccaaggtggtcttcgccggcgctgaggtggtgctcctcgtgcgcggcggcggatccttcgaggatctcatgcccttcaacgaccgtcggctggcgcgcaccattgccgcctgccccgtgcccgtggtgacgggcatcggacatgagccggacacctccatcgccgacatggtggccgacgtgcgggcctcgacgcccacggcggccgccgaggccgtggcgccggctcagggtgagatcgccgcccgcatccaggggctcggcgccgccataggccatgccgagagccgtcgtttggacgcgctgtcgatcaagatggaacgggtggcttccctgccgctgttccgcgagccgacgcgcctgttcgacggcgaggcgctggccttggacgacctgtccgaccgcctcggccgcgcgctgccggaggcgctgcgcgaggatcgccacaggctggggcttatcggcgaggcgctgggccgcatgctgcccgggctgctctcggcgcccagaggagcggtgggcgccgctgcagggcgcctcggctacctcggcgagcacttcggcgagcgctcccggcagcagctcgatggggcgcgggggcgcctgatgcgcgccggcgcggcgatgaccgacccctatcgcgcgtcggtggccgtgagcgcggcgcgcctgcacgatctgtcgcctctggccatcatcggccgcggttacgccatggccaagggggaggacggccgagtggtgagctcggtggacggcgtcgcggcgggggggcgcctcgtggtgaccctctccgacggtgagctggactgcacggtggacgatatccgccgcatccacagcgccgtcgaggcttgggactgacgatacgcgcagcgacgagtgatacacgcaacgatgagaaaggaagcgccatgagcgatgccgcgaaccttgacgagaagaagccggtggaagagctgaccttccgcgaggccttgagcgagctggagtccatcgtctccgtgctggagagcaatacgctggaactggaggagtccctcgccgcctacgagcgcggcgtggtgctcttgggctcgctgcagaagcgcttgggcgccgccgagcagcaggtggaggtgctcatgggcgagctggtggccgcccccgacgacgagacccaggacacgaccctctcctagaacggtgacggcgcgacagattccgtaggggcagaccttgatctgcccattcgaccggaatgatgtcttcagttggaagggggggggatcaaggtcgccctctacggggagccgcctccgcaattcaacggaaaagatgacggggtgtcaatcggtgagcggcgctccgcttgccgataaggacgcgagcaggtgcgacgcgccctgcgtgcactcctaaaataggggaaactattgattaggaggtaagtcattgaacgtcctcgtcctcaacgccggttcttcctctctgaagtaccagctcatcaatgttgaaacccatgaagtgctcgccaagggcatctgcgagcgtgtcggttccgccgaggccttccacaagcacggcatcgacgagaatgaggtggtcatcgacacccccatgcccgatcacaacgccgccatggccctcgtgctggaggcgctgacgagcggccccaccaaggccatcgactctttggacgacatcgacgccgtggggcaccgcgtggtgcagggcggcaagtacttcgatcgctccgtgctcatcgatgacgatgtcgtcgccaagatcgacgagctggcggagctcgcgcctctgcacaacaaggccgcgctcatgggcatcgaggcctgccgcgagcagatgcccggcaagcccatggtggccgtcttcgacacctcgttcttccagaccattccgccgaaggcctacatgtacccgttgccctacgagctgtacgagaagcacgccatccgcaagtacggcgcccacggcacctcgcatcgctacattgccgagcgcgcggccgccttcatggacgagcccttggaggacctgaagctcatcacctgccatctgggcaacggctgctccatctccgccatcgaccacggcgtggccgttgacacctccatgggtctcacgcctctcgatggccttatgatgggcacccgctgcggcgccatcgacccggctatcgtccccttcatcatggagaaggagaacctcacggcggccgaggtgaacgacctcatgaacaagaagagcgggcttttgggcatctctggcatctccaacgacctgcgcagcgtgcgccaggcctccgaggagggcgacgagcgcgcccagctcgcctacgacatgtactcgaactccgcgaagaaatacatcggccagtacatcgccgtcatgggcggcgtcgatgccatcgtgctcacggccggcgtgggcgagaactgcgacaagatgcgccgcatgatcttcgcgggtctgcagccgctcggcatcaagatcgacctggagaagaaccgcaaaggcctgcgcggcgagcgcgagatctccacggacgactccgaggtgcgcatcgttatcattcccaccgacgaggagtacatgatcgcccgcgacacctatcagttggtgaaggagggcacgctcgagatcaccgagcttgcgtaggcgctttcggctccgaaaagctagccccggattgacggttgttctgtaaagatcgtcaatccggggcttctttttcttcggattaggctgtttcgggaaaatgctagccacaaatcgacggttctaacggaacaatcgtcgattcgtggctggaaaaaacgagatcgaggcccagagcgggccacgatctcgtggggagggattgcggggcgctcgggtgcgcccctatcgcatcaggcgagctacttcacctgggcgagggcgttgttcacggcgtctttcagagccgtggaggagacggtggcgccggctacggcatccacctcggtggactgggcctcgatgatccgggccggcagggcgtcgagcgccaagctgcccacaccagcggtctcctgctgctgcacgatgtcgatggcagcgatcttgccgccctccaccttcaccttcaccgccagctcgttgcccatgcacagggtcgaggtgccgaggtactcgttctcgccgagcttcgcggacgcggtcgggtcaggatcgacctcgtggctgccgctgccctgggtgtagacgatctcggaggccacgcccagggggagcgtcggcagcggatccttctcggccgccgcgcccacgccggccagctggccgaaaatgaggcactcggccatgttgccgccgccgttgtactggtacggggtcatgccgccgaactcgccggcggagtagaggtgcggaatgggctcgccgtcggtgcccacgacctcggcacgggcgttgcggcgggcgccgccctgggtattcaggaaggcctggatcatctcgatggcgtagaaggggccctcgccgaaggcgcgcatggtctcggcggcgcggaagaaggccgggtcatagccatcgttggccatcttgttgaaatcggtcacggtctgctcgagcttgccggccggaatgccgagggcgctctcgagctcggcgatggtggcggcggagacgacctgatcctcgaacccggccgggatgccgtggtactcggcgatggcctcgttctgggcggcgtcccacaccatgtaggtgttgcgcgggcgcttcacatttacccagtcgccgttgctcggcacatggccgtggcggttgtacacgtcctcgcgcaggtagcgctcgccgccgttgcccacgacgatgacgctgccggaaaggttgcgcaggtcgttgaacgtcttggcgtgctgatcctcgttcaccacgaaggagatgccgccgagcgcgaagcagttgccctcgtaggcctccatgtgccacagatcggcgccgacgcccatggccatcttcacgccgtcgccggtattgaacagggtgccggccggggtgctcttggtgaggcccaggaagtcctcgaccatctgcttgttgttctcgaagccgcccatggtcatgatgacgccgttcttggcgcggatgttcaccgtgtcgccggccttgtcgatctccacaccgatgacggcgcggctgaccgggtcttggaagagcttcgtggccggggacatgtaccacacgtcgatgttgtcgctcatggacatgaccttgttgcggtaggtcttccacagcgcggagttgcacacgttgtcgctcacggtcagcacgtgcagcgcctcgccgccctcgagctcggggtactcggggatgaacatggcgatcatcggctgggcggaggagtcctccttccaatcgaggaagttctcctcggggacgccgaagaagtcgcgcagcatggtcttcgtctgggtcaggccctcggcgtacacgtccatgagctcgtcatcgacggcgaaatcgccggccatggccttgttgtaggcgagcatggcctccttgtcgtcggagttcaggatgatctggccgcagaagcgcgtgttgccgccctccatgccctgaggggccttatcgatgagcagcaccttcgcgccggcgtcggcggcgtagcaggcggacacggcaccggcgccgccgaagccgatgacgacgacgtcgtactcgccgtcccaggcgatggtgtcggcgaaggtggttcctccgttgcccgtgttggccatggccttatcggccggggtctgcggcgcgcagccggcaaggccgaggccggcgacggcggccatgccgacaccggcgctggtgatgaactgtcggcgggtatattttcccattttccactcccttgtggtcggtatcttcgcgccgggttgatgtctggcgcgaagacgtcgcgtgacgtactcgctccggcgctccggggatcgcggtgtccccgatcacgctggtcactttagcggcagcattgaggttagcgtgagagataacctgtaggttagcgatggcggaacttgctaacctatcccgctaacccacctttctggaaatgaggagagactgccaatttgccgctggcgcttatctgccttttgtggtttcatgggtggtagcgaaaaggggaggggcaatcgatgaaacatctgagagacacgatcgcggggctgcgcctcgggttcgaggagcatttcagaagcgctggatccataagtttgttcgtaggtctggcctgcaatttggccttcgtgggccaggtgtacttctggccggccatgtggcacacctcggcgttcatgttctcctataccgatgcttcctatgtcgccgagttcctctgcgcgctgatgcttgggcggaggctgcggcagagcgggcgccttgccgtgggcagccgatggctttggactttggccctcctcgtgcaggcgagcttggtgctgtactgcgtgctgttcggggcgggcatccacgtgcccgagcccgtcaactgggtttgcggcgctatcttcggcgtctatctgcccgtggccatgacctcgtggttcgccgtgcacatcgatcgccgctccttttctgtgatttggaatatcgtgctggcgggcgtgtttgcttccttcgtcatctgggtgttctcgggcctggaggcggtaaagctgtgcgtgtgcatgggggtgctcatgttcgtggggacgttcgtgctctctcgcaagctgcgcacggagcaggccaaggagggagacgacgccgctgcgcccgcggccgtgccggcggataccttccgctacccggcctcggcgacgtttctattcagcttctccttcatcacggccatcgcctttgccggtatcgggggcgacagcgcctcctatgcttcgggggatttcttcgccccgatgctgcttatctgcgctgtggtgctcttggcaaatgctgcggtcctcccgctgacgacgatcgccgtgcccgctatcatcgtggccgtcatagccgcctcctatcttcacctcgagcctgcgctttccttcgatctggcggcgctcggcatgttcctctttctcgcctatgccgtcgtgctcctgtgcgccagcgcgcaggggagtcggcggcgcactcttgcggccttcacgagcctcatggtggcgtttgccgccggatgtctcgtcggccgcctgtgcatggcgctctgcttcgcattcgccgagcaattcgcgtcgaacatcatggttctgctgtctattctggctgccaacgccgccatgatcatcctcgtgagacggggtgtcacgccgactcgttcggcggagcttttcgagggcgagcaggcgacgggagatctcgatgcggcccgtcgcgccaaagtggatcgcgtggctgccgcctgcggtttgggcgagcgcgagaaggaggtgctcacgctgctcttagaggggtgctcggccagcgaggtggcctctgccatggtcgtggccaacggcacggcgaagtcgcacattcgccacgtctacaagaagctcggcgtccacagccgcgacgagctcttcgagaaactcggcatcgagagagaagagaaaagcaagcaatcagtgtagcaatctgaaacgagcaggctgcgggcagggcgaggggtcctgcccgcagcctcaataatgcagggcccgaggtggccgagggggtgccgtgcgcagttccttgaagtgcataagataatattgcgaccctcgacgggccctgcacttcaatgctgtttgagcacggcaccccctcggccacctcgggcccggagggatagagaagcaaaaaagacgttatttcccctgcgcctgcacggcggtgatggccaccacgcccacgatgtcgtcagccgagcaccctcgggacaagtcgttcaccggggcggcgatgccctgcaggatggggccgagcgcctcggccttcgccaagcgctgcaccagcttgtagccgatgttgcccgcatcgatgtctgggaacacgagcacgttggcgcggcccgcgacaggggaggccggcgccttcgccgcgccgatctcgggaacgatggcggcgtccagctgcagctcgccgtctaccgcgagttcgggcgcgagctccttcaccttgaccgtcgcgcgcaccaccttgtcggaatcgtcgtttttggccgagccgtaggaggaatgcgacagcatggcgatgaccggctcggcatcggcgaacagcgaccgccacgcggcctcggcattgatggcgatctgggccagacggtcggcatcgggctgcacttccaggccgcagtcggagaagaggaaggtgccgtggtggcccaagtcgcagtcgggcacgttcatgacgaagaacgagctcaccatctgcgcgccgggagcggtcttcaggatctgcagggccgggcgcagcacgtcgccggtggagtggcaggcgcccgagacgaggccgtccgcttcgcccatcttcaccatcatcatgccgaagtacagctcgttgtccataagctcgagggcttgctcgagcgtcatgcccttcgccgcgcgcagctcggccagcttctcggcatagggctcgcgcagctcggaggtgcggaagtcgacgatgcgggcgccctccaagttgcagccggcagcggcgatgtcgtcggcgtcgcccaagacgatgaggtcggcgatgccctcggcgagaatcgcctcggcggccttgagggtgcggatgtcgttgccctcgggaagcacgatggtcttcttgtcggccttcgcgcgggcgatcatggaatcgaggaactggctcacgggaacgtcctttctcacgggtatcctactctcatgatagagcacgggccgtcgccccgcacggcgcgaccgcgcggcaggttcatttattcggtttgtatggggtttggaggccatcggatgcgggctgggtacaatatcctccgaacgacgccgcccgagcgccggcgccccattcgcatcaacgagtacgagggagagaacccgttatggccgttaattacgccgatttccgcgatatcgccatcgaagactacgacgccgtcgttgtcggctccggttttgccggggctgtcagtgcccggcagcttgccgaagagggcggtcttcgcgtgctcgtcatcgagaagcgcgcgcacatcgccggtaacatgtatgacgagtacgacgaggccggggtgctcgtgcaccgctacgggccgcacatcttccataccaacgatcagcgcgcctacgactatcttgcccgcttcaccgagtggtcgagctaccagcaccgggtgctcgccgattggtacggcacctacatgcccgtgcccttcaacaagaactctatggaaatcgccttcggcgacgagaaggcggcccggctcatcgagaagctcgtcgacaccttcggcgacgagcgcaaggtcaccatcaacgagctgcgcgcccaggaggatccggagcttcaggaggtggcggacttcgtctaccagaacgtattcctctactacacccagaagcaatggggcctcactcccgaggaagtggatccctcggtgaccgcgcgcgtgcccgtgttcatctcccgggacaaccgctacttccaggacgccttccaggggatgccggtcgatggctacacgcgcctgttcgagaacctgctcggccacgagaagatcaccgtctgcctgagcaccgaggcggagagcgtgttcgatctcgtcttcgccggccgcgaggaggatgcccccttggaggccatccacatcaagggcgtgccgttcgcaggccctatcgtctacaccggtccgcttgacgagctgttcctggggcgcttcggccgtttgccgtaccgctccctcgatttcgtctacgagaccttcgacgagacctaccacttgccctgcggcaccgtgaactatacggtgaccgaggactacacccgcatcacggagttcaagtggctcacggagcagaccggcgacaagaccaccatcatgcgcgagtactcccgggcctacgaggatccggcgacgcagattccctactacgccatcatcaacgacgacaacgacgcgctctacgcacgctaccgccgcctgaccgacgcgctgccgaacttccatccgctgggtcgtttggccgagtaccgctatttcaacatggacaaggtggtcgccgacgcgctggccgcgtccgagaagatcctgacggagacggccgacgcctaggccgccgtgcgaggcagcacgcccgcacaccgagaccccgacgaaggaggcgcttttgaagaccatcacgttcgccgtgccctgctacaactcggcagcctacatggatcattgcgtggagacgctgctcgcctgcggcgaggacatcgagatcctgctcgtggacgacggctcgaccaaagacgacacggcggccatctgcgaccgctggcagaacgagtacccggacatcgtgcgcgctatccatcagcccaacaagggccatggcggcgcagtgaacacggggctcgctcacgcgacgggcttctacttcaaggtggtcgactccgacgactggctcgatccggcggccatgttcccgctcatggtgtacctgcgcagccagctggacgcgccggtaccctgcgacatggtggtggccaattacgtctacgacaaggtagatgagggcgagcagaaggtcatgggctacggcaatgtgctgccagagggctatgagttcggctgggacgaggtgggcaccttcctgccgagccagtacctgctcatgcactcggtgtactaccgcaccgagatgctgcgcaagatgcatcttacgctgcccgagcacaccttctacgtggacaacatcttcgtctacgagcctttggtctacgtgcgcaccatgcgctacttcaacgtggacgcctaccattacttcatcggccgcgaggatcagtcggtcaacgagaaggtcatgatgggccgcatggatcagcagctgcgcgttacgcggcagatgatcgacaacgtggatccgcaggccgtgcgcaatcgccatctgcgccactatctgcgcaactacctctccatgatgatgtgcatctgctcggtgtttctgcgcatgcgcgggggagagactgacgaacaggatttgaaggatatctgggcctatttgaaggagcagaacccgtcgctctaccgccgggtgcgctcgaacgcgctgaatctggccacgaacctgcccaccgaggccggcgagaagatcggactcaagggctatcagatcgcgcagaagattttcaaattcaactaacgtcgcgtattggccgcgtaaagctccagaaggccgcggagggcgagggtttggtcgacggtgacggcgtgggtcatgagggcggctatggcctcggcgtgctggcccacgagcacgaccggcgtcgtatagccgcaatcggcccagatcatgtcgatgagcccgtcgatgcgggccacctctcccatgacgatgcccgcctgcatggcctcggccgtggtgcggccgagcagcgatttgggggccctaagctccacggcggccagctgggcggccccgcgggccagcgcctgggcgccgagcttcatgcccggggcgatgatgccgccgcggaaggcgcccgtctcgtccaaaagttcgaaggtggtggaggtgcccagatcgatgacgagggccggagcgccgtaggtgctcttggcgcccaccatctcggcgacgcggtcggcgcccacggccgtgggatcggagaagttcatcttcagccccgtcttaagacctgggcctacggtgagcgggcgcgcgtccgtgaggcggcgcgccgcatcggaccacacgccggtgagggcagggatgaccgaggcgatgatggccccgtcggccaaaggagcgctctcgggcaggtcgatggcgtcgggcgcgtccttttcgatgggcgcgagattgcgggcgagggcgtcgaagaagccgagaacgcaggccacggcgccgtcggctgtctcggcggaatctgtgggaacggcccactgggagacgagtcgtccatcaactgccagcccgatccgcgtccgcgtgttccgtatgtcgatcgccaaaaccagcgccataatcgctcctcttttcacttgttccgctcgtgtactttccgccagtgatgtctcgcgtggccctgttttagcggaaatttttcgttttggggatgagtgaatgccacttcgaccccgaaatggtaatccacccatggccatttcgggcctcaaatggcatttcgtgccattacgggcttcaactggcatcccggggtgccaaaacgggctcgaagtggcatttgctcgtgagttttcgaaaaactcgagaacatgatgggcccgctggtagggagctacttgtagtcctcgacgtttttcgaggaggagccggtggtgttgccggattggcgcagctcgaagccgaagcgcacggtgccgtcgccgaagcgctcctgcaaagcgtcggtggcggccagaaggctgcggcgcttctcctcgtcgcggatgagcgcctcgctttgggccgcgctcgcgcggtcgtcgtctccgagggcggcagtgtcgaagagcgtctcctgcaccggggcgccgtcctcttcgaaatgggtcacggccacaccgagcaggcgcaccttcatgcccggagcccacagctcctccgccaggcggtgcaccaccggggcgaacgcgatgtcgtcgtcggtggggacggccagcgcgcactgggctgagcgcgtcgtgcgattgtcgtagcgcatcttcacggccacggtgcgtcccttgagccccttgcgacgcaggcgacgccccaccttcgccgaaatggtggaaagcgccgcttcgatgtcctcgcgcgtctccagatcatgggcgtaggttacctcgttggagaccgacttcacctcgtcgtcctcggccacttccgaccggtcgcgccctaaggcccggtcgcgcatcatctcgccgttcttcccgaagatcttccgcagaagggcgccgtcggcccggcccatggctcccaaggtgcgcacgccgtgggaaaggagcgtcctctcggcggctgcccccacgccggagagcgtgcgcacgggcagcttttccaggaaggccgcctccgtgccggggaaaaccacggtgagtcctcggggcttgtcgcggtccgaggcgattttcgccacggacttggaggtgcccacgccgatggagcaggtgacgccgagggcggccacgcgctcctggatgcgctgggccacgagaaccgggtgctcggtgttcacggcggtgggcgtgacgtccatgaaggcctcgtcgatggagacctgttgcacgtggggcgtctcgtcccgcaggatggccatgatggcggcggacacctcgcggtagcggtggaaatggccatgcgtccaaatggcctcaggacacagcgctcgtgctagcgacgaggccatggcgctgcgcactccgaaggcgcgggcctcgtaggagcaggtggagacgaccccgtgggcgtccgcatcgccgccgacgatgacgggcttgccccgccaggccgggtggtcaagctgctcgacggaggcgaagaaggcgtccagatctaccagcaggatggccgggccctcccacggcggcaggtaagcgtcgctatcgttcactggccaggaaaaacagggccatggtgccggggccggaatgggcgccgatgaccggatccacgtagttgatgaggatgtcggtgacgccgaagcgctctctcacgaggtcggccacgtactcggcgtcctcgatgcagtcgccgtggctgatgaacacggtctgatccgccacgggagaggtggccgtctgcgccatatgatcgaccagcgccttcagcgactttttgcgcccgcgcaccttctccagcggaatgaggtggccctcgtcgtccacgtgcatgaccggcttgatgttcagaagggtgccggcccaggcgctcgtgcgggagacgcggccgccgcggaataggaacatgaggtcgtccacggtgaaccagtgggccagatgcagcttgttggcctccagccagtcgcgaacctcggtgatggacgcaccctcctcgcgcatcttggcggcgtaccagacgagcagcccttcgcccatggaggcggccagggtgtccaccgcgagcaccgtgcggtccgggtaggcgtcggccagctcggccagcagaaggtcgatggcctggtaggtgccggaaagcccgctggagaacccgatgtagagcacatcctggcccgaggcaagaagcccctccagcagctcgcgggagtccttcagattcggcagcgacgtcgtgatgaccttgccctcgcgcatcatggtgtagaactgcttaagatcggtcttctgccccttgaggtaactgtgatgctcctcgccatccaccatgaacgtgagcggaaggatatgcaggtcgaactggtcgatgacctcctcagtgagattggaggaggaatcggtgacgatggcgaaggccatggagggctccttatcgggtagggggctgcattttgcggcacgctgctgcgcatccgatattctaacgcaaatcgggcccattgcacctgctgcggctaatgaagcctttcctgagaaaaagttgtaaccattgcccgcgtcgcgcccccttgccgtatactttgcaagatacgctcacaggcgccgccgtcgcacttcgacggccgtgatatagaggaacccgagacgtggaagagggacgaactgtgtcgaacagctacaaggacaccatgaacctgcccgagaccgatttccccatgcgggggaacctgccggcccgcgagcccgagcggctcgcccagtggcaggaaatggacatctaccgccgtgtgctggagaagaacgccgacggcaagcccttcgtgctgcacgacggccctccttatgccaacggccccattcacatcggtcacgccttcaacaagatcctcaaggacttcgtcgttaaaagccacgcccagcgcgggtacttcaccccctacatccccggttgggattgccacggacagcccatcgagcatatggtggaagtgacgctcgggcccgagaagatggccgagatctcccaggtagagctgcgccagcgctgccgcgagtgggcggagaagtacgtcgatatccagaggaacggcttcaagcggcttggcgtgaacgccgactgggagcatccctacctcacgttcattccgaactacgaggccggcaacgtggagatcttcaaggatctgtacctgaagggctcggtctaccgcggccgcaagcccatccattggtgcacccactgccacacggcgctcgccgaggcggagatcgagtacggcgacgaggtgtcgccctccatttacgtgaagttcaagctggatgcgatgcccggcgtgttcgaggcctccggagccgaaggcgccgcctatctgctcatctggacgacgaccccctggacgcttcctgcgaacacggcggtgtcgctggcgcccgacgccgactacgtcatggtcaccgtcggcggtgacaacctcatcatggccaaggagctcgtggaaacggtggccgaggtggccggctgggaagactacgacttcgtccgcggtgccgacggcgagccggtgacgctgacgggcaagcagctgttcggcctcacctacacggctcccgtgcgccgcgacatcaagggcacggtcatctacggcgatcatgtcaccttggatacgggcaccggcgccgtgcacacggcccccggccacggccaggacgactacctcgtcgcgctcgagttcgacattcccatgctcatgcccgtggacgacaacggcgtgttcaccggcgaggcggggcagtttgccggcctttccaccgacgaggccaatcccgtcatcatcgactggctgcgcgagcaggggacgctcgtggccgagaagaagatcaaccactcctacccgcactgctggcgctgccacgagccggtcatcttccgcgccacggaccagtggttcgtctccatggacaagaacgccctgcgcgaggacgccctgcgcgccatcaactcggaggtggagtggattcccgcctgggccaagaaccgcatcggcgccatggtggccgaccgtcccgactggtgcatctcgcgccagcgcagctggggcgtgcccatcccggtgttcaagtgcgccaagtgcggcaacaccgtggccacggccgagaccttcgacgcggtgatcgagctgttcaacaccaagggcgccgacgcttggttcaccgaggcgccgagcgattatctgccgcgcggcaccaagtgcgaggtgtgcgggggcaccgagctcatccccgagaaggacatcctggacgtgtggtgggagtccggcgtctcgcacacgagcgtctgccgccaccgtgccgaggccgacgggctcaccttcccggccgatatgtacctggagggctccgaccagcaccgcggctggttccagtcgtcgctgctcacctccatcggcgcctacggagtgccgccgtacaggtcggtcatgcactgcgggttcaccgtggacgaagaaggtcgcaagatgtcgaagtcgctcggcaacggcatcgatccggaggagatgtgcaacaagttcggcgccgatgtgctgcgcctctgggtgtcttcctgcgattactcccaggacgtgtccatctccgagaacatcctgaagcaggtctccgacgcctaccgtcgcttccgcaataccttccgcttcctgctcggcaacctgaacgacttcacgccggacgacttcgtgggggactgggacgcgctggagccgctcgaccagtgggcgatggtgcgcctctcgcagctgctcgccgacgtggaggccgcttacgagtcctaccgcttcaacagcgtctaccgggctctgtacgattatgtgaacgacatctccgccgtgtacatggacgtcaccaaggatcgcctgtacgctgaggcgccggcctcgccgcgacgccgggccgtgcagaccgtgctcatgaacatcctggaggtgctcgtgcgcgtcatggcgcccatcctgtcgttcactaccgacgaggtgtgggagtgctacccgccggccttcagggacatagagggccgcgaggcctcggtgcagctggctggctggcccaccgcgcgcgacttcgtgcccgcccttctcgccgacgccggcgcgcaagtggcgaccatggaggagatgatggccgtccgcgaggtggtcaccaaggcgctggaagaggcccgaaacgagaagatcatcggcaagagccaggaggcatcgcttaccgtgacggcgccggcggccctcgtggccacggccggctccttcgacccgtcggtcttcgaggagctgttcatagtggcctcggtgcagtttgtggaaggcgacggcgacgagatcacggcggcggtcacggtggccgagggcgagaagtgcccgcgctgctggaacattcgcgagctcggtggcaacccgcgtcatccggacgtgtgcgagcgctgcggggatgcgctggacgccattgagggcggggccgagtaagtggccgctcccgagacgttgtcaatcgagaaagagcaaggggaggcctctgccgtggaggagaggcttcccagccggcgcaagcgcaacgccgccatcttcgttcctcttgccgcgctgtggcttgtcctcgacatcgccacgaaagcttacttcaacagcttctccgtgggccaggtggtggccggtccctttcttggtctgctgcagttccgcctggtgcacaacaccggtgccgcctggggtatgttcgatgaatcgaccttcgccctcggagtgatgtcggtgctcgtctgcgtcgcgctcatggtgtatttgttcacggccggcaagcgcgccggcgttatggagacggtggggatcgcgctgattgtggccggtggcttgggcaacgcgctcgaccgcttcacgttgggctacgtggtcgatttcatcgacacggtgtttatcagcttccctacgttcaacgttgccgacatcggggttacctgcgggttcgtgctgttcttcgcggggatgctctggtccatgaggaaggatgcgcccgcgaaggaggtcgcatcggaggagaagtagcctgttcgggggatgatcctctggcaggacgtcgatagaatggatgccatgtcacgctcgctttgccatatcgtcgccaccgaggacgccggaagccgcctggatgccctgtgcgccgcccgggggctctacgcttcccgctcggccgccgcgcgcgccatcgaggaaggccgcgtcttcgtgaacggcgccacggtttccaaaaagcatgccgtggcggcgggggacaccatcgtctacgaggtggacgaggagccggagtccgtggtggtctacggcgagcccatcgacttggatgtgcgcttcgaagacgaggacatgctcgtgctctcgaagcagatcgggctcgtctgccacccctccgtcgatcatgcccacggcacgctggtcaatgcgcttatctggcactgcggcgaggacaacctctgcaacgtgcagggcgaggaggccgaccggctcggcatcgtgcaccggctcgaccgcgacacctcgggtctcatgctggcggctaagaccgatgaggccgggcgcgagcttatggcccaaattcaagatcgcgccgtcgaccgccactacatcgcgctcgttcacggcatcatggcccacgacaccggcatgatcgacgcgcccatcgcgcgctccgccgacgagcggtgccgcatggccgtgcgcgacgtgccgagcgcccgggaggccatcacgacgtttcgcgtgctcgagcgcttcgaggccggccccaaggacgacggctacagcctcatcgagtgcaagcttttcacgggccgcacccaccagatccgcgtgcacatgcagtacacgcgccatccaatcgtgggcgatccggtgtacaacgcccacggcccccgcgacgcccgggcccagctggggctgcgccgccagttcctacactcctacagcatcgccttcgagcacccgacgaccggcgagcccatggccttcgccgacaatctgccgcgcgacctgcaggaagcgctcgattcgctggccgcgcgctcgctgggcaagaccgaggcggggcgcgaggtggccgagctcatggcaacgtcgcccgtcccttccgtggaaggagaggtacccgatgagtaggaagcaggccgccgccccgcgcaaggtgggcgtcatcattgcgaacacgggaacgcccgaggctcccacgagaaaggccgtgaagaagtacctctcgcagttcctcatggatccgcgcatctgccccatgccgcgcccggtgtggtggacgctgctgcatacgaccatcctgcgcaagcgctcgcgcgcctcggcggagaagtaccagaagatctggaccgaagaaggttcgcctctcgttgccattacggcttccctggagcgcggcctgaacgactactatgccgagcaggggctgctcgtcgtcgtgcgcgccggcatgagctacggaaagccctccctcaagcaggcggtgaaggagctgaaggaggagggctgcaccgagcttgtcgttttgcccatgtaccctcagtcggcgttttccaccaccggctcggtgagcgacggtgtggccaaggccgtgcggcgggcccggttcaagggcgatgtgcgccttgtcgacggctacagcgaggatgccacctacgtccgggccgtggccgcctccatccgcaacgcgggcttttccgaagagtcgggggatcggctcctgttctcgttccattccattccgctgaaggacatcgaggcgggggatacctatgagctgcagaccggggccacgagtcttgctgtggccggcgagctcggactcgatcgccgaagctggaccatcagctaccagagccgcttcgacaagggccgcacctggctctcgcccttcacgaggcccacgctggagcgtctggcccaggccgccgagccgggcagccgcctgttcatggtgtgccccaacttctcggtcgattgcctggagacgctctacgacgtgccctacgagttggagcccctctaccgtgcggtgatcgcggggcagaaggtgaacgcggacgaggaaccgggggccttggagaacacaggcaaggccgccgcccgctgcgatgacgcccatgccgacttggccgacgcgcgccgccgccagcgcgctgccgacgatttccgccgcggcgctcaccgccagcgctccgacgacgaggccttcatctacgtcccctgcctgaaccgctcgcgggcgcacctcaaggtgctcacccatatcctcgctccctacgtgggagatgaggcttgagcgctttgtaagtcatagcaggagggcaaagcgtggatgattacagcgcgggcgaaaccataggcttctccgctcagcttgccgcaatttatacggagctatcgaggtacagtagtctgttctgccgggctcgtttcggtctgtcggtgacagaatacgagctgctcttatgtctgtgggaggccgagacgccccttggcttcaatcagctctccgacttcctcatgctgaaaacgagcacactttggcatatggcccccccgttgatcgaccggtctcttctcgcggcggaaagcagcgatgaggacaggaggcgggcgagactctcccttaccgagaagggccgcttgctggccgaggaatgctgccgcgacctcttcgccttctcgaagggggtggcgcaggagtcgttgcccgatgtcgagtacaatcactatctgagcacgggcataggcggcaacctcgacatcctgcgcgggcatgaggctgatttcgagttgaggcgggtgccggcagacggtcagggcgtcgagttcaccctcttcacgagagccatcttggagcggtggcggacctgcgtgagaaaagagtgcggcttggcgttcaacgagttccgcgtgctccatgcgctttccggggttcccagtttgcgcatacaggatatatcagacaggctcctgtcgccgcgcagccatgtgtcgctgagcaagcggcggctttgcgaagcgcacctggcaaaggagatgcccaaccccttcgacagtcgctcggtgctggtcggccttacggccagaggccagcgaacgctcgatcgggccctgcccgctttggatgccattacgatccccgcgcacaaccctggtacagatgaggccgtgatgattctgagggcatggcactcgcggatgtactacaacctcaagcgcaatcacgctacattacttgagtcattttaacaaaaaccgtcatttttaaaattggaaaacctttgtgagcagccatagctattgagcaaatgggtgtctatattgacattgtttttcgttttcctccttcctagaatgcatcgcgtcaacagaagttggcgtacctcgaaaggagtgggaaatggagaaggtaacgagaagggcttttattggcggcgtgggagccatccttgccacgggcgccatggcgatgagcggctgcgcgccgaaggacgatgcgaagcaagccgaactttccgccacgggaagcgaccagccggaagcgacggtgccggacgagacgctcgaatttgacattgccgtcgtaggcgctggctgttccggccttgccgcttgtgtccaggcagccgaatcgggcgcatcggttatctgtatcgaggcgaagagcattgccggcggcgcagcgggcggcgtcgagggtctgttcgccgtgaattcccagattcagaaagatcaaaacatcacggtgtccatgggcgagatgattcgcaccgagcttgagcagaaccagtaccgcaacagcggcttggtgctccgagatttggtgaaggcgtcgggcgaggatatcgactggctcgtatctaagggtgtgcgctttggcaaggtcgacaactatgtgggcttccatccgattttccactggttcgagaccggcacgggcgctgagagctatatcgtgcccatgaacgaggcggccgtcagcgaaggggtggagttccttttcgacacccatgccgacgagctcatctgcgatgaggacggctctgttgtcggtctgtttgcgacgaagaccgacggaaccgtcgtccaggtcaatgcgcgcgcggttatcctggccacgggcggctacgccgagcgtctcgatttgctcgccgagtttgggtacaccgaggagaactgcatccccacgaccatgggctgcgacggctcgggccacgatatggccatcgccgttggaggcgccagcaatacctcgaatatgggcatgctcggcggcacgacggtccccgatctgcctgcgttcttcgagggcggttatttctgctcggtcatgaactccctggccaacattccctgggtgctgtgggtgaacgagcggggagagcgcttcgtcaacgaggacttgtccctggcgaaccatatgattacggccaaccccatccgcatgtgcaagcaggcattcatcctcatggacgaagccatgatgaacgactatgtggccggcgacgctcagggactcaaggagctggaggacggccaggccaagggaatcatcttcaaggcgtcgaactggaaagaccttgcctcgtcgattggagccgatgccgagattctcagcgagacgcttgagagctacaacggttgctgcgaggccggcgacgactccgatttcggcaaagcctcggagttcatgcgcccgctcgcgatggagggcacggtgtatgccgtagagatcaagagcagtctgggaaagaccatggggtctttgaagaccgaccgcaacttcaatgtggtcgacgagcaggcagaacccatcgccggcctctatgccgttggcgtcgaaggcgcgatgatctgggcgaacgtctatacgatgaacatctccggatcgtgcggcgcccacaatatctactcgggtcgcacggccgttctgcacgcggtggagacgcggctgtaatcgcgctcggcaaggtaccctccctctgagaggcgctctgcggagcgcctctttttacgggcgcaagccgccggcatcgtaactgacagcgtacatgttggtgatgggcgggtcgttcacgtcgagaatctgcgatttggcgttcattcttaggctgtcgacagcggtgaagaagcgcccaccgccagcgctccgacgacgaggccttcatctacgtcccctgcctgaaccgcagcaaggcccacctgaaggtcttcaccgccgtgctcgccccttacgtgggcgatggggaataagggggttccgaaaaggcgaggcgccgggaacccgaaggctcccggcgcaagaggaagagaagaggtggcgaagtgagccgctagagatcggcgataacggtctccgccatgaggtacccgtagttcatggcggcgtcgaatcccatggcgtagggtcggccgtccttctcctcgatggagccgcacacgtcaccggcggcatacagacccgctacgggctttccgtcttcggtgagcacgtgccccgcagtgtcgatggccagtcctccggtcgtcaggtagaaggtggggatgcagctgacgatccagatgccgttgtaggtgtcgaggtaggggaggttcttgcgcccgaactcgtcttcctcgccggcgagggcatgggcgttgtgggcctcgatggtggcctccagttggggcaggtcgagcgccgcggccgcctcttcgactgaggcgaagtgaaccatgtccccgcgtcgttcgagacacttgtaagtgtccatggcgtagagctcattcttgttggtggtgatgcgccccgactcatcggtgatatagaagaaggcgccaccgttggccgcatcgcgcaagccacgtccgagcatcccgtgattgtcggacatcatgttgccgaactgcgctcccgaggcgttcacgataatgcccggtgtcgtctggtagaggaaggcgatctcgaagttggagcctgcttggctcgtcgtcgagaggaacgcgccgagctcgcggcccatgcattccacggcaccgccggccttctggcccatgagaatgccctcgccggtggatcccggcgcgcagttgaacttgtactcggcgtattcgggatagtgctcggcgatcatctcgggattcgcggcgaatccgccggtagtgaggcagacggccttcgcggtcaccgtccaggtggatccgtcgcgcccttcagccagaaggccggtcacgcgcccgtccgaatcctgcgagagctcagtgaccttggtagcatagatgatctggccgccaagcgcgcccactcggtcgacgaggaagtccttggcgtatccgcagccgcccatatagcagccgggggcgagatagggagttacgccgtaggctgggttcacgccgaggctgtagaagccaacgcccatgccatgcagccagtccacaagctttccggaattgtcgtacatcgcggtctgatagggcatcgcgccatcgaaacggtcgttctcgggcacgaggtacttgctcatgatcgccaacatgcctgccttgctgaacatggggttctcgtcgtgccgtccgactgcgtagttcgcctgcagctccgattccgcagccgccacgcccgagtaggtcatcggcatcgagccgcccgcgatgtcctgcttctcgaagaggacgaccgacttgccggcttccaggagacggacggcggcgatgagtcccgcggtgccgacccccgcaagcgcaacatccacctcgacggcttggtcggtcccgccgctcggctctgcggctcccaggctgaaggtcgccaggtcgccgccggcgttcatgattgcatccgagacggcgttcctgacggcgatggaagtggtcgtcgcgcccgagacgacatcaacgtcgagatttttcgcttcgaggattcgcgccgccatcatgggggccgccgtcgtgccgatgccaatggtgtcgtcgcatcgcagcacgcgaatcgaggcgaggtctccgttggccacaactacctcggcaatcagctcgtcgtcgtggcccatggccgtgccgatccatttgccgtcagtgaagatttcggggatccctttctcggcgccggtgtccggcatggctccttgatcagatggcgtctgctttggtgcggagcatccggccagccctccgacggcggctgctccaccgagagccaagaaccccatgataaagtccctgcgattgagcttcataagcgcattccctccttttgggattgttggtgccgcgactcagtgcttgcgcggcgtggacctttggaagtatggaacgcaatcgcggcggccgcgaccccgaaaatcggtgcatttcttgcgagcgatacgcccgcccgtatgaccgaaaattgggtatcttttcgaataaggcctgatcagctgtatgcagtattcgagtttgtaaaaaatgaggcattcgggttatgggcgagcatgtgcgagcagtagaatagtccgaattgcgaaaggggaggtgtcgatggccgacgggctggcgaaaacattggcaggagtgctcggcttcggtctctgcaagacggcgcttggcgtggcttatttgacagcgatggggtcggtgttttccaatgtcggctttatctcggagctgagctttatgacccccatgctcgtcgcctcgcttgccacggcgtctctgatcgtgctcggggcgcgcagagggcgtctttcgcctggatcactcaagcaatatcctgccgtgctcgcgctgtccctagggtttctctttggtggtgcgaatttgctccctggtcttcccgagggcgctctcgctcttgtctgcggtctgctctgcggcttctcctccacggttctcaataccgtgtggcttgatgtgctctccgctgaacgagatgtggtcgcgccgaccatccagatcatcggtgccctcattgtccagtgcatcctcattcccctggcagtcgatatcgatcgcttttgggcctttgggccgccgatcgtggcagtgtgcctctcggccctgctgctcgcctacaagaagcgtggtatggtctttcctgcgaggagcattcttgcgcccgctgattcgtcaaagcgacgcgatctggctctcgcgtacctttgcgtatttgtccttgtgggggtcgtcggtattttgcataccgccgtgctcggctcgcaatcggagcatttggtcggcgatgtgaacatgtgggtgccgcttgccgtcgcgacgctcgtcacgctgctcatggcgatcgtcgccctcagacgtccccatccgacgtcggtgtatcgggtttgtctgccgttgctgcttgtggttttgtcgcttctgccctttttcggagatgcgctgggaggacttgtcggtcttatcgtgatcgtctgctacgacgtctgcggcatggtgttcttactctacatcgtcgactgttcgcgccgcctcgatctttctgcctaccttcttgcgggtgcttatttgggaggttcggctctttccctccttgcgggcctaggcattggcagcgtattgcgagctctgagtgttgattacggcctttccttgctcactctccttgcctttgcggccatctatccgttggctggtgtcttcatgttcgggcttcggaagattcagcgccggtcgacgactgatgcggatgagagcgcgcggagtggggtcgatgttcgagaggacgcttcgaagtgcgagagcaagcacgaagcgaatgcttttacccagggttccgccgaagaaatccaaaacgagctgagagtgatcgacgatattctagagagcggcgttgaggtaattgccggcgaaaatggactcacgcggcgcgagagggagatcttgggctatttggcccgcggacgctcggcgcgctatatcgcagaggatctcgtgatttccgaaaacaccgtctgggcccatgttaagcgcatctatgcaaagacgggcgtccatactaagcaagagcttatgagctctgttgagcaggcggccctgagaaagcggcagcaatgatgcgacagtcgtgacggttggtccgattgcggtgtccgctgagctcgtcccttgcgtggtcaatgcggaataggacaggactgcgccgctcgcgtttgtaagttaggttgttcgcccggaaggcaattctggattggccggtagtggtgtcctcgtttggaaaatgtgcttttttggattgaattctgcatgagcccgagtcttgcgttcaaaaaaagcacatattccagatcggcgtttccagaaaagcacatattccagattgaagtggatggttctcggctcgcatttcaatgtcgagagatttcataggacgttgacctggtgttttatcggaatacccttcaagctatcccagcaaaggtcgagagtgacttggaaaatgtgcttttttgaaaggccgcgtagcttccccggaacagagcttccagaaaagcacattttccaaatgtaatacgctgtcgctcacccagaatgctgcgtggcagggctgcttgggcagaaacaaagagaaaggctctccgaagagagcctttctagctggaatgccgcagccgcagggagggggaggccgcagcggagtaagcggtttcgcgcgcgggcgcttaggcctcggcgagttcgtggccgagcaggtaaccgaaggtaatgcagcggccgtgggagttgccggcgacgttgatggggtagtccaccgcggtgatgtcgcccatgatgttgccgagcacgtagaggccctcgatgacctcgccgttctcatccaggcactggaagtcattgttgcacttcaggccaccgcagacggcgagcagcgccggaccgaccttcagggcgtagaaggggccctgcttcacgggcgtgaggaatacgggcttcttgtagtagtcggtgtcctcgcccgcctcgcacatgccgttgtagcggtccaccgtggccgtgagcgtcgcggcgtcgcagccgatcttgccggcgagctcctcgatggtgtcggcctcataggccatgccctgctcgatgtacagcggaatctgggtcttgaagtactcgggggccagctcaagatcgctgccgtagggacggaaggagtcccagaacatgccgccgccgtagggcaggccgttcacgaggtccgtcggccagttggcgtcgaagaccgaccaggcctcgccgttgggctgcttgttgatggccagggacttgccctgtacccaggtgtcctcgcacatgaagcgctcgccgttgtcgttcacgaataggaagggcccgtggaaccagcagaaggcctggggatgcatcatcgtggggaaggggagatcctgcagctgcgcgccgacccacatgcccatcttgtggccgtcgccggtgttcacgccggccggggtgtactagctgcggggctggccgtactcggcgcagatgggggcgtaggcttcgcacatctccgggctgccgccgatgtcgccggtagcgagcacgacgcccttggcagcgttgtattgcacatagccctcggcggtctcgcagatgcagccgcacaccttgccggagtcgtccttcacgagctgcacggcaggggaatcgaacacgaactcggtgccgtctttcacggcgtccaggtagcacagttcggcgccggcgaagccggtggaggtaaggccggcctcttcggggatcatgaacatatggtatcccggctgctcggcgtagacgtcgtcgtggctgtagaacgcgcccaccatggcggagccacccagggcctcgcacttgtcgatgagccagttggaggcctcctcggagttgttgaagaacttcacgataaggtcctcgttggtgcggctggcgcactgggcgatccagtgctgcttcgcgttcaccttgtccacgacgatgttctgggcctccatgtagcgcgagttgatggcgccgaagccgccgccgcgcccattgaagctacccgttttctcgacgacggtcaccttgccgcccttctcggccgcagcggccgcgcaggcgcagccggaaagcccggcgccgatgacgaggatgtcggtgtccaccgtggaggcgatgtccgtgatgggctcgggcgcgatctcccactcgtaggtcgcggtgcccgtagcgggcatggtggtgccgccggtggtagcgggcgcggcggcatcgctctggggcgccggggagcagccggccagtccggccacggcggctcctgcggcggcggtggcgcccaggccgaagaaggcgcggcgcgacaaacccttggcattgatgtcggtcataggatctccctttcttctcagcgcgaagccctccgcctcgcgtctgtccttaggggaacaccgatcggaaacggttgcgtcttcccgtctcggcattgtcctcccgccctatagactgacaaaacgtcaggtgccattcatctgccgaaggggctcattttccccgttcaggcaaaaatgagccgaagtggcccatagccatttttgagtactttggtagttttggaagagaaggaaacagctcggcccgcgagaaggccgactgtgcgctatgctgcagggcgcggttgcggccgcggctttcgcggaaggtcttgggaggggcgctcgatgagggaagcgatgacggatcgcgtcgccgattggcggcttttggggctcggcttctggcaagcgtggcagatcgtggctatgtgcacggatatcgtggcacccacctcgggcaaactcttcgaccaagggaacgccctgttgattctgctcgtgcttatgacggcggcctatctggccgtcgttgtggcctcgcgccgctatgcccccttcgcgggacgcggctcttcctacgtgctcgcggcggcgcttatggcggccggtacgctcgccatgcctgttgccctgcattttctggagggaatcgtcggcattggtgtgttcgtgatggctgcagcgtcggcctccctcggcaacgcccttctccttattatgtggggcgagctatggagcgcgttggccactggtcgcgttggccgccatctctacgcctcctacacgtttgcgttcgtgctgtttttcctgatctacttcatgccccaacccgtagccgtgatggccacgacgttgctgccgatcatctcgacggcggtgctctacgcctgtcgccacgagccgcgtcgcgagccgtcggtggtgcctcttgatgtgcataccataccggtggcgcgcctactcgtctgcctcttcatcatcagcgttatctggggtcttacccagggcatcgtgggaaccttcgccgagggcgacgagttccatatggcgaaatcgcttcttttggccggcggcggtatcggcgccatcacgctttccatggccgtgacctcgtccccctccgaggccctcaccttgtacaagcccgtcatccccgccatggtggcggggatcgtccttctgctcttgcagcccgcggtctatcccttcctggggtcggggctcattatcatgggcgtctactgcctcgatatgcttctcatgctcgtctctacggacatcgccttcagggggcgcatccccgtggccctctccttcggcgtggcgattttggcgacccgcgccggcacgctcgtcggttcggtggttgcggacggatttctgttcgcgccgttctggacggcccagctgcgcaccgatatctgtctggtcgcggtgctgctgcttgccatcatcggcatgctgttctttaccatggccgatgtgcaacggctctacgtgacgccccgggcccagcgcaccgacgagtccctcgagcagaagtgcgcggctgtggccgccatggggcatctcaccaaccgggaatcagaggtgctcgtgctgcttgcccggggacgttcggttccctatatctgcgatgagctttccatcgcccagggcacggtgaagcaccatgtgagcaatatctatcggaagctgggcgtttacgatcgccaggggctgctggacgccatcgagcagggcggcgtgggaagatcggcgctcgcgtgaacgtcccacaccctctctcgggaatgcgtgcgacgcgggaagtgggtggctgcagttctagcttcgcgcggcggcagggcgagtttgtgcgttccgcatacccttagggcaaaggtcgggtattgtcccaaagggagtgctaaaatcctccttacgcttgaatagactcaggaggtatcgatgctctcggagcgcatgctcactaccgtcgtccgcgccatgaccgacaagaccctgaccttgcatcccgtgcccgaggacgcgcttcccgacccggtgcccggccgcccctacacgctttacgtgcacgttcccttctgcgagcggctgtgcccctattgctccttcaaccgcttcccctatcgcgagcagcgggcccgcgactatttccaggccctgcgccaggagatgcggatgctggccgcgcagggctacgacttcgagagcgtgtacgtcggcggcggcacgccgacggtggacatcgacgagctgtgcgagaccatcgatctggcccgcgacctcttccatgtgaaggaggtgaattcggagacgaacccgaaccacctcatcccggagtaccttgacaagctgcacggccgcatccagcgcctctccgtgggcgtgcagtccttcgacgacgggcttctgcgccagatggaccgctaccagaagtacggaagcggggaggagatcttcgagcgcatcggcgaggcggcgccctatttcgagtcgctcaatgtggacatgatcttcaacttccccacgcagaccgaggacatcctcatctccgactgtgagaagatcgcgctgtgcggctgccatcagacgacgttctcgcctttgtaccagtcccacgccaccacgcgcaaaatggagcaggtgctggggaggatggactacgacaaggaacggcgcttctatcatatcttggacgagatcctcgcggggggtgatgcgcccttcttcgagcgccgtaccttgtggaccttcaaccggctcgacgagaaccttaagcgcaagcaacatctggaagtggacgagtacgccgtgtcctacgaggagtgcgtgggcatcgggtccggctccatcacgcatttgggtgacaacctattcgtgaacacgttcaatttggaagaatacggcgagttggtgcgcgccggcgtcacgccactactcggcaagaccgacctgccccgacgcgacctcatgcgctacaagttcctgctgcagctgtacagcctgcgcttcgacaagcacgagttcgagcgcgatttcggcgtgtccgtggagcgggggctgcccgtggagatggccttcatgcgcgctaacggcgcgtttgccaccgacgacgccgacgagctgacgctcacgccggcgggccgctacctcacggtggtgctgtaccgtcagtatctcgccggcctgaacaatctgcgcgagcaggcccgcgccaagctccccggcgacgagcgtgacctcctgttcggtgacggcacggagaagtaacaggtccatcagcacaggcgcatctgaagccctgaggcatcactcgccgccgcacagggcgatgagctccttgcgcgagtgcacgtcgcattttacgtagatgtgctggatatgcgccttcagcgtgccggaggcaatgaacagctccctctcgatctgctggttggtcttgccgctcgcgatgagacggcagatctcgtcctcccgggggctcaagtggcacgaggcggacacggcgtcgcagcgctcggcgatagcctcggcccgcaggctgtcggctgccagagtctccgtctccaaaagcttgatgccccaacgcgaggcgagatccctctcggagagcagcatgagggtgctggccagcacgagcataaccacggcggcactgacgaggatggactgggtgccctcatcgaggcccgtgcgtcccagaagatcagtgcacccggcgccccacagagtgaacagggtgttcacgcgcataatgccggtgagtgccacgatggcgatgcccatgcgtttcgagaggtcgtagaataaaagcgagatgagcagcgacatgagcgtcatgcccatggagatgaggtagcctgccgctgtggtgccgagcacgccttcggccggtatgagcagaacgccgcacaccatgaggagaaggggcgagcggaacagggcgctcaccgagaagcgatcggagaaaaagtatacgacgacgaagaacccgcccatgacgagcgcggtggaaagcgaggaatggacgccggcaccctcgggcaactgggcggttcgcattccgtaggcgaaggcgtatatgcacagcactgccaagggtttccaaggataggagaatttaggatagggccgcaccacccgctcccgttccggaagggaacggaaagccagagcgagacagccgagcgacagcagcggcagaagcacgagcacgagggcaaagcgcgtgccggcaagtccctggcacaagtaggtcattggcacggcgatgaagcgggatgccgccgtgaacagggcgatgcggatgaggctcaaaggcacgatggcctcgttgaacatgaggagtatcgcgcagaagccgaaggctcccagcaaggcgcccgctgtagccagcggcactgcagccgaggggaactcgggtgcggcgatgagacagagggaggcggcgagcatggccgcaagtgagccgaatcgcgcccaatggtgggagctgagcggcacgatgcgccgggcgagcagcgtggccgcgatgccgagcacggccggcacggagttcgcgccacggggcaccgcgaagaacggtccctgctcgatgggcaccagatagtcggcccgctttccgaactggccgtcggagccggtcgcgcacagctcgttgtaggcctcgatggacgcgacgatggcctgctcgtcgatggggtcgatgtgccactcctcagcttccatgtaggcgttgatgttggccgccagctcggcgaaggtctcgcccttgacgaactggtcctccgaggggaccttcatgttgcccacgccgaacttcacctcttcgggatgcgccgcggtccactgctcgccaatctcggcccagttcgccggcatgatggtgaagaacttcgccgccatgggattctggaaatcgtactcctcgaggtagccgcgcatgaggttgttcaggtaggcgaaggaaagcacctcgttcataaagcgctcgccgtggatgtccaggttcaggaagggcagctccagacgggtcagcgcgccgccgccatgaaccatcttcgaatggttcaccggcgtcatctgcgccccggcccagatgccggtcatcatgcccatgccgtcgcggaaggggctcatggtcttgaagccgcgcaggtcggggcagtagtaatcgcgcatctcctggttgccggagcagtcgccggaggcaaggatgacgcccttggaggccttgaagagcgcgttgccctcctcggtctcgcagatcacgccggccacgcgctcgccttccttgtacagctgcacagccggggagttgaagaagaactccacgccctcggcggctaccgcatcgcagacggccagggccgcgtcattgtgggcgccttccaagtggttgtaggtgttcgcgtgcaagtagtaggtgtagccgttgtactcgcgctcggaatcgtagggcttcgattcggcgccgccctcggccgccgtgtcggcccaccaggtaacggcctcataggagttgcgggcccatgcttccagaagcttgcggttcgagcggtaggcgttcttctccatgaggaaggcgacgcaggcctggatgccggcctcgtcggtcttggtggtatccaccgaggcgcccatgttgccggtggtctgggcggttccgatgttctggacgcaggctaccttggcccctgcggccaccgcggagtgggcggcggacaggcccgactcgcctgcgcccacgacaacgatgtcgtactcgcgggtatctgcgaagtcggtgatgggctcgggggcctgcaggaatgcgggcagcccggcatcggcagagccggtatccgcgagcgaggccgtctccgcggcggttttcggggcgcagcccgcgagggcgctcgctcccacgactccggcggcggccagtccggtgaacttgaacagatcgcgacgagtgacttccatggtgaccctcctaaatacatgcggcttgttcgagccgcgctccctttgcgctcggcgggcagaaccatcttcttcggctttgcgcgaccgtcgagcgctgctgacgggtcacatcatggcttggggcacaaaatcgcgcatcgggccgatcgatgaaattgggttaaatagataacccaagtcataacccaaggtctgaactgggaagatagtttgtccataacggtgacatcgcaaatcgaataacttgcaagattttggaaatagttggaagtttcgagcagaatgatgttgcgagatcggaagtagttgggagtttcgggcgcgtttcgaagcgaattgcttgtaatgggtcgatttgctgctcgaaattcccgactatttctctcgtgatgcccgaaacccttaactagttccttcgcatcgctcgaagcgctgatctaattcctaaatccgggtttgtcgctaaactggcatcgagcttttccgtatgcgctaatatgcaccctcttgggatgttggaattatcgccgatggctttgtcggacgaaagagaggtaaagaaccgttcggaaaatttcctcttgcaaaggcgtggcggtcgggttatcatagcgaagctgtttgagcgagagctcgaaagcaacaacgggttgtggcgcagtttggtagcgcacttgactgggggtcaaggggccgcaggttcaaatcctgtcaacccgaccagaatttagagagccggcttcatgccggctctttctgaatggagaccgacttgggaacgccgctctattatcaggatcaaagtagctggggatcggatgagttcagttaccttaattcatacctgaatcgcctctttctctacagcgaggatgctgacaaggcagctgctatctcaacattggactactctcgcatgagttgggagacgcaagcgctcatttgcgccatcattaaccattatggcaaggctagcgaacttaagacggagtatcccaatctggagccttttacttgcgtcgcgcctttggagcgacccttgtttctcaatgagaggccggtagacattttccctgcatataagcgaatgaacattcgctattagggaggggggtcatgatagcagagccttcaaaactgagcgtcgaagacttcgtcgatctacttcatcagcttgacgcattcattggtagcaagaacccggagtttcaacttgacatcaaagctataggcggattctccatgatgtatcacgagaaagagacttcgttgaagatgttgcgcaagggctcgtctgatatcgacacgctcaccatgcttccgaagcaagtggcgactatggttgacataatcgccacgaacaacggagtgagccccgattggctcaataatcggtggtttgccgacaacgaataccatgaggagctcgaaccttatattgtttggaaggactctggctttaagtttgaccacattaatctcaaaattgcggatctcgaaggattgttcctgcttaaagcccgttcggtttgcgatgctattgagttttctggctacccgaatgacaagggaaagctgcaaaacgagctgaggactcaggatgtcatggatctgatttccatactgcgcttcttcggcgaaagcgatcttgaaaatctgcaacatctcgcgaggcgaaccgatcttcctggctatgaccttctggcgcaatactttcgcgaatcaggggttctggacgagggatagctcctgtcgctctcgctgctgatagtttgaggtggttgaggttctcgaaaaagagaggtctatgctctcatagaaagactcaataactcagattttgctgccgtgataggctatgcccaaacgagcaagaaccggcgatggcgccgggaggaagtgaaacaaggaggtcgccatggaagttgtcgtcgcaccggagccgatggactacgagatccgcgggatgtaccggttcgccacgctgcgggagggcgccggactcgccgaggccgtgcgcgaccagtggcccgtgaacccgcggctgctcatgatcgccgcagagccggagagcgacacgtacaccgagaacctcgccatggatctggccacggcgctggtgaaggctgatctttcggtgggggagctgcgcgtgctccagcgcgagacggccgacgtcgcggcccagctcgtcgccggtgccgatgtcatcgtgctggctgacggcgaggggaaggacgccgatgcgcagcgtgaggccttctttggcgagttggacatgccggccttgcttgagggcgtcaaggagggcgctctcgttatcgcgctttccgaggcggcgcgcgacgccatccgatagccctgctgctgggtgatctcggatcggcgtggctttttgttgcctcggctcgcggttgcccagaggcgcgttccgggaaaaatccaggcactttccatcgtccgtgacgatttcgtgccgcttcggcattgggcgggtaactgcgctgccgatacgtcatcatgacccctccattcatcgacaatagatgcgaaaacgtccgcgtcgacgacgagagaggggaggtgcccgtgaacaaagacgcgctggtcgtcggcttggcgctgttcgccatgttcttcggcgccggcaatctcatcttcccgccgtacctcggcatggagtcgggcgagctgtggccgctcggcctagcgtgcttcgtgttcttcgacgtggtggtctcctgcgtgggcgtgttcgccatcaacaacgcggggggctccatcctctccatccaaaatgccctgggcaagaaggccggcctggcgctgaacaccgccgccatcctgtgcgtgggcatgctcatcgctccgccgcgctgcgccgccaccaccttcgagatggccatcgcgccctggttcggcgatgccatcgggctcttgccgttctccgtcgcgttcttcgctgtggtgctcttgctgacgcttaagcccacgcgcatcatcgatgtggtgggcaaggtgctcacgccgcttctcgtggccggcatcgtggtcatggtcatcgccggcatcgtgaacccgctgggcccggtgggcgcccccgagacggacaccgtcgttgccgacggggtgctcgcgggctatcagaccatggacatcctcgcggtcgttgggttctccatcctcgtgcaggagtcggtgcgggcggccggctacggcgagaagcgcgatcagatgcgcgtcacggcccgggcgagccttgttgcctgcgtgctgctcgccgtcatatacggtggccttacttacttgggcgccacctccgccagcgtcgtgccgcacacggtcagccaggccgagctcatcaccatgatcgtgtggaagctcatgggggaggccggtgtggcagtgctgggcattgtcgtgggcctcgcctgtctcaccacggccatcgggctgtgcggcgctacggccgactacgtcgagcgcatcaccatgcggcgggtgagctaccggacggccctcatcgtcgtcgtcgttgcggcgctgctcatctgcaatctcggtctgacgaacatcatcgccctggcgagcccgattttgtccgtggtctgcccgccgttcatgacgacggtggtgcttctgctgttccgcaagcacctgcgtggcacctgggtgttcaagggggcggcgctcgccgccgtggcggcgagtctcctcctcacggtgcacgatctcaccggtgccttcgcgttcgtcgaagccgctccgctgtacgcctacggtttcgcgtggcttctcccgtcgctgatcggcggtgcggcaggtgctcttctgggccgacggttcgaattcgatcgctctacttccgagcggctcgatccacctgctcgatgagctcgtcctgggaattgaccgacagtttagcgtagatgtgcctgatgtgcgtcttcacggttccgtcagccaagtacagcgttttggctatataagggcggctgtatccgctcgcaagcagcgcgagcacatcgcactcgcgcggcgttagcacgttgagcagcgccttcggcaccttatgcgggccgtcccattccattttgtcggagttctctcgggctgcgggttgatactgcacgatatgcctgataatcgcaccaatcgagaacgagaaaagagcgactgccaaaacgatggtgagaagttcggtaatcgcctggtattccccgagagacagccctgcaagcagcggataaagccatgcaacggtgaaataataggggataatctgcgccgcatattcccaataggagaacacagccgggtcgatggcagtcatgcgccgatacgtaggcagctgaaagatgttctgcgtcgaccaagcgagctcgacgaacaccatcaacaatccagacagccccaatggcgattcgccaaagaacgtcgccgctacaagggctgttgccacaattggcgctatggacacgaggtacaggctcgctccgctgttcttgccgaattgccgtatgccgcccacaacgagaaagagcgtgagggccagcagtgcggcattaactttgcagcaggtaaggggcgtatcgtcgaaggaagtcaggcaaagaaggacgccaagtcctatgccgtaggcgacccgggttccaaaatagaggaaacgcgttttcggaagcgaggcgccggccaccgtggatcgccgatcgctctggcgcactgatgcgagggagctcggaagcgtaacagatgcgctttcctgcacgacgaggtagagattgagcaagctgctgatgagcatgagccctatcacgaaaacaatggagaacgccccgtcaaaaagctgcgagacgagaaagagtccggtggcgagaaggatcgcgctggcggaaagacgggcggcgcttcggctctgatttagcgagaagtgaaaattccattggatgttaataaaaagcgtcgcgatgcggcccgaagcagcgaggaggaatacgaggggagcggtcgcttccagatttgcgcggccggtgccgacgtaggtgagcagaatgcaccatgcgatggctatagcgagaccaattattccgaatgcctgtcggctgaaggcgtctcgcatgcgaaacgtgaggaagaagaaagcggtagccactaatccgcacaggacaaatgaagagggttggaagtactcgacgcccgaggtcgctgttatgcttcccgagaacgacatcaataggacgcaaagcgcgaacgccttaccagctactatgatgtgttcccgtctcgtttcgtccatagcttgcccccctcgcttcctgtttgaacgatgcacatcatagcagaaaaccccaggaaaaatgggtatataccccttctgggatgaggcatttacgcccagagacaggaggggtttgccccttcttggaagatgtgctcagccccgcatcttgcaacaattgatttgcacgaacgcagagagcgtttgtcggcgggttccgagaaggcccgcaatgatatcaagaaggaggaatgatcattatgaatctcagccgcagaagttttctcgcaggggcgggcttggttgccgccggctcgatggcgtctctttcggggtgcgttccgcaggcttcgacttcaagcgatgcgagcaagggaaccactctcgcttccacctcttctgaaaaccgctggagctggtcgatagcgcccgagcctcctgcggaaaacgaggtatcggaggaagtcgattgcgaggttctggttgtgggcctcggctcgggcggcgttccggcgacggtgtacgcggctgccatgggggccgatgtcgtggccgttacggcgggtgacgctcccgagggcgagggcgcctacatcggtgcctacaacacgaagtacgatgagcagtacggcatcaaatacgatcctgccgagttgagggccgagtactcctattggggcttcggttccaacaacggagatgtaaccggtaccatttgggatcgatctggaaacgcagtagactggttcgctgaatactgcaacgacgtatggccctacgagtgcggtcccgacagcgctatcaacgagggcatccatattcgcgagacggcaacgcacatggtgtacgtcttccctgatcccgaggaggagcaggagcaggagcgcgtctacaacgggttcccgaagttcctcaaggccgcctgcgacaaggcggagaaggacggggcgcggatctactattccactcccgcccgtcagctcattcgcgaagagggcggtcgcgtcaagggggcctatgctcagaaggaggacggttcctatctcaagatcaacgcatccctgggcgtgcttctcgctacgggcgacttccatcaaaacgacgagatgcttgaagcgtggttgccgcttatgcgcggagatctcataacgcgcaatccctacggcaacgcccagggtgatggtcagaagatggcctggtggattggcgccggtcaggacactggtcctttcaacatcggtctgtgctggcctcatgacttcacattcgccaagaactctccgtctcgctggggatcactgccttggctgcgcgtgaacatcgcgggcgagcgctacaccaatgagactatcggctcccatgaatggtactctacgagcccgatgtgcatgatcgacgtgaagcagccgggacatacggcctatcagatctgcgatagcaaattcggccagatgctcgagaacaacgagagcgaaatcgagatcttcaaggactgtgtcgagcgaggcgttatctggtctgccgacaccattgaggaattggccgagaaggtcggattcacgaaccccgatcgtttggtggagacggtgaagcgctacaacgaggtgtgcgccggaggctcggatgtagatttcggtgtgcccgccgagtacctggcctactcttccgtcaccgaaccgcccttctactgcatgcaccgcgaggttctcaagcagtggaccgatggcggcgtgaacaccaaccgctacgggcaggtgctcgacaccgagcatgagcccatcgagggactttatgcggcgggtaacattcgttccggccttgcgggaacccactacctctggaagtccttcggttccaataagctcaatgccacggcgggcagtatgttgtgcgtcaagcatatgctcggaacgtgggacgaggagttctaatctcttacgcgctatcctctttatgcaagaccgctgcgatattccctcccgtatcgcagcggtcgtctttttgcgcccttctgggctgacggttcgattcggccgcgagcggatgaggtttcgcgaaaattgatcaactgcataattacgatgacccttttaccgagtattgctcatgagtcgggggatgggggcgcgattacctgcgcctcctttgctatggtagggagcaggatccgagggatctcgcctaatcgcagaaaattatgaggctgcggagaggccggtatattaggttaggaggatcctgaatggagttcagtttcggactgatcggcttcctcatcgtgttccccctcattgtggccgccgcgctcttattcgtgcggcaggaggggccgcgccgcgtcatcgtctgcgtgtcgggcgttgtcatcgcgctggcgtcggtcgtgctcgtggtcatgaacctgggggcgagctgcacgctcttcgcgttcgagagcatggccatcgacttcatctgcacgggcatctccgtggccatcgcggcggtcatcgtgtggttcgccgtgcgctacaagaacctgtgggccgccgtgctcgcgggcgtgcaggtggtcggcacgctcatcctcgagttcatgttctcccacggcatcgaggtgccctacggcctgtacttcgactcgctctcgctgctgatgaccttcatcatcggcgtggtgggaagcggcatctgcatctacgccttgggctacatggaggatttccaggcccacgagccggaaggggcgccggatcgtcgcccgatgttcttcgcgctgatgttcgtgttcctctccgccatgtacgtcatcgtgttctcgaacaacatggagtggatgttcaccggctgggaagtgacgaccctctgctcgttcctcctcatcggctacacccgcaccgaggaggccatcgccaacgccttccgccagatcatcatgaacctggccggcggcctcgggttcctcgtggcgctgtggtgctgcgcccttaccgtgggcaccttctcgttctacgagttcctcgtcatcggccagaacaatccggccctgaccaccttggccgtcaccgcgctggccttcgcgggcattaccaaggcggcgcagatgccgttccagacctggcttctgggcgctatggtggccccgacgcccacttcggcgcttttgcactcctccaccatggtgaaggccggcgtctttctgctggtgaagctggcgcccgtgttccacgtgtcgccggcaccggcggtcatggtcatgctcgtgggcggcatcaccttcgcgctgtgctcgttcatggccatctcgcagtccaacgccaagcgcgtgctggcctattccaccattgccaacttgggcctcatcacggcctgcgccggcgtgggcaccgccgaggcggtatgggccgcgtgcttcctcatcctgttccatgccatcgcgaagtcgcttctgttcctgtgcgtcggcaccgccgagcaccacattggcagccgcgacatcgagtccatggaccttctgttcgaccgcatgccgcgcctggcccgcttcatgatgctcggcatcatgtgcatgttcatcgcgcccttcggcatgctgctcgccaagtgggccacgctcgtgtccttcgtggacacccgccaggtcgccctcatcatcatcctggccttcggcagcgccgccacgttcatgttctgggccaagtggctcggcaagctctccggcatcgccggcgagccggagaacgtggaggtcacggtgaagccgacggaatgggcggcgctgctccttatggcctgcctgctcgtgctggcctgcgtgttcctgccgttcatctccggcaccctcgtcgagccctacgtggccagcgtctacggcatgctcggccaggacatcgccacggacaacctgtggctcgcctccatctgcaccgttatcgtggtggccgtgctgttcgccggcctcggatcgaagcagaagtcgcgtcgggcgaacgtctatctggccggcatcagccgcgacaacgactcccgcgccttccagaactcgctgtcgggcaccactgaggccacgacgcgcaactggtacatggaatccgtgttcggcgaggcccgcatcgccccggtcggcgtggcgttcaacacgctcatcatggccgccgcgttcgtgatcgccatcgtcgcgggcccgatgggcttttaggaagggtgtgatctcatgactttgcttacgacactcatcggcaccctcctgttcgccgtggcgggccccgtcgtcgggtgcctcctggccggtttggaccgcatcatctcggcccgcatgcagggccgcgtggggccgccgcttctgcagccctactacgacgtgcgcaagctcttcgagaaggagcgcgtctccgtcaactccgtcgagggcgtctacgtggcctgcgcgctgctgttcgcgctcatcgccggcggcatcttctactccggcggcaacctgcttctgtgcgtgttcgtcatcacgctgtcgagcctgttcttcatcatggccgcctattccacgcgcagcccctacgccgagatcggcgcggcccgcgagacgctgcaggtgatgagctacgagcccatggtgctgctcatggccgtggccttcttccaggcctcgggctccttcgacgtggccgaggtgctccagctcgaccacccgatcatctgcaccatctggctcgtgttcctgggcgtgctcttcatcctcaccatcaagctgcgcaagtcgcccttcgacctgtccatgtcgcatcacgcccatcaggagatcgtgcgcggcatgaccaccgagatgagcggacctgtgctcggcatggtggagatcatgcactggtgcgagaacgtgctgttcctcggctggatcggcatgttcttcctgtgggcgaaccccatctccattctggtcgccatcgtcatcgtgctattggtgtacttcctggagatctggatcgacaacaacttcgcgcgcgtgaagtggcagttcatgttcaagtcggcgtggctcgtggcccttgtcgccggcggtgtgaacgtcgcgttcctcgcgtttttgtaaggaggtaggcacatggcattcgcatcgaaatcgccctgggtcatccactacgacggctccagctgcaacggctgcgacatcgaggtcctggccacgctgtgccccggcttcgacggcgagcggttcggcgtggtgaacacgggcaatcccaagcacgccgacatcttcctcgtcaccggcagcgtgaacgagcagaacatcggcgtcgtccgcgagatctacgaccagatgctcgagcccaaggtagtcgtggcctgcggcatctgcgcctgcactggcggggtcttccacgactgctacaacgtcatcggcggcgtggacaaggccatccccgtcgatgtgtacgccccgggttgcgccgtgcgcccggagcagatcatcgacgccgtggtggccggcgtggcgaagctcgacgagaagtcggcggccctggccgctgccaagaagggagcgtgagaaatgacgacctttgagcagaccttcgaggagctgccgctggccggcgcgcacgacttggcggccgcgcgccatgccgagggctggcgctacgtgcagatcctcgcggtgaacaccgaggagggcatcgatctcgtctactcctacatgaaggacgggcatctcgccaacttcaacgtgagcggcgtgaagcagaccgacgtggtaccctccatcaccgatctgtacctggaggccttcgtctgcgagaacgagatccacgacctgttcgacgtggccatcagcgacatcgccatcgacttcggcggcatgttctaccagctggcggagaaggcccccatgaccgtcgtgagccccgagcagttggcggcgcgcgagaaggcgaagaagatcgccgcggccaaggccgccaaggaggcgaaggcggccgtaccgaccgaggcgccaactggccccaccgaggaggagatccaggccaagatcgccgggctcgacccggagaaggccgcgaaagtgagggcggccatggaggccaaggccaagaaggccgcggctgccgccccggcgccggctggccccacggaagaggagatcgaggccaagatagcgggcctggatccggagaaggccgcgaaggtgcgcgccgctatggaagccaaggcccgaaaggccgcagaagggaagggagaatagcatgagcaaggcgaccgtcattcccttcgggccccagcacccggtgctcccggagcctctgcacctcgatctggtggtgcaggacgagaccgtcgtggacgtgctcccgcagatcgggttcgtgcaccgcggcctggagaagctcgtggagacccgcgactacaaccagttcatctacattgccgagcgcatctgcggcatctgcgccatgggacactccctcggctatgccgagaccgtcgagtccctcatgggcgtggaggtgcccaagcgcgccgagtatctgcgcgtcatctggcacgagctgtcccgtatccactcgcacctattgtggctgggccttgccgccgacgccttcggcttcgagtcgatgttcatgcactgctggcgtttgcgcgagcgcgtgctcgacctgttcgagaagaccaccgggggacgggtcatcctgtccgtggtgaaggtgggcggtgtggtgcgcgacatcgacgcgagccagatggccgagattgtctcggtgctcgacggtatcaagggcgagtacacgcagatcatgaacacgttgctcactgatacgtcggtgaagaaccgcaccgtgggcgtgggccacatcaccaccgaggatgcggcggcgctttccatggtgggtcctttcgcccgcgcttccaacctgccctacgacgtgcgctccttcgggcgcggcgcctacggcgatctggcggacttcgcacccatcacggccaccgagggcgactgctacgcccgcgtgaaggtgcgctgtttggaggtgctgcagtccatcgagatcatcaaggagctcggcgcgaagatccccgccggcgacatcgaggtggcggtgaagggcgcgccggccgacggcgcccaggcatccaacgtgctggagcagccccgcggcgagtgctactactacgcgcgcggcaatgggtcgaagaacctggagcgcatgcgcatgcgcacgccgacctcgcagaacctcgccggcatgaccgtggccctgaaagggtgcgacttggccgacgtcaatatgatcatcctgaccatcgacccctgcatcagctgcacggaaaggtaggcgagcatgggaagcttcaaactgggcggcatgaccttcggctctctgttcaagaagcccgagaccgtgctgtaccccttcgagcagaaaccggccccggcggggctcaagggccatatcgaaaacgacgcgagcgcgtgcatcctgtgcggcatctgcgccaagagctgcccggccgatgccatcgcggtggagaagaaggagcgcacctgggccatcgatccgttccgctgcgtgcagtgcggcacctgtgtgcgcgtctgccccaagcactgcctgaccatggatcccgcctatacacccatcgccacggcaaaatcctgccgcgtggtgcacgtccccgacccgaaggcggcggtgacggaatcgtaagcttaaccgctcgttaagtttcgtggtgagtctgagaagggcttgccgctctgctaaaatatgccgttatcggcacgtgcgccggaccctcgacgagggtccggtttttgtagggaaggagcaggacgcctcatggccgaagggcagcgagatggggaagggatccccgagcaggtgacaagcgagatcttcacggcggccaacgtcgtctccttcgtgcgcctgtgcctcgtgcctgtgtacctgtggcttctgctgtccggcttcaacctggccgccacgcttgtctttgccgctgctgccgccagcgacttcatcgatggacagctggcccgccgcacccacacggtgtcgaagctggggcagatcctcgatcctgcggtggatcgcatcctcatgatcaccggcgtcctcggcgtgttcctcgtcggccgcattcccctgtgggtcatcgtcgtcgtggtgctgcgcgacgcctacctgctcatcgggggggcgtggcttttgtcgcgctaccgcatccgcgtgcccgtcatctatccggggaagttcgccacgacgtttctgttcatcggctttgccgggcttctcttgaacgcgccgctcatccccggtttgggctggtgcgacatctcctggttgcccgggttcaacggcgaggccgtctcctggggcatctggttcatctacgcggggctcatcctgtctcttggcgtcactatctactacaccgtggcggcggcgcgcgccctggccgccgagctgagacaccgcaaggaggccgcttcggaaagttcgagcgcccatggcgacgcgtaggccctccgacgagcgtccgagcagcgaggagcgccgtgcgcgggcgagggccgagcggcgcatcgtcatgccttcgaaccgcgtttctcgtccgaagggcaccgttcgatcgtctccttccgcaacagcgcagtcttcctctgctcgaccctcctcatccgcatctcgtccgtcggcgcgggccgcaacaagaccgaagagcacttcgaaggcggtaaccccgcgcaacggtggcgcggccgccggcgccacggcgaagcgcggtggcggcgcgacgacagcgcgccgtgccgcatctccgtcgaatcgttctcgcgccacggtttcgcaggccaaggctccgcgcaaccccggcgccccgcgaagcacggcggcaggccactccggagcttcgaaccgtcctgccgccaagcgtcacttcgcgaggtcccgcattgtcctggcggccgtgctggcgcttttcgcgctcgtcggcggcgcctgggccatcgacggcgcggtcaacggctcccgcatctacgatggcgtgtcggtgggcgcggtggatgtctccggcatgaccgaggaggaggcccgtcgcgtcgtgagctccttctacaagtcccgcgttgccgatggccgggcgcttatcttcgccagcgaggaggcacgcgacacccttgatgtggaaagcgagcttgccgagcaggacgcccaggccgagcagctctctttagaggaagcccgggccaacaagcaggtgtgggtcgccgagagcggcacgctgggcgcgaggcttcccgtaaacgaggcggtctcccgtgccttcgctgtgggccgagaaggcggtcttgcggagcgtatggaggcggcgcgcaacggcgtttccgtcgacgtcgccctttccttcgacgaggaggccttggaggcgctgtgctcctccatcgatgaatctgctggcgagccgcgcctcgattacggcatcgccatcgatcagggcgcggtatcggtcaccgagggccacggcggcaaggccgtcgaccgcgcctcggtggcccgtcagctctccgagggatttctcggcgaggcgtccggcaaggtcgtcatcgtggcgacgcccgatgaggcggacgtgcgcatcggcgccgatgaggccacccgggtcgccgacgaggttcaggaggccctcgatcggggctgcaccttctccttcgagcggaccgagtggccgctgggggcggcggatctgggcgcgtgggtgcgcacccgggtggaagagcgcggggagggtttcgccctggttccctacctcgacgagaccgaggcggcctcggggctgctcgggctcattcgcgacgctggctacacctcggcggccacggtgtcgttcgacgtcgacggcggcgaggtatgggtcagcgcccgcgagggctcgcgctatccccataccgccgatgcggcggcgcaggcccaaagcgccctgttcggcagtgaggcggccggccccgatgcgccttccatcgccatccagtggggcgaggctccgtcccggaccaccttcgacgaagcgctcgagatgggccttatcgccccgatctcctcgttcacgaccgagtacaacgacagcccctccacggccaatcggcgccacaacatacacgcggcggccgacttgctgaacaactccatcgcccgggccgacggaggggagtggtcgttcaacgacacggtgggcgaggcgaacgaggaggcagggttccaggcggcccatgccatcatcaacggcgagtacgacgacgccatcggcggcggcatctgccaggtggccaccacggtgttcaacgcggtctatgaggcgggctatcccgtgaccgagcggcgcaaccactcgctctacatctctagctatcccacgggccgcgatgccgctatcgcgtaccccgacctcgaccttacatgggtcaatgacggcacttcggatgttttgatgcgctcgcgctacaccgattccagcctaaccgttacactgtacggtatcgatcccggctacgtggtctccacgcagaccggcgattgggagaccggagagcccttcaagaagcgcaccaaagtcgacgagagcgagcctgagggcacgcgctacgtcaagaccgccggagctgacgggcgcagcgtgaccgtgcatcgcaccgtccgcgaccgtgcgggcaacgtgcttcatgaagaggatttcacctccaactacgcccccatcgacgaggtgaccgtcgtggggccgaacacgccgacacgcgagagagaagataccgataaagaagctacggacaaggaggaagccagtgttctttcaaccggagattgagacgatgccccgcgaggagctgcgcgaactgcagcttgagcgcatgcgggagtcgctgcgcaacgcctacgagaacgtgccgctgtaccgcgagcgcttcgacgcggcgggcgtgacccccgacgacctcacgagcctcgaggacatcgccaagttccccttcgtcgtgaagcaggacatgcgcgacaactaccccttcggcatgttcgcccgcgagaacgccgacgtggcccgtatccacgcctcatccggcaccacgggccaggcgacggtggtggggcataccgccaacgacctcgcgaactggggcgactgcttcgcccgcggcattgccatggtgggcggcgacgagaactccaccatccaggtgtcctacggctacggcctgttcacgggaggcttgggagctcatgccggcggcgaggccatgggctgcaccgtcatccccacctcgtcgggcaacaccaagcgccaggtgcagatgctcaaggactgcaagaccgacatcctggcctgcactccctcctacgccctgctcatcgccgatacggccatcgagatgggctatgacccggccaccgagttccaaatctccggcggcatcttcggcgccgagccctgctcggagaacatgcgccaggagatcgccgacaagctgggcatccagtactgcgatgtgtacggcctctccgagatcatgggcccgggcgtggccatggaatgcgccgagcgcggcggcctgcacatcgccgaggaccagttctactgcgagatcgtcgaccccgagacgctggaagtccttcctgacggcgaagtgggcgagctcgtcatcacgacgctgacccgcgagtgctcgccgatgatccgctaccgcacccgcgacgtcaccaccatcaacgccgagccgtgcgcgtgcgggcgcacccatcgcaagatcgggcgccttctgggccgcaccgacgacatgctcatcatccgcggcgtgaacgtgttcccgtcccagatcgagcaggtcatcaccgagttcccggagatcgccacccagtaccagatcatcctcaccatgaacggcccgctcgaccacgtggagctgcaggtggaaactgagcccgacttcccgatcgacgaggtgcgccgtctggaggatctgcgcaaccgcctggccgcggccctcaagagcaacttgcaggtggccgtcgacatcaagttcgtggagcccaagaccatcgcgcgctccgagggcaaggccaagcgcgtcatcgacctgagaggggagaaccagtaatgatttcgcagctcaccgtttttctcgccaacgagaaggggcggctcgccgcggcctgccgcacgttggccgacgccgacatcaacatgaaggccctgttcatcgccgacaccgccgatttcggcatcgtccgcatcttctgtgacacaccgaaacgcgcggtggaggtgctggggcaggcgggcttccgcgcctcgctcacgccggtcatcgccgtgtccgtcgaggatgctcccggcactttggccgatcttctcggattctgccaaggggcctcgatgaacatcgagtacggctactgcttctgcaccgctgacggcaaggccgtcgacgtgctgaagatcgagggcgacggtgccgaggcggttctcgccgaggcgggcttcgccgttctggccccggaagaggtttactgcgttgaccctgcttagccccatcgaaaacggcagtgcgcaccaaagcggcgcccgtctgtcaaggcgggcgctcggcttcgctttggctctgctgctggcgctgcctttgggcgcgccggcccgggcctttgccgacgtgcgcggcaccgacgagatcctgggcgcctccgtcgaggcgcgcgggctgccggcggttgcctgtccgaacatcacggcgaccttcgcgctggtcatggacgacgagggcacggtgctcttctcgcggggcgccctcgagcggtcgcacatcgcctccatcaccaagatcatgaccgccatcgtcgcgctggactccggcgtgcccctggacagcacggtgacggtgagccaggaggccgcctcggtgggcgagtcgtcggcgagtctgtgggcgggcgacacgctcacccttgaggcggcgctcgcggggctcatgatcccctcgggcaacgacgccgccatcgccatcgccgagactttgggcgaggggatgaagaccgacgattcgcagaccgccaacgaggccttcgtggcggccatgaacgccaaggccgccgagctcgggatgaccgagacgttgttctccaacccccatgggctcgacatcggcgcctacgacaacgaaatgtacagctgcgcccgcgatgtcgccctcatgagcgcctacgccatggaaaacgagacgttccgctccatcgtgtcgaaggagtccgcccagatcaccgtcacgcgcgccgacggcaagccccaggtcatcgaccttcaatccaccgatcgtctgctcggcacctacgagggagcctgcggcatcaagaccggctacaccgaggcggcgggcaactccttcgccggcgcgtgcgatcgcggcgacggccttctgtatgccatcgtgttgggttcgccctccgaggacgcgcgcttccaggataccgagacgctgttcaactgggtctacgacaaccgcgtgagctatgcgctggcccacagccccgagaccgtggcctctgcagctgacggcggtgccgaggtgccgctcatcgcccgcgtgtcccacagcgcgtggccggaccgcacggttgcggccaccttcgccgatcccgaggcggccgtcgaggtgttcgcgcccgagggcaatgtgagccaggagatcgtcgccgaggagctgaccggttcggtggccgcgggggatgtcgtgggcgtcgccaacttctaccagggcaacgagcttgtcgcctcccaggacctcatcgcctgcgaggattcgccggcccccggttttctcgagggcatcggcatctggtggaaccggctgtggggcaacgacgccccggcgccgaccgaggtcgtcaacgagacgcccctcatctacagcaagtcatcctctcgcgaggatcatcagtccgttgcggccatcgccgcaggcgtctcagacgacgctcccgccgacggtgccccaagcggcgcgggcgcgggcgccgcagacgccgccaacgagtaaggaggtgggtcatgagcgagcgctgccccgtttgttcccacgagatttcaccgaacgacaccgtgtgtcccacctgcggattcaagctgctcggcaccacgcaggccatgcagccgctcgtcatgagcgagacgccggccacaaccgttgaggagagcgccccggcccgtgcgacgctcaacgtcgtgcggggtccgcaagtgggcatcagcttcgtgctcacaggcgagcccgtcaccatcggccgcagtccccagtgcacgatcttcctgaacgacatgaccgtctcgcgcatgcacgccaccatcgagcaggagaacggctgctacgtcatccgcgacgccaactcgttcaacggcgtgtgggtgaacaacgattccgtggaggcccgtgcgctgcgtccgggcgacttcattcagatcggcaccttctgcatgcagtacgaggagaattagggccgcgcacgcgacggcgggcgccgaagggagaggaagagacatatggagctgatgagcggcaacgaggccatcgcccagggagcctgggaggcgggctgcaccatcggcgtggcctacccgggcacgccgtcgacggagacgctggaggccttcgccaagaaggagggcgtctacgccgagtggtgcgtgaacgagaaggtggccgtggaagtgggcatcggggcctcggccgccggcgcgcgggtgctcgccaccatgaagcatgtgggcgtgaacgtggcggccgacccgctgttcacggccgcctacaccggcgtgggcggcggtatggtcatcttggcagccgacgacccgggcatgtactcatcccagaacgagcaggactcgcactactacgctcaggccgcagccatcccgtgcctcgatccggccgactccgccgaggctttgcgcttcacccgcgaggcctacgatatctccgagcgcttcgacgtgccggtgatcatccgctccagcgtgcgcatctcccacacgaagacgcccgtcgaggcaggggagcgcgccgaggcgccggcgaggccctatgagaagaatccggcgaagtgggtcatgatgcccgccttcgccaagccgcgccgcctcgtgcagctggatcgcatcgataagctgcgccagtgggtggaaacctgcccctacaacgaggtgagggaagggaagggcgccatcggcatcgtctgcgccggcacggcctaccagcacgtggccgaggcgctcccggacgcgagcatcttcaaactcggggtcacctggccccttcccgcggccgcgctgcgcgatttcgccgactccgtcgaagccgtgtacgtcgtggaggagggctcggagtacctcaaagacgccgtgcgggcctgcggggtgccggtgagcgagacgccgtgccccctgccgcgggccggcgagctgtcgccggggctcgtgcgcgcggccttcggccttgagcagccgccccatgcgccggctgcgaccgatctgccgggacgccctccggcgctgtgtccgggatgcccccatcgcctcgtgttcaaggagctctcgaggatgcgggccatcgtgaccggcgacatcggctgctataccttgggcgccctgccgccgctttcggccatggacaccacggtggacatgggggcctcggtctccatggcccacggcttcgagctggcgctggccgacacggagcatcgtcccatcgtcgccgtcatcggggactccacgttcgcccattcgggcctaagctcgctcatctccacggtgtacaaccgcggcgccggcacggtgtgcgtgctcgacaaccgcaccaccgctatgacggggcgccagggcaaccccttcaacggcgtgaccctgcagaaccggcccagccgcgagttgaacatcgaggccgtggtggctgccctcggcgtcgaggatgtgcgcgtggtcgatcccaacgatgccgccgccgtgcgacgggccctcaaggaggccacgggcagcgacgacatctcggtcatcgtgttccgctcgccctgcgtgctgctcgagcgccacgtagagccgccgctgttcgtgagcgactcctgcacggcctgcggcgcctgcgtcacgttgggctgtccggccctcggccgcgacgagacgggccgtgcgctcatcgattccgcgctgtgcatcggctgcggccactgcacccagtactgccgcttcgacgccatcgtcaaggaataggaggccgttcatggaaaatgccactaagaccgtgctcttgtgcggtgtgggcggccagggaaccatcctcgccgccgatttgctcgctttcagctgcatgaaggcgaatctgcaggtgaaggtgtcggagatccacggcatggcccagcgcggcggcgccgtcaccacggtggttcgcgtgggcgaggacgtgaaatccatggtatcggacgcgggatgcgccgatgtcgtcgtcgccttcgaaaccaccgaggccctccgcaatctgccccagctcaaggagggcggctcgctcatcgtcaacgatgtggccattcggcccctgccggtactcaccggcgccgcctcgatgcccgggaacgcccgggagcgcctgcgcgaggcgggggcgctgctcatcgacgccgatgccattgcgcgcgcggccggcaacgccaaatgcgccaatgtggtgctcgtgggggccttggcggcccggctcgacattcccgtcgaggtgtgggaggagaccgtggccgagcgcgtgccgcagaagaccgtcgaggcgaacctcgccgccctgcgcgcgggccgagccgtcatcgagaacgaggagggaaaatagcatgaccgtttcccagatcagcgtattcgccaacagccgcccggggcacatgaaccgggtgctcgacctcttcgagggcgccggcgtctccgtgcgcggcttctccgccgccgacacgggggggtacggcatcctccgctttatcgtcgataagccggaggcggccatggaggcgcttaagggcgccggctgcgcctgcgtcgtttcgccggtcatctgcctgaagctcgtcgacgagcccggcgagctctcgcgggtcatgggtgtgctcgccaaatgcggcatcaacgtggtctacagctattccatgatctccacctatatcgtgctctccacaagcgagccggagcgcgcccaggcgcttctggccgatgagccggtggagctcatttcccaagaggacatcgcgcgcatcgtcgccgagcgcgccgcgaaggaggcgtaagagcgcatgagcgaggcaatggatcccatcgacgtgacaaagaagggcgcggcgctggccgccgccgaagcgggacggttcgacgccctgcccatttacaagccggaaatcgaatgcgcctcccgcgaggagattcgcgccctgcagctggagaagctgaaggagaccgtggcctatgcctacgagcgcgtgccctactaccgccagaagctggacgagatgggcgtggcgccgagcgacatccagacgctcgaggacgtgcgcaagctccccttcaccgacaaggccgtgctgcgcgagaccttccccttcggcctgttcgcggtgccgctggacgacatccgcgagctgcactcctcgtcgggcaccaccggaaagcccgtggtggtgggctacaccgacgacgacatggacatgtggagcgagtgcatcgcccgcctcgtgcagatggccggcgtcgtgcccggggacatcgcccagatggccttcggctacggcatgttcaccggcggtttcggcctgcactacgggctgcagcgcctgggctgcgccatgatccccgcgggctcgggcaacaccgagcgccatatccagatgatcgaggactacggcaccaccgtgctcgtggccacgccctcctacgccatgcacatctgcgaggtgggggagaagatgggctacgattgggagaagtcccccctgcgcgtgggccttttcggcggcgagccctgcccgccgggcctgaaagccgagatcgagcggcgcatgcacatcgtctgcaccgacaactacggcctcaccgaggtcatggggccgggggtctccggcgagtgtctggccgagcgctaccagcagcacatcgccgaggatcacttcctgtgggaggtcatcgatccggaaaccggcgagccggtgggcgagggcgagatgggggagctcgtgctcacgcccctttgcaagcagggcattcccgtgctgcgctaccgcacccacgatctgaccgccgtgcacaccgagccctgcgcctgcggccgcacgctggcccgtatggacaaggtgcgctcccgctccgacgacatgctcatcatccgcggcaccaacgtgttcccctcgcagatcgaggacgtgctcacgggcatcgaggaggtcacgccccattaccatatcatcgtggagacccgcggcggcatggacgcgctcatcgtggagaccgagctgcgccccgaggccttccgcgactccttcgaggccatggacgccctgcgcgctcgtatcgccgagaagctcaagggcacgctgctcgtggcgccggaggtgcgcctggtcgagcccggcggcatcgagcgtgccatcggcaaggccaagcacgtcgacgaccggcgcgagaagtagcccggttttaagactgcgccggaaaggtttcattggctatgacggaaagcggcgcgacagaggcgacacccgtcgtcggccgcttcgcgccgtcgccgaccgggcgcatgcacgcgggcaacatctacgccgcgctcatcgcatggctcgtggcgaagtcccagggcggccgcatggtgctgcgcatcgaggatctcgaccgcgagcgctcgaaggccgcctacatcgatcagatccagcgtgatttcgaggccctgggcctcttctgggacgaggggccgtacttccagcatgatcgcgacgaagcctatgccgaggcattcgcgcgccttgaggcccaggggcttttgtacccgtgcttctgcacgcgggccgaccttcacgccgcctcggcgccccaccggggtgagaagctcgtctatgccggcacctgccgccatctgtcggccgcggaggtggaggcgcgccgggcagcggggcgcacgccgggctggagagttgccgtggacggtcgcatgatcgccttcgaggacctcgttcagggatactacgcgcaaaagctcgaccgcgactgcggcgacttcctcatacgccgctccgacggcgcgttcgcctaccagctggcagtggtggtggacgatgccgcccagggcgtcaattcagtcgtgcgcggcgtcgatctgctttgctccacgccgcagcagcgctacctccaggatcttctcgggctgccgcaccccgcctatgcgcacgttccgctgctcgtggccgagcagaatcggcgcctctcgaaacgcgatcgggacgcggccttagacgagctgctggcccggttcggaagtccgcgagccgtcatcggacatatcgcggcggtggcggggcttgttcccgaagaggcgccggcgacgccggaagagctgctgaaggacttctcgctggagcgttttcgcgatggactgcccgatctcgtgcagattccctggcgctcctaaagcaggagggcggcggcgtagaatgcgcccagagccacgttcacgctgcagatctggcccatggcgccgatgcgcgtgggcgcagcgagcggatttttccacaggcccatcatgagggggtagcagccgagcgccaagaaggggagcacgacgatgccccgggggaaccaaatgccgacgatggcgaggatggcgagaacccaaacgaccatgagggcgtggtagagggtgcgcgccttttctcggcccagcagcaccggcagcgtgcggcgggatgcctcgatgtccttctcgatgtcgcaggtgttgttcgtcatcatgatgaggcccacgccgatgatcgtgggcgtggcccaaaggagcgccatgaacgtgaacgtacccgagagcacctggtagcatgccagcggaataagaccgcccataacgatgccgctcaccgcctcgccgacgggaaggtaggagagaggcgttttgccgccggagtacatcacaacgatgacggctccgataagcgcgatgacgaggggaacgggacctgtcttccaaacaacgtacaggccgagcaggaaggccacggtcagaaagccgatggccagcccgagggccgagcgcggattgacgtcgttgtagacgagcaccgagtcggaggcctccacgttgtcctcggccgtatcggttcccttgatgaagtcgaagtagtcgttgaaggtgttcacggacgcctgcatgaggatgcagatgaggagcagaagccacgccatgcccacgtccagcgacccggtgttggccaaggcgcatgcggcggccacgagcacgggcatgatggccgccggccaggtatggggcgcggccagctgaagagcgaggcgaggggagaggggagtcgtcgctcccctgctgttcggtttcgtatgggaacccatgttcgatttctcttttcgtcgtgagaagtgctatcgattacctggcattatagaagaagggcgccccaatggagcgcccttcaaggggtttgcgcgttgacggcgcgtttagttggtcatcagcgcggccgcgatgtcgcccgaggtggacgaggccggctcccaggtgccgtcgaccttggtgtaggtgatggtgatgggctgggtggccgccagctcgacgccgtcgagggagccgatgacgatctcgccgatcttttggttgatctcatcgttggagagagcggcaagagcatcgggatcggcggtgacctcgtccacggccgtctgcagcgcctgcaggtagccggtatagctcttgcaggtaagggtgatctgggccgtggcgctgtcgccgtcgacattgatcgagtcgatcgtgtaatcgaagccgctcaggtaggacttcatgaactcgacgccgtcgatgccgtagaccgaaagctggctcatatcgatggactcggagaactcgttgacgaacgcgtcgtcgatgttcttaatgctgtccagttcggacgagagtgaagcgcggatggcgtcttcatcgctcgtgccgctcgagcaaccggccaacccgaccattccaatggaaagcgccaaaagagcagcgagggtcactataaaaccctgtatagttgatcgtgatttcaattttacataatccatattatcagcctttcttgtcaatcttttcagaagccctccaacttggaacattttaccttatatggagggcgcttagccccaggcattgccactgccgccggatggttgcgcggtgatggtggcgccctcgccgaggatcgaggtgaagtctcccgtttgcatggcctccatgagcacgggcatcatgagcgcgatgccgacgatgttgacgatgagcgcaatggcgctgatggcgagaccccagataagcgtttgacgtaccgtggtggcatagaccttctggcgaccgtccacatcgtctatcacgtgcttgatcttgacgaagccgacaatggcgcagacaaggcccaccgtgctcagcatcacgccgccgatgatgaaggagaccggacctgcaatggccgctaccgtcgagagcgtgcgggcggatttcaagtcggcgtcgatgagcacctgtctctgatcctgcgaaggctccgtcgacggctcgggtcgctggggatttccgggagtcgcctccggagctcccagctgctggggttcgggcgtttcttcgggtttcgaatcgcgatgatcggtcataaaggacactctttctaggaaaggccgctgcttccgaagccctgcgcgccgcgcgagctctcgggaagctcataaatgttatgtaaagtaatagagggggtagcgatgatcacgagctgggcgatgcgctcgcccttctcgtagttgaacgtctccgttggatcgaggttgatgagcggaaccttgatttcacctcggtagccgctgtctatgaggcccggggcgttcacgatggagatgccctgtcgtgccgccaggccgcttcggggaatgatgagccccgcatagccctcgggaatggccaaggctataccgcaaggcacgagtgcccgctcgaagggcaaaagcgtgccgccctcggcagcgcgcaaatcgaggcccgcatcgcccggacgggcgtaggcgggcgcttccagggtctcgtcgagctgcttgaaaagaacctccatggatcagcccagctctttcagggcctcggagaactcctccacattctggaaatccttatagacgctggcgaagcggatgtaggcgacgtcgtccaaggtggccagacgggccagcaccaaatcgcccaaatcgcgcgatttgatctcgttgcgctggctcgatcgcagctcagattcgatgctcgtgatgagcccgtcgatcttctcgggcgtgatggggcgtttcgcgcaggcgatgagcaatcctcgcatgagcttctcgcggttgaagacctctgaagaaccgtcggccttgatgacgagaatgggattttcggcgagccgctcgtaggtggtgaatcgcgtgccgcactgcaggcattcgcgacggcgccggatagaggcgccgtcgtcggccgatcgcgagtcgacgactttcgattcctgatagccacaggaaggacagcgcatgggttctccttctcactttgataagttgattgcttatcataccctatcagacctagtgcgctcccctcttcaaaacattgctaccttcgcgacactcgcccccgacgctctaggcgaagaagatgagaaatgacgcgatggtgctgagcgtgaaggctatggaaaattcgatgcgtgccattttttactcctgacctcttgcgtagaacctttgttcgcagttataatagagcgaacaaaggttcacgtcaagagatttttcaaacaaatgtacgcttttgtgaaaggatgcgctatgacccagaaagtgaccaagcggcaacaggcggttctcgactgcatcgaagcgtgcattcgcgagaagggctacggccctaccgtgcgcgaggtgtgccagagtttggggctctcctccccttccaccgtccatgtccatttgaaggcgcttgaagacaagggcttcatcaagcgcgacccccttaaatcccgctccatcgcgcttacctaccccatcgaggaggttccctcccctgtcacggccttcgcggccgcctatagcaagctcgtcaatgtgcccttggtgggcaacgtggccgccggctcccctattctcgccgaggagaacatcaccgataccatcacgctgcccacggacatcgtcggcgacgccccctccttcatgctctcggtgcgcggcgagtccatgatcgaggccggcatcaacgatggcgactacgtggttgtgaaagagcagccggtggccaacaacggcgatatcgtcgtggccatcatcgacgacggcgccaccgtcaagcgcttcttccgcgaggccgaccatatccgcctgcagccggagaactcgacgatggatcccatcatcacgacggactgctctatcgccggcaaggtggtggccgtgttccggcgcctgtagcgctttcgcctcacgaacagatcgcgaactcccctttcggcaaattgagagcgcccctgcccagatcgctttgcgtatctcgggcaggggcgctcttccgttctggacgcgctcgctttctcaggcatcgccttcagggacgagataggaggagaacgtgctgacgaaggcaggggcaacgagcagctgcaggcgcgtccccgcctccccgtggctctcggagatgatatggcagcgctcgtgggccagcgacaccaagtcgccccgctgatagggaataagcacgtccagcttggtatcggcggccgaggcggcctgggcaatggcgcccacgagcccctctatgccctcgccggtgcgagcggacacgaactgggcgctcggatagcgccttttaaggccggccagcgtctcggcgtccagcagatcgcatttgttgaaggtggcgatcgtgggaatgctctgggcccctatctggtcgagcacctcgcacacggcctcgatctgcccctcgaactccggcgaggaggcgtcgatcacgtgcaggacaaggtcggctccggtgatttcgtcgagcgtcgacttgaaggcctcgaccagcgtggtgggcagcttttggatgaagccgacggtgtcggtgacggtgacctcgcggccctcgggcagctcgaacttgcgggtggtggagtccagcgtggcgaagagcttgtcgtagctgagcacatcggccccggtgagccggttgatgagcgagcttttcccggcgttggtgtaaccggccagcgccactttgaacatgccgctgccgtaccggctctcccgctgcaacgagcgcacgtcggacaggcgctcaagctcgcggcgaatgctcgtgatgcgcttgcgcaccatgcggcggtccacctccagctggctttcgccctcgccgaagcgggatcccacgccgcctcccatgcggttcgaggcgaggtgggcccacatgccgcgcaggcgcgggtacaggtactggttttgggcgaggcgcacctgcaggcgtccctccttggaggtggcgtgcagggcgaagatgtccagaatgagggccgtgcggtcgatgaccttcacggacttgtccatgaccttctccagattggcctgctgggaaggtgtcagctcgtcgtcgaagatgacaaggtcggcctcgcgcgaccgtgccagctcggcgatttcgtcggccttgcccgtgccgacgaaggtgcgcgggttgggtgcgtccaagcgctgggtcgtcgtggccaccacatcggctccggccgtatcggccagacgttccagctcggccaaggaagattccaagggccacggcagccccgggcgctcgacgcccacgagaacggcgcgctcgcggcgctcctcggccttggtggccgggcccttttggatgacggattcgtattcggtcatagcatgctcctttgcttcaagtaacgacggaccccataaagggaaggcggtgcaagtggtcgttacaggcgcatgagcatcactccttaatcgtggcgcggcgttgcgccggggaaacgggggctatcatagcacaacagcagcatcggaaaagctcacggcagcacaatggttcccgagaagctctccgttgccggccccgtcatggatatcgcgccatcctcgttccagcagatgtgcagtaggccgccgctcaacataagatcgttctccctgccggcccggccagtgaggcaggcagccgtgttggtggcgcaggcgccggtgccgcaggccaaggtctctccgcagcccctctcccacacgcgcatggcgatgccctcatcggtgacggaggcgaactcgacgttggttttctcgggaaatgcgggatgcgtctcgaagaaggggccgggaagatcgatgcgcagggtcgagagggatttctccacacctgcggggaacagctcgtcgggcaaggccgcccaatcgtccacgaggcagacggcgtgggggtttcccatggagacgcaggcgaattcgaaggctccccacggcgaatcgaggcgcagatgccccacatagggcgtaccgtcggccatgcgggagtccggcgcggcgtcgacgggcacgagcgcgggatccaagatgggcgcgcccatgttcacggtcgcctcggtcatctttccccccgcatccacggaaaaggcgatggggcgcggaccggccagggtgtcggccagaagatgtcccgaagcaacgtccgccagctcgcgatcgacgaggtacttggcgaagcagcgtacgccgttgccgcacatttgggccaaggtgccgtcggcgttgatgtagtgcatgtagccgtctccctcttccgaggttgccggccgcacaaggatgacgccgtcggcgccgatgccgaagtggcggtcgcacagatacgacacctgggcatcggtcagcttgagagcgcggtctcgatcgtcgatgaagacgaaatcgttgccgagaccgtgcaatttggcgaaggacaactccatgggacgctcctttgaggcggcaattgagggggcggaagctctcctcgacgacccggaagggccgcttcaaccatggtaggcgtccaatgtttccaactgggaaagaatctcggcggccacggcctcggcatcgccggcatcggcgttcacccagcggatgcgcctgtcgcgacggaaccacgtgcgttggcgcttgccgtagcggcgtgtggccgtcttgatggccttcacggcctcctccagcgtggtgttcccatccagcgcctcgacgatctccttgtatccgatggcctggtgcgccgtgacgccatcgcggaacccggcggccagcagaccccgcacctcgtcgacaagccctgcggccaccatggcatcgacccgggcgtcgatgcgctcgttcaggatagccggctccacggccagccctaattgcacggccggaacaaagggcgccacggtggcaagccgctgtttctgctcggcgtagctgccgccctcctccaaaagctcgaaagcgcgcacgacgcgccgcacgttgttggggtggatgacggcggcgcttgcgggatcgcgcgcttccagcgcctcccacagggcctggttgccgtgttcctccgcgtaggcggtccagcgttcgcggacggggttttccacctggtcgcccttggggaaggcgaagtcgtcgatggccgcctgcacgtactggccggtgccgccgcagagcaccgctctcttgccgcgggcgtctatatcgcgaaagcagcgccgggcgaacgcctggaacagggccgccgagtagggctcgccgggatcaacgagatcgaagccgtgatggggcacgcggcgctcagatgcgggaagcttgcccgtgccgatgtccatgccccggtagatctgcatggaatcggcgctcaccacttccccgccgaggcgctcggcgacgatctgggccgcgtcggtcttgcccgaggccgtgggccccacgatggcgatgacaggtgcggaaagctcaagcatgggcgatcgcgcccgagagataccaggtgcgggcttcctcgatggtcacgggcacgatgcgccccaccaaagacgccgcctccgtgccggaaggcaccggagcgtgaacggtctggttcttcgggctcttgccggccaggatggaatcgtcgcgcttggacgtgccctcgaccagcacaggcaccgtggcgccgagctccgcctggttcgcctcgaaggccttgcgctggacgagatccacgagccggtcgaagcgctcctggatgacctcgcggggcgtgtcgtcgtccatctccgcagcaggcgtcccctcgcgcttggagtaaataaacgtgaacacctggctgtagccgacttcctccacgaggcgataggtgtccatgaagtcctcttcggtctcgccggggaatcccacgatgatgtccgtggacagggcgatgtcgggacgggcgcggcgaagcttctcgataaggccaaggtagtgctcgcgggtgtagcggcggttcatggccgagaggatgcggttcgagcccgactgcacgggaaggtgcagcgccggcatgagcgagggtagcgtggcgaacagcccgatgacctcgtcggtgagatccttcggatggctcgtcgcgaagcggagccgctcgatgcccgcggcatccacggcccgaagaacatccgcgaaccgcggctcgccgtagaggtcgcgcccgtaggagttcacgttctgccccagcagcgtgatctccttgacgcctgcttctacataggagtgcgcctcggcggcgatgtcgtccaagggccgcgacttctcgcgcccgcggacgtagggcacgatgcagtaggagcagaaattgttgcaccccacggtgatgggcagccatgccgcccagtcgtgctcgcgcaccgtgggcagggcggaggagaactccgctcccccctcgatcacctcggcggcacggccgtgctgctcgatggcgcgtcggagaagccccggcaaagagcccaagttgtgagtgccgaaaaccacatcgagatggggaagcgccgcaagcagcttgtcgccgtcgcgctggccgatgcagccgcctacggcgatgtagcgcttgtcgaggggcgtgccgtcgcgcaaggggatgttcttcatggaggcgacctgcccgtagagcctcgtgtcggcagcctcgcggacgcagcacgtcatgaacacgacgatgtccgcctcctcgatggtttcgacgggcagcgagcccaggccctccagcatgccggcgatccgctcggaatcgtgcttgttcatctggcagccgaaggtgtggatgcagaaacgagttccctcgaagacgttgctcatagcaaaaccctctaatggaccgcggccgcatcgacgatgggggcgatcgcggcggcgccccgcggctcgacggcgaagcggatggccgtgcggtactcgccgtcgatgacgatgtccgcgaaggaggggatgcagcagatctcgatgcccaccggcgagaggaacccgcgggagatggccacggctttcacagcctggttcaccgcaccggcccccacggcttgaatctccaccgacgccccgtctttgatcatgccggcgatggcgccggcaacggaggcgggagacgatttggaggatactttgaggcacccgatggagggcttggtttcagtggtagacacagctggtccttgtcgtttgtggtgcggttcttctctggatgtggttcgtttagcgggcgcccgtagcgccttcagcccgaatattctacctgttgcacccgagtggcgcaaccgcgcgcgcttccttagagcgtcgtgcggatgggaacggtgatgcggatggcttcctggcccacgatgacctccgcctcgcccaccgcttccagataatacgcttccgccacgggctccatgagccggccgataccgcgcttcagcgcatcgatgtcctcgggagccagacgcagggaccgggcgttcttggaatttcgccgtcgctcggatgggcgatgggtctgccgcgggaacgattcggcggccaaacgctcggtcaaggggtcgagcgcaacgatggccccgtcgagaatgcgtcgggccgagcgttcggagagcggcaggcccagggcctcgcagcggtccgcgagatcatcggggccggcggccagggcgaggcgcttgacgagggggatccccgcgccgtcgcccccgaaggcgcgcacggccggggagagcgaggcgaggcccagttggtacagcgtcgccgccacctccactggggtgccgaggtacacggaaagatcgccgcggtgctccaaggcgaattccgcggccgtgcgcacgatgttcttggggccgcgcatcgcccacgaaccggaaggctcctgctcgaagcggggaaacgtcgactgatccgccttctcggcgaggctttcggtgtcggtggcgaccgtaagactggtgccgagccccggctccgattgcagcacccgggcctcttcggcgttcacggagatggagtaaagggccatgccgcggccgtgcatgccccacttgtccatatgcgcgctatcgagcttcgaggtgacgcgcggctcgaagatgcgctcgtgctgggcagcgggaataccctggccgtcgtcgaggacggtgagcaggcgcgcgttgccggttctctgggtggcgaggaagatgcggctggcgccggcgtcgcgggcgttgcgcagaagctcgatgaccacgtcctcgctcgagcggatgtcctgggcggcctggcgccgttcggcctcggaggaccggagacggacgaagccgtctccgaggtcgtcctcgacccggagacggctctcgccgcacacatcgtctatgaaatcgctgagggtatcgccttccatggcctacttggcgtagtcgaccgcacggctctcgcggatgacgacgactttcacctggcccggatactgcatctcgttctcgatctgctgggcgatgtcgtgggccaaaacgacggattcggcctcgtccaccacttccggctctaccatgacgcgaacctcgcggcctgcctggatggcgtaggtgcgctcgacgcccttgtgggagttcgcgatctcctccagcttctcgaggcgcttcacgtaggcgtccagcgtctccttgcgggcaccgggacgggcggcggagacggcgtcggcggcctgaatgagcacgtcgacgacggagttggcctccacatcgttgtgatgggcctcgatggcgtggacgatctcgggccgctcgccgaagcggcgggccagatcggcgccgatgacggcgtggctgccctcgacctcgtggtcgacggccttgccgaggtcgtgcaaaaggccggctcgcttgacggggatggggtcgagcccgagctcggaggccatgaccgaggccagataggccacttcgagcgaatggttcagcacgttctggccgaacgaggtgcgatagcgcaaacgtcccagggtgttgacgagctccgggtggagatcgtggatgcccgcatcgaacgtggcctgctcgccggcctcgtgcacccgctggttcaccagcttgacggccttgtcgtacatctcctcgatgcgcgcgggatggatgcgcccgtcggcgatgagattctccatggtgacgcggccgatctcgcggcgcaccgggtcgaagcaggagatggtgacgcactccggcgtgtcgtcgatgatgaggttcgtgccggtcagctgctcgaaggagcggatgttgcggccctcgcggccgatgatgcggcccttcaggtcgtcggaggggatatggatggtggacaccgtgctctcggcggagtggtcggcggccacgcgctggatggcgaggctcaagatctcgcgggccttcttgtccgcctcggccttggtgcgcgtctcggcatcgcggatgatgacggccgattcgcgggtgacctcgtcgtggatggtctccagcagttcctctttggcctcctgggggctcatgcccgcagcgcgctcgagggcctggttgatctcgatctgcgcctcctcgcgatggcgctcgatggcattctcggcctcttcgacatcgcgctcgcggcgctcgacttgtccctgcaaagacgagagctggtgctcgcgggcatccagggactcgacccggcgatcgagggactcctcgcgttgggcgatgcggttctcggcggagcgcacctcgcgcatgcgctccttgttctccttctccatctcctgcttatagcgaagagcctcgtccttggcttccacggcggcttcacgtcggagcgtctcggcttgcttcttggcatcctcgaccaggcttgcggcctcgcgggcagcgttcttggatgaggagctggcaatgagtcgattgacgatgaaaccgaggaccaggccgatgacgatagcgacgatcaagagcacgatcgtgatgggatccatggctgtttcctcctttcatctgggctttcatgcccatttcatgtcataaaaaatgcccgtggccgggcatgagcataactgcgcgaagatacgaggaatatgaaattctctatcttgaatgcccagaagggcacgtatgctctaaagccacagctcacagtatagcgtaaggccgcggctttagacagactctagtgggtttgcgtcacgaatggctcatcgaatcgcacttcaggttgcgctcctgctcctcggaccacgtgcgcgacgcggaagcggcgacatcggtggaaaatccttgggaaacgagacggcggaaagcggcctcccgggcgcgcttggctttaggcgggcgacgccgcagggcggccagggcgcggcccacttcgaagtccctccccttccgctcatgctcgacccagaaatcgagggtggctgggtcgatgccgagctcctcgatctcccgttcggcatcgcgaagcccccggccggccgcaagcttcatgcggacgagggcgtcggcgtagcgtcgatcgtccaccgcccgtacgcgcacggcgcgctgaagggcctcctccaccactgccgcaggaaagtcgtccttcagcaggcgctcgcgcaggtaggccgtggagcgctcgcgaaccgcggcccatcggaggatcttctggtacgcgtctcgggccgtcttcccctcctcgccgctcagagcgctctcccgctcctctccacgagaggagcgggagagatcctgcgcgcaagacgcccctgtatccctgccgcaaacggcgtcgtcctcggcagggtgcggccaagcggcgatttgcgcgcacggttcctctgagggaggggcggcttccagggcggcgatatccgccctgagcgctgcgagtatgtcggccttggacgccacgatgcgttacttcttcttgccgctcttgggcgccggcgtgaacgactcgttttcggccggacgctcgatgacggggatctcgtaggcctcgcggaccttgttctcgagctcctcacgcagatcggggttctccttgagcgtctgcttggccgcctcgcggccctggcccaggcgctcctcgccgtaggtgtaccaggcgccggacttcttggccacgccgcattccacggccatatcgacgatgcagccttcccgagagatgccctcgccgtacatgagatcgaactccgcttggcggaaaggaggagccaccttgttcttgaccaccttcgccctcacgcgattgccgaccacatcgccgttctgcttgatagagtcgatgcggcgaatgtcgatgcgaaccgaggagaaaaacttcagggcgcgtccgccggtggtcgtctccgggttgccgaacatgacgccgatcttctcgcgcagctggttgatgaagatgcaggtggtgttcgatttcgacagcgacccggccagcttgcgcagggcctgggacatgagccgagcctgaaggcccacggtggtatcccccatctcgccctcgatttcggcacggggaacgagcgccgccacagagtcgacgatgacgcagtcgatagcgcccgagcgcacgagcatatcgcagatttccagcgcctgctcgccggtgtcgggctgggagatgagcacctcgtcgatatcgaccccgatgcgcgcggcgtaaacgggatcgagggcgtgctcggcatcgatgaaggcaacgataccgcccagcgcctgagcctccgcgagaatctgcaaggcgagcgttgtcttgccgcttgactcgggaccgtagatttcgatgatgcggccgcggggcacgcctccgatgccgagcgcggcatcgagcggcagggcgcccgtggggatgaccccgatgttgagatcggcgcctccctcgccgagggtcatgatagagcccttgccgaacttggactcgatttgatcagtggtgagtttgagcatcttttctttatcttcgttcatgacctctccttgtctgggccaggcgaacaaatggcctgttttcatcattatacgaacaaacgtatgcacgtcaagaggtgattctcaaaaaccagttctctctgtgcgcgaaaacagcataacggtacgcgaccgcagcaatgacgcgggaatgtctcatttgagtcctcgcgccgaccgtaccgctgtcgcactctcgtcgcagagtgcccgtgcgccctcgccaaaaccgcggcgctgtcagaagctcgcgagcgcctcttccatcgtgcgcagggcgatcagcaccgtttgcaagcgcacggcctcgcggccgccttcgaaatgatggcatgcagcatgggtctttttggcggtggcgcagccgatccacaccgtgcccaccggcttgccgggctcggcgcccgtcggtccggcgatgcccgtgaccgccaccgagacgtcgctgcccagctcgcgcagggcgccacgggccatctgcagggccaccagctcgtcgacggccccctgtcgcgcgagcacgtcctcggaaacgccgagtacctcggccttcacctcgttcacgtagctcacaatgccgccgcgcaccgaggccgacgacccgggcacggaagtgagcatggccgcgatgaggccgccggtgaggctctcggctgtggccaccgtggcccctgcggccgtcgccttctcgacgatgatgcgcgcctgctcgtcgatggccttctgcagcgccgcgatctcggtgggtgccgcagaaggggcggccgcctttgcggttttggcccccgcgctccccttcaacagatggcgcgcctttacgagatagtcgagcatggacatgaccgtcaggacgagcgcgatgaccatgacggtccaggacagcacgaacatggggttggtgaaggcgccggccgccgtggtgaacgtgagcgagtccttgagaaggaacagcacgatggcgatgatctggaacaccgtcttggccttgccgtaccagctggcggcgatgaccgtgcccttgctggccgccaccatgcggatgcccgagacgatgaactcgcgggcaaggatgatgagcacgggccagccgggcagcacggccagctccaccagggcgatgagcgccgccgtgacgaggatcttatcggccaggggatccatgaacttcccgaagtcggtcacttccccgcgactgcgggcgagatatccgtcgatccaatcggtgcaggagatgagaatgaagatgccagcggcgatgacgcacttcgcctccatggtgatgcccggcaggcccacccattcgggccaggggctcaggatcgccagcacgaagaccggcaccaggcagatgcggatgagcgtgacgatgttcgccggcgtccagagcttgtccggagccgtgggctggatggtggtcatggcctactcgccttccatttcgtaaagcagggtatccgcgatggtgcaggaaacgaacgcgccgatctcgccgcgggacacgtaggtgacgccgtccacctcgggcgcctggcattgggcgcgaccgaagcgctggccgtcctcctcggttccctcgacgagcacgatcgcccccttcccgatgcgctcggcgatgcggggcccgcaggcggcatcggcggcgtcgcgcagcacctgggcccgctgggccttctcgtcctcgtcgatctggttcggcaggtcgaaggcggcggtgccctcctcgcgggagtaggggaagacgccgacgtaatggaacagcccctcggagacgaaatcgaggagctcctcgaactgctcgtcggtctcgccgggaaatcccgcgatgagcgttgtgcgcaaggtgatatcgggcaccgcggcctcgatgcgctcgatgagggcgcgaaacgccgcggcatcccctcggcggttcatggcccgaaggatcggctcgctcacgtgctgcaggggaatgtccagataagagcaaacgttctcgcgggccgccataacggagagcagctcgtcggttgcgccctcgggctgcaggtacatgacgcggaaccacgtgtcggggtgcgcctcggccagcgtgtcgacgagccatgcgaggtcgcggccgtcgggaaggtcggcgccccagcgtccggtgtcctgggcgatgagcacgatctcccgggcgccggaggcgatctcgcgctcgacgtcctcggcgatctgctcgtacgggaagctgtggtagcgcccgcgaatgaaggggatggtgcagtaggagcagaagcggtcgcagccgtcggatatcttcacgtaggcgaacgtccggccctccccttctgcgggctcgcccccgacggccgccacgggcagggggatccccagagcgcgcgccaccacttccgcgatatcgtcctcgcgactgcagggcacaaaggccgacgcctcagtcagctccgcggccaggtcgtccccgtagcgggctggcatgcagccggcgacgatgagggcggctgagccctcatccactttgggcagggaggcggcctcgaggatggcatcgatgctctcctcggtggccgcctggatgaacgagcaggtgttcacgatgatggcgtcggcgctggacgcctcttcggtcacggagaagccggcttcgcgcaagcgccgcgccatggcggccgagtccacctcgttcttcgcgcaccccatcgtgatgaggcagacggagggcaccgcgctgtcgcgcgtcatattgatcacgtccgtagtcctagcgatagttgacgtactgcagcggctgcccgtagtcctggccgcgcaagaaggcgatgacctcctgcaacgtgtcgcgggagggagagctcacgcgcagcttgtcgccctcgacggtcaccttgcacttgagcttctgggccttgatgtccttgttgatcttgcccgcggtctccttgtcgatgccgttgaccaccgtggcgcaccggcgcaccccgccgccggaggaaggcgtggaatccccccacttcacggcggtaagatcgatgccgcgcttgatgagcttgctgccgatgacgtcgatgacctgggaggccacgaactcggccggcgcggtcatcgtcagggtgccggcgcttttgtccagggagatctcggcgcccgaatccttcagatcgtagcgctgggaaagctctttcttggcttgctggaaggcgttgtccacctcctgcatatccaccgtggagacgatgtcgaagctggattctttagccatgggttgattgcctttctcgatgggcccgctaggccgcgctgtcggaggagtcctcgccggagtcggacgagtcgccatttccggaggtgtcggagggacggtcgctggtgctggagtcgtcgctcgaggaatccgagctggaggaggagccggaatccgagtcgccggagctatccgaggaggcgccggccacgccgttggcgcgcttccaatcgttgagcacgtcctcgaagttgacggtgtaggtgtagacgccgcggccgttctgatcctcggccttcacctcctcgccgtcgagggtgagcttgacggcggcgatgtcctcgtcatcaccggaaagcacgaatttcagcgttccggtcacatcgaaatcggccgtcttgggcccggtgacatcgcccgcctccacggtcttgccgtcctggacgacctcgatgtagacgcttgacccctcgggcacgttgtagctgaacttggcgctcgtcggcgccacgggctgctgggtgggcgccgttgcgtcgcctgcgccctcgtttgcggcaccggtatcggtgccggcagggttctgcatgccggagatgggcaccgtgggcacatcgctttccggcgccgcacggtttccgaaggccaggacgatcacgaggacgagcaggcccacgatgatggcgcccacgatgatgagcggcaaatacgagccgatgttcgccgcgatgcccggtgcctggcgcccttggacgaggttggtgtactggggctgcggagccgccctgcccgggcgggccgaggaaccgcccaagccggaacggccggagcgcggggagcccgcgtaatcgtctcggtaggagccccgagaggatccccggtcgcggctggagggcagcgcgaccgtgcgtccggcatcgcgggggcgctcgcgacggttgctcgccggacggcggcccgtctcgaactggtagacctcttcccggtaggcgcgggtgacctccgtggggttcagccccaccaggcgcgcgtaggcgcccaccatgttcgacgtgtagccgcgcgggggcatgcgggcgaaatcgccctcctcgatggcgcgcaggatatccgggcggatgcgcagcttgcgggcggccgtggacaaatcgagtcctttgcgctcgcgggcatgggcaagcgcctcgccgaatgatgtctgtctcgccacgatggtctcctctgtgttttccgttggccgttgcggtgcggttccgttccggcctattcgtcagcggcctcgaaggccttcagtgtttccagttccatttggtcgacgagcacctcgcgcgggcggcttccgttggccgggcccacgatgcccttttcttccaactgatccattatacgtccagctcgcgcgtatccgaccttcaagcgacgctgaaggttgctcgtggagcccaaatcgcttgaaaccaccacatcggcggcctcccacagaagcggatcgtcggcctcggagcccccctcccccgaaggcgaggagtcgcccaaggtcacgacgttggtcttcaggatctcggagtggtactccggctcgccctggctcttcaggtgtgccaccacggcgacgatctcgtcgtcggggatgtaggggccctggatgcggatgggcttggggtactccggcttggccaagagcatgtcccccatgccgatgaggttctcggcgcccgtggagtcgaggatgacgcgggagtcgatgcccgaggccaccgtaagcccgatgcggcaggtgatgttcgccttgatgaggcccgtgaccacgttggtggaggggcgctgggtggcgatgatgaggtggatgccggcggcgcgggcgagctgggcgatgcggctgatggagaactcgacctccttgcccacgttcatcatgaggtcggccagctcgtcgatgacgatgacgatgtagggaatgggctcgccgtaggggttctccggcggctcctcccccctcttctccgcggcctcgtcggcggcctgggccgcccgggccttctcgttgaaggtgatgatgttgcgcacgccgcacttcgagaacatcttcaggcgccgctccatctcggccacggcccaggaaagggcgctggaggcctcgcggcactcggtgaccacggggacgtacaagtgcgggatgccctcgtagggggcgaactccacgcgcttggggtccaccatgatgaagcgcacctcggccggggtcgcgcgcatgaggatggacatgatcatggagttcacctccaccgacttgcccgagccggtggtgccggcgatgagcacgtggggcatcttcgccaggtcgtggacgatggcgtggccctccacgtcctcgccgatggccacctgcaaaggcccggggcccgcagcggcgagcacgtcggggagatacaccatctggcggttgcggttgggcacctcgatgccgacgtagttggtgccggggatgggggcgaagatgcgcacgccaggagcggcgagcgccagcgcgatgtcatcggtgaggttggtgaccttgctcacgcgcacgccggagggcaggtccaccttgaacagcgtcaccgttgggccctccacccagccgaccacgctcgccatgacgccgaagtcctccagggtcccctgcagttcggcggctacgtcccgcagctcctcctcggtagagccgcggcgggcgccgccggtggcgaggagagtcatgggaggcagctggaagccgtccttggagatcggttgggcgggcgcctccttctttttcttgggggccgtcttcttgctcacgggcttcgtcttcgcggcctcgcgctcggcgacctcggcctcctgccggcgccgcccgagcttgcgggtcatgggagcggctggctccacggcggagatgtcctccacctcggccacctcgcgcggatcaggggcttggatgggcacgaggccgtccgtcttctgggcgcccagctgccgcgtgacggccgcatcggacacggtgtcggctgcagccccgcgggagcgccggcgcggttgctcgtccaaggagatgcgggcggtgggcgccccatgggctgccgggggcagatcggcggactcggccatggtcgtcagcggcggcttgcccctcccccgcctcatagatccgaaggcatcgggaatgagggaggcggcaccctcgccgtccaagtcgtagcgggcgcgcaccttctccagaaatgcggagatggagaatccgatgacgatgacgccgacgatggccaccccgatgagcaggatggcggagatggccggcccgaagagcgtgagccccacccaggcgagcgccgcccccacatagccgccatgggtcacgagcgcgatgcggtcgaacagggcggcaggtcctgtgccggtcgtcggcgtgaacagggcgatgatgccgagcagcgccacgaggatgagcgataggcccagcgtgacgcgcagcgacatgcgctccgactgcatgcggtacagaacggcgccgccgatggcgacgaggaagaagggcatgatgtagcagcccacgccgaagacgacgtggagcgactccgagaggaagtcggtcacgatggccccggccggagccgcggccgcgatgaacagcacaatgcccaaaatgatgaagccgacgcccacgatgtcgcggcgcgtgcggtcgtccaagatgcggggctcggcctccacggcgcggctgcgggccgcggcggatttgcgcgtgccgctcttcgacaggttccccgaggccttctgggcgctcgtcttctctttgttggtgctcgtattgcgcgccacggtgcctctagacctccagcaggttcacgacgaccatggggcgctgcttggtgcgctcccagagaagcgagagcagcgcgtcgcgggcggccttgcgcagttctttcacgcctccgtccttggaaaggcacttgcgcagggcgttggccacggtgttctcggcctcgtgggccagatagtagtcgtcgccgccggtaatgccgtgcatggacacctgcacctggccgacgagcttgcgatccttcatgttcacggccgcggccaccgaggcgaagccctggttgccgagcgtgttgcgctcgtccagcacgtcctgggaggtgtcgcccaccgaaaggccgtccacgtagacgatgcccgagggcacgccctcgccgcgctcgacgccccgggcggaaagctccagggagtcgccgttttcaagcacgtagatgttgtccgggtcgacgccggtggcctcggccagcttcgcgtgggcccgcaggtgcgtggcctcgccatggaccggcatgaagttcttcggcttcacgatggagagcatgatcttcagctcctcggccccggcatggcccgacacgtgcacccgcgcccggctcttgtcgtacacgtcggcgccgatcttggccagctggttgatgacccgggtgacggccttctcgttgccgggaaccggcgtggccgagatgatgaccgtatcgccctcctcgatctcgatggtcttgtgctcgccgttggcgatgcgggccagagccgacagcggctcgccctggctgccggtgcacatgatgaccacctgctcgggcggaatgcccttcaggtcgtaggcgtcgatgaggttgtcgtcggagatgttcaggtagccgagccgccgcgcgatgtcggtgttctggatcatggagcggcccgtgaccaccaccttgcggccgttcttcactgccgcgtcgcagatctgctgcatgcggtggatgtggctcgcgaagctggcgatgatgacgcgccccttggcctgagagatgatctgctccaaggtcttccccacctcggcctcggacggggtgaagttcgggttcgtcgcattggtggagtcgctcatcatgaggtcgacccccgtctccgagaagcgggccagggcgccgaaatcggtggtgatgccgtcgatgggggtctggtccagcttgaagtcgccggtgtgcaaaacgttgccggccgggctctggatgaacaggcccaccgcgccggggatggagtggttcacggcgaagaagtccaccgtgaagcagccgagcttgacctcgtcgccgggcttgatctcgatgagcttggcgttcttcacccggtgctcggcgaacttgccctcgatgaggccgagcgtgagcttcgtggcgtagatgttcaccgtgcggtcgagatccttcagaaggtagggcagcgtgcccgtgtggtcctcgtggccgtgggtgatgacgatgccgcgcagcttgtcggcgttctccagcacataggtgtagtcgggcaggatgaggtcgatgcccggatggtcgtcgtcgggaaacatcaggcccgcgtcgtccaagatcatgtcgccgttgcactcgaaggcggtcatgttcttgccgatggcgtcaagaccgccgagcgggatgatcttgagcttcgcgttcgggtccttgcccgccttcgagccgcgccgcggctttcggctgccggaggggacttccttggccgccgctgtctcgccgcgcgagagctgcgggcgcttgcgctccaggttcacacgcttgaaggaggtgttgttcttgcggcgatcgttgttgcgccggttggcgttcttgccgctgccgccctccgtgcggccgttctgcttctcttggttttctttggtcattcaatgcctctttctaaaggtagtaacgcgcaaaaacgccgacccgagggcatcgggccggcgtcgcatcttcaatggtggacgattctagtcaagaacaccgacctcgcgcatgatggaggccaggcgcgccgactgctccggcgtggcgtccacgagcggcaggcgcacgccgccgacggggaagccgacaaggctcagggcctctttcacgaggatgggattcgaggtctcgaacaggcccttcatgagcggcatcagggcctcgttggcctcacgagccgcatcccactcgcccttggcggccagatcgacgatggccttcatgcgatcgggcgcgacgttgccgatggtggagatgacgcccacgccgcccagctccatgatgtcgagggtggacgagtcgtcgccggagtacacgtcgaaaccggccggagcgttgtcgatgatgtacttgatctgctcgaagttgcccgaggcctccttgatggccacgacgttgtcgcagttgtgggccaagcgcagggtggtgtcgccctccatgttgatagagcagcgcccggggatgttgtacaggatgatgggcatgtccgtagaatccgcgatggtcttgaagtggcggtacaggccctcctgcggaggcttattgtagtagggcacgacgcacatgaagccatcgacgccctgcttggcggcatcttgggcgaagtacacggtgtcggccgtgcagttgtcgccgacgttcgcgatgaccgggatgcggccgttcacggcgcgcaccacggcgcggaacagctcgagcttctggggatagaacaccgtggggctctcaccggtggtgccgttgacgataagggcgtcggcgccgccgcgcacgagtcggtcggccagctcctgggcccggtcgagatcgagttcgaggtcggcgttgaacggggtgaccatggccggaatcatgcggccgaagcgaggatcgcgcttgaactccatggaagtatctccttaaacaaactcggggggcgtggctgccctagcacagctctattatgccatggttggctcgacggggaaacgcgagcgcccgtaagtccgtcaaacgcacaacctgcgcggataaggtgctgccctaagcaggcactgcccttgcgtctgttccgtaggggcagaccttggtctgccctggcgagcggaacggacatgcgagacaaacaggggcgaccaaggccgccccctacggatggtgcctgcgaacgaatgggggctgagtggctaattcataaagctctcgaggccgacgatgaggccgtcgcgctcccctacgctgcggatgccgaggaggacgccgggcatgtaggaggtgcggtcccatgagtcgtggcggatggtgagcgtctggcccagcgagccgaagatgacctcctgactggccacgaagcccatggaacgcaccgagtgcacgggcacgccctcgatgagcgccccgcgggctccctcggccccggcgatctccgtctcgcggccgggcgcctcgctcacgcggggggcgcgggcctccgcgatgatctctgcggtgcgcacggcggtgccggagggcgcgtccttcttgttgcagtggtggtactcgatgacctcggcctcggggaagtagggcgccgccgccttcgcgaactccatcatgagcacggcgccggtggtgaagttcggcgcgtagaacaaacacgtccccggcgtcgccgaggcggccagctcctccaacgtctcgttggaaagacccgtcgtccccaccacgcagtcgactccccgcggcagcgccaccgagagattgcccgccaccacgttcggctgcgtgaaatctacgagcacgtcgacatccgtcgcgtccagcgcctcggccagcgtgccgaacacggggaagggcgtctccttggcatgaggatcgataccgcagacgaccgtcatgtcgtccgcggcagtcaccgcatccaccaccgccgagcccatccgccccgcataacccgccaccgcaactttgatcataggaaacctcccatacaccagtcagattcaacaagaagcgtgaacgctattgtaaagcaacaacgtgagagcgaagaggagacagggggcgcctcgaccgagcgagttccgcagacggtatcgaaggcgcgaagattcagggattaatgcgttcggcgcgccttcgataccggcgaggactgtctgagcgaatcaaggtgccccctggcccctctccgggagagtcgcggcgtgaacttctgcctaagcaatccgaaccatctaggcatccccggtttctctttcgctggggcgttagggcagaccaaggtctgcccctacaggacggtgccggcgtagtggattccgctcgcaacaagaaagggccgcgattgcgaccctttcccaaagtgctagttgctgcttccgctctcgtggcgacgacgcggcgtgcggccggcgcggccgggacggttgtcctcccgacgctcgcggcgctcgtgacgctcgcccttgtcgcgcggagccggggatgcggaagccggcgcgtccggcttgtccaggcggtccagcgagatcttgccggtcttcgggtcgatctcgagcacttccaccttcacgatgtcgcctaggctcagcacgtcctccaccttgccgacgcggccgttggccacgcgcgagatgtggagcaggccgtccttgcccggcgtgagcttcacgaaggcgccgaagtccttgatgccgacgacctcgccctcgaagacctcgcccacctcgggctccttcacaatgccgaggatcatgtccttggccgcctgcatggcggtgccggagacggcgcccacgtggatggtgccgtcctcctgaatgtcgatggaggcgccggtctcctcctggatgccgcgaaccaccttgccgccggaaccgatgacgtcgcggatcttgtccacggggatcttgatggtctcgatgcgcggcgcggtctccttcatctcggcacgcgggccgtcgatggtctcaagcatggcggccaggatgaaggcgcggccctcgtgggcctgcttcagggcgcgggccaaaatctcgacggacaggcccttggccttgttgtccatctgcagggcggtgatgccgttaggggtgccgcagaccttgaagtccatgtcgccgaggaagtcctcgatgccctggatgtcggagaggatgaccacgtcgtcgccctccttgatgaggcccatggccacaccggagacgggcgcggagatcggcacgccggcgtccatcagggccaggcagcttccgcacgtggaggccatggaggaggagccgttggactcgagcacctcggagaccacgcggatggcgtaggggaaggtgtcggtgtcgggcagcacgggcaccagtgcgcgctcggccagggcgccatggcccacctcgcggcgcttcggcgcccccatgcggccggtctcgccggtgcagtagggcgggaagttgtactggtgcatgtagcgcttgccctcttcgggccagatggtgtcgaggcgctgccactcgttgagcattcccagggtgcacacggacatgacctgggtctggccgcgctggaacaggcccgagccgtggacgcggggcagataccccggcacgatgtgcagcgggcggatctcctcgggggtgcggccgtcgacgcgctcgccggtctcaaggatcatggcgcgcatggcccgcttctcgagggccttgagggccgccttgatgtcggagccccaggcggtgcgctcctcctcggtgaagtcgttctcgatgatggaggatttgagctcttccaccttctgcatgcgggcggccttgtcggcgtccttgagggccgcggacatctcgtcgagatgcgcgtcgacgcgctcggccacggacgggtcggcggcgtggatggtgtagtccatgggggtggggttcaccttggcgaggaaggcggcctgcttctcgcagaaggcggcgatggcctcctggccgaaggtcatggcggccagcatgtcctcctcggagatctcggcagcgccggcctcgaccatggagatgtagtcggcggtgccggcgatggtgagctccagatcggagttctcctgctcggagaccgtggggttcacgatgaactcgccggtctcgatgtcgcggccgatgcgaacgcaggcagcagggccgtcgaagggcgcgccgcccacgagcagggccgcggaggcgccggccacgcagatggtgtcgggcaggttctcgccgtcgatgacgaacggggtggccacgatgtgcacctcgttcttgtagccgtccgggaagcccgggcggatggggcggtccaccatgcgggccacgagcgtgccgtggtcggacggcttcgcctcgcgcttcaggtagccgccggggatgcggcccacggcgtacatcttctcgatgtagtcgaccgtgagcgggaagaagtcgtagtccttctcctggctggagacgacggcggtcacgagcacgctcgtggcaccgcaggtcacgagcacagcgccggtggcctgcttggccagctcgccggtctcgaggcggtactgcttgccgtacaactcgaattcttcgacaattttcgtcataacgcttttctttctcttcaactcccccgcctcattgcggaggacttcttcgggcgcggctacttacattcgccgcccccgcgaccgtcggcgcctcatgcgcttccgaccgcttatagcagaaaacggggccccaggcggggccccgtacatgctcgagctagatgttgtcgcggataccgagcttcttgatgagctcgcggtactcctcgatgttgcgctccttgatgtacttcagcataccgcggcgcttaccgatgagcatcatgaggccgcgacgggtgtggttgtccttcttgtgcgtcttcaggtgctcggtgaggttgcggatgcgctccgagaggatggcgacctgaacctcggcggaaccggagtcctgatcgttcttgccgaactccttgatgagttccgcggtgcgctccttggagatgctgagcttgctggccatagctggtccacctttctttcccggggtctcccccgtcttcgccgcgtgcgcggcctaccgtttccatccgtcttgggtagccatggaagtggtccgtgggaaccaaagacgaattccgccgctgttttggcagcctgcccagtatagggcacttgcggcgcggctcgcccaaggtttccgcgagcgacacggtttctgcatattggggctgggtgagcgcggcgaaaaagcggtgcgacactagaacaggccgcacgtgaagaggaactcgagggacttcagcgaactgccgatgtgggcgcggacgagatcttgcacgaggtgcagcacggcgaaggtgcccgtaaggtcggccggcccttctgcaatggcgtcgaaggggtttgtgaggaagtactgcgcccagcagagcgtggcggcatccacgagcacggattcgtccaaaccccggcagctctcgcagagcactccgccgcctgcggccgagaacgggatgcgggcgccctcggtgagggccatgggctcgtcgcagccgacgcagacctcgaggctcggtcgcaggcccgagaaggcgaggatcttcaacagctcggcggccgaaagcgccgcacggtggctgtcatcggcgccgtccatggcgtccagcacgcgcatcgccgactggaacaggcgcgggttggcgaggtcgcgctggctcatgcgggcgagcagctccgctacgggcgcggcggccgcagaggcctcgaggttgcagcgcaaggcgtcatgggccgcgacgagccgcgcctccttcagaatgtcgagacttcggcccgtcgcgcacagggcgtcgatgacgcaaaagggctcggtgcgcgccgcgaagctgctcttgggccgccgggcccctttggccacggcccgcttctggctgccgtcctcggaaagcagcgtgagaatgaggtcgctctcccccagcttcgtacggcgcagcacgagagcgcgcagggagtaggtcggttgcgccacgaagccgtcccgcgcctagtagcggatggaggggctggcgtaggagacctcgttgtcgtcgttccacacgatgccgccctcgatggtggtgagcttcttggcgaacaccgtctcctggcccaggccgaagggcatcgtgaccacctcgtactggcgcgcctccacggtgtagagcacctcgccgtcgccgcggtaggtgcagctcttgatgttctccaccttgaagctgccctcgtcgttggtgaggttggccccgggcaggatctcgcgggtaaggtccaccagctcggtgccgcgggagtgggcgacatacagcgtgacctcggagccggagttcagctcgctgccggcggccgggtcggtggagacggcagtgccctcctcgatgtcctcggtggtgtaccactcgctcgtcacctcgtagccctcggcttgaagcgcggccttggcgtcggcttcggacatgccctccacatcgggtacggtgtagggaacggccacggtgacggtgatggcgtcgccggatttcgcctccgtgcccgcttccgggctcacggccagcacggtgcccgcggcctcgttcgacttctcctcggtgtaggtgaccgccgtgaacccttcggcctccagagcctgggcggcctcttcgctcgtggcgcccacgatggtcggcacgatgcgcggtacggccacggagagcgtcacggtgctgccctcttccgcgcgatgcccctgctcgggatcgcttgagaggacggtgccctggggctcgtcggatttcacctcgacggcctgggcggcgaagcccttggccgacagagcatcggtcgcctccggctgtgaaaggcccactacctcggggatggtcttgccgccccacagctcggccatataggtgccacccgctacggccgccagcaccacggccagggcgatgcatgcggcggcgatgatcgggcctttggcgcgcgggggccgtgcggagggccccgggaagggagcctccgcatcggcgccatcgcgaaccggcgcggcctcttcgggcgccgagaaatctatggaagattccagctcaggggtttcctcctcgatggtcgaggggaaggccagctcgccggtggcccggggcgcgagcgcttcctcggcctcggcagtcgtgactgccgcctggtcggcgacgacaatggcggaggcggcctccatgagagccgtttcctcggcggcgcaagcgtcggccgactcattgggcgacgcttgcgccgcctcttgcaccaccggggtctccggagtcgcccccgcctcatcctgggtcttacgggagcgaccgcggccctgacgattcacggagggccgcgccgcatgggagcccatgcgcgccggacgcttgcccgaccgctcgaacaggctcactacctcgtccccgctggacagcacctcgtcgagatcgtcgtccttggcggttgcgtctgcagctgcgaagccggcgacggcgccaggaatcgcaccgaaggcgacaccggacgcatcgccagccttggaggcctcgttctcagcaacaggggcatcctcgccgggcgtcgtgaattcaggcgtttcttccatctcggcagtctcggctgccacggccgcagctgctgtcgcggcagccacccgctcttgctcaagccgctcgcgttcttcccgctcggcagcctcggcagcgcgccgggcctcgcgggcctcctcctcggctatccgccgctgctcgcgggcctcggcctcggcggcgcgcaaacgctccttctccgcagccgtttcggcgcgcaggcgctccttctcggcccgcaggagctccttggccttgcgggcctcctccttctcctgcatcttcgaaaacttcttcgcgagcttcttctgttggcggtcgcggcgccgcagctccttctccgtcggtcccatggcgtagctgcgggcgcgtggcacgtactcctcgttgatgcgcgggatctcggccgtgtcaccggcctgagtggccgccggcggaacgtaacttgagtcgaccagccgctcgaagccggacaggtcggggacatcggggccgtcgggcaccggatcgaccagatcggccaccgaggcccgcggcgccggtttggaaggcgccggggcgacgtcgggcacgcgcacgaccgggggcacctccaccacgggaggcaccgacactttcgccgaggcggccacgaacacttcgccgcagttctcgcagaacgcggcgtcgtcacgattatcgaatgagcagtgagggcatttcatcgacgttctcctcattgattgcacagataaggagaattgtacccgattattctgaatatagcccccatatccagcaacaacaaagttactggttcgcccaaggaagtcagcgagggtccgacaggtgcctaggccccttccccgtagccgaatcttcggatctggttggcgtctcggcgccagtttttgcgcaccttcaccgacaggtccaaaaacaccttcgcgccgagcagaagctccaggtccttgcgggcctcggtgccgatgcgcttgatggccgccccgcgcttgccgatgatgatgcccttctggctgtcgcgctccacgtagatgaccgcgtagatgcggtacaggttcggcttctcgaattccatctcctccacagccacgccgatggcatggggcacctcgtcgaagaagttgcgcaggatcttctcgcggatgaactccgccaccatgacctccagcggctggtcggtctccatgtcggccgggaaccacgccgggccctcgggcagaaggaactgcacctcctccacgaaggcatccacgttgcggcccgtctcggccgagagcgccaccatggcgtcccagtcgcagagcttctcggccgcctcgcgctgggcgctgatctcggcatcgctcgccaggtcggtcttggagagcacgcagatcttcgccgagcccttggcagcgcgcacctgggcggccacccattcgtcaccgcgcccgatgggcttggacgcatcgatgagcatggccacgacgtccacgtcctccaaagccttgatggcgctcgtgttcagctcctcgccgagggcgtcctggggcttgtgcaagccgggtgtgtccacgatgatcatctgcacggcgtcggtggtgtgcacggcacggaagcggtggcgcgtcgtctgggccgtgttcgaggtgatggcgatcttcttgcccatgatggcgttcagaagcgtcgacttcccggcgttggggcgcccgaccagcgtcacgaatccgctcttgaagtcaggattggtgggaaacgagccccccatggggttttcagcgaagtaggcgtcgagatccatgaaattcctttcgaagaggtggggcgtcgtgcgttagaggaggtcgagcacatagggcgcgaagacgatgagcccgacaattaccgagcccgctgaggccaaaagcaccgccccggccgccgcgtccttggccgcgcgggccagctcgtgccattcgggcgaggcgagatcgaccgccgactcgatggcggtgttcaccacctcggccgcggacacgacgatgatgcagagcacgatggcgagccaatcgacgcggctgatacccagagcgaatccggctgcgacggcggcaaggcccaggaccacctggatcttcaggttgcgttgggagcggaaggcgtaggcgatgccggcggccgcgcagcggaaggcgcacgcgagcgggaagcgcccctccccgcaacggcggctctcccccgctctgcgcacgagcggtctcatcttatcgtcgtcggccaacgggctgcccctcaagcgctcagcggttctcggagacagcgggcaggtcgcgctcggtccaggccgtgagcagctcgcgctcgcgggcctccatgacctcggcctcctcgtccacgatgtgatcgtagccgcacaggtgcagaagcccgtgcacgatgagcagcgacacttcctgctcgaaggagttgccaaactcggtgctctgacgcgcggccacgtcgggcgcgatgatgatgtcgcccagctcgtagaccgggcaactcggcccatcggcggcggtgatgtcgtcgtcgatgttgtcgcattcgaaggagagcacgtcggtgggtccttccatgccgcggaagcgctcgttcagctcggccatggccgtatcgtccacaaagctgatggagacctccgtgttgatgggcttcccctcgcgctcgagcacgaacagggccaggtcgcgaatgggaagggaggcgagatcctcctcgcgatgtccgtaggtgatgaggatttccatgggctatcttgcctttcccgccgcgcgctcgtaggcggccacgatggtcgccaccagggagtggcgcacgacgtctttgccggaaagatcgcagaacgcgatgtcgtcgatgccctcgaggacggagcgcacctgcacaaggccgctctccccgcggggcagatcgatttgagagatgtcgccggtgacgacgattttcgagccgaaccccaagcgcgtgagcgccatcttcatctgctcgggcgtggtgttctgggcctcgtccaagataatgaaggcgtcatttaacgtgcgtccgcgcatgaaggcgaggggggcgatctcgatggtgccgttctcgatgagggcatttgcccgctcctgatcgaacatggagtacagcgcatcgtagagcggccggatgtagggatccaccttctcgaagagggtgcccggcagaaaaccgaggttctcgccggcctccacgatgggccgcgacagcacgatgcgaccgacttctttgcgctttaaagccgccaccgccatggccatggccaggtaggtctttcccgtgccggccggccctatggcgaaggtgaccgtgttgtcgcggatggcgtcgacgtagtgcttctggccggcggtcttcggtcggatggcccggccccggaaggtgagcagcacatcgtcgcgcagggcggcgggctcgaactccgcctggcgcagcagctcgacggaacggtgcaccgagtcggtatcgggggcctgcccttcctccaccgttttgaacaggtcggcgaacagcgcggtgagctgctgcacctccacggcgttcccctcgatgacgatgcgatcgccccgcacggtgagccgagcgtcgaaggactcctccagcacgtggagaatctcgtcggaggcgccgacgacgagggccatatccaccccgccgggcgccgtgagcgttgtctgcatcaaatcagtcatgctcgctattgtaccctatgttgcgcgctgtgttgtgcgcctgctccaaaacttctcttggcgttccctctcaaacaaacttgacgctttgggcgaacaccgtagaacttcccagctatgcttcggtcgacgaaccccttcggttttgcatgagattgacggttatgagcgtctcgggggtgcggatttcgcgaagttgcgcacgtactgaagtaagtcaaagcgctgatcaggcatttcccaaagcttgagacacgaccgtgaagcaccgcattccgccgagacgctcatagccgtaaatctcatgcagaaacagcgatgtcagttagcagagaagagcgcaacgacataatgcttcaccttctccccttgtcgcacaacaacttccgaagatccagcaattatcgtaaatgtactggcacaagcgatcccgcgtctgcgcccgcaggggcagctacctcgtggtagctttcggtggtggctacttcgggggtttccacgagggcaagttctacggtgccggcgcgggaggcgcggtcggcggcggcgagctcatcggacagggcacgcaggcgggcggcacgggcggccttcacctccgggggcacctggtcggcgcgagcggccgcgggcgttccctctcgcttggagtagggaaacacgtggatcttcgagaagccgacgtgacggacgagcgcgcaggtgtcctcgaagtcctcatcggtctcgctgggaaagcccacgatgatgtcggtggtcagcgcgatggaaggaacgctggcacgtaggaagtcggccagctggcggaactcgtgggcgtcgtaggggcgcgccatctcgcgcagcacccgggacgagccggactgcaagggcagatgcaggtggcggcagatgcggccctcggcctcggcgaggagagagacgaactcgccagtcacgtccataggctcgatggagccgatgcggaagcggcagggaggctcgcctgcgccgtgcagatcggcggtagccgccagaaggcggcggcacaggtcggtcagatccgccccgccggcgtcgtaagagcccaggttgatgccggtgagcacaacctcacggacgccggattcagcgagggccaccgcctcggccaccacctcgtcggccggtcggctcgtcgcgcggccgcgggccacgtgcacgatgcagtaggtgcacgcgttgtcgcagccgtcctgcaccttgatgccgatgcgcgtgcggccatcggcgggcgatgccgggaaagattcaggcgtttcgcaaggagttgtgccgctcatttccaactcgctgagatagagatccgcgcctgccttgggtacaacaacgacgcgatcatccatagcggcgaagatctccgacgagagctcgctcgcgcatcccgtgacgacgacgcgtgcaccgccgttggtcgacagggcatggcgcacggccttgcgggtcttcttctcggcctcgccggtgaccgtgcaggtgtttacgatgatgaggtcagccgcagattctgccacaggagcacccccgcgctcgccgagcagccgttcgaaaccgtcggcctccacgcggttcaccttgcagcccaagttcacgaccgtgtagccgaatagggccctacccacggttgccctcgtaagtgggagacggccgattccccatcccgcccagctcgtagagcgcgagagccggggccacgatgccggctgtttcggtacgcaggatggacgggcccagcgtcacgaggcgcgcgcggccgttgcagccgagaagaagctgcacctcctcctcggcgaggcccccctcggggcccacgaccacggcgatgcgggcgtcggcgaccggcgtgcaggtcgcgaggagcgcatcgtgcacggcttcgcgcagactcgccgtctcgggcgcctcttcccagcacacgagcacggccgtcgcctggccgagcatcgcggccgcctcgcgcacggagacgggctcggcgacctccggcacccgggcctgccccgattgcatggctgcgtttttggcgatggcccgccaccgctccgtcttcgcagccgccttctttgcgtccagcttcacgatggagcgggcgcaggtaaggggaacgaaggccgccacgcctacctcggtggcatggcggatgacagtctccatcttgtcgcccttggccaggccctgcagcagaatcacctgcgggccggcctcgctcgcgtcttcatggcgcgcaatggaaacgaggggcaactcgtccgcaaaatcgacgatctcgcattcgaagtaatcctggtcggcgtcgatcaccgcgatgtgctcccccgtcgtcagccggagcacccgcgcgtgcttcgcgtcgtcggcctcaaggcgcagcgggaacactgcctccgtttcggcagcgagcacttggttttccagaaagaagcgcggcagcgacatgatcggcggccttattcgaaaatgtcgcggagcttctgcaagggcgaacgcttctcctcgttcacgtcctcgcccatttccgccgccagctcttccagaagttcacgctcgcgcttggagagcttcttcggcacctccacggcgatatgcgcgaacaagtcgccacgggcatcgcttttcaggcgcggcatgccgaagcccttcacgcgcacgatctggtcgttctgacagccctcggggatggcaaccgtgaccttctcgtcctcgtagatgccgtcgatttcgatatcggcgccgagcgccgcctgcaccatgggaaccacgagcttgcagtgcaggttgtcgccgtcgcgctcgaagaactcgtcgggggcgatgcgcacggtgacgatgaggtcgccggccggcgcaccctgcatgcctgcctcgccgaagccgtggatgcgcagctgctggccgtcgcgaatgcccttgggaatctccaccgagacacgctggcggtcgggcacgcggccctggccctcgcactcgggacacgggttgtcgatgaccgtgccggtgccgtggcaggcgggacaggtgctcgccgattgcatgtcgcccaagaaggtgtgctgcacggtgacgacgcgcccggtgccgtgacactcctcgcaggtcacttccttgccgtcctcgcccagacccgtgccgtcgcaatcggggcacggcgccaggcggtcgtaaacgatctccttcttctcgccggtcgccgcctctttcagcgtgatgcggatgcccacgcccatgtcgcggccgtccttgcgcacctggcgtccgcctgcggccgcgccaccgaagaaggtggagaagatgtcgcccatgccgccgaagccgccaccgaacaggtcctcgaaatcgatgccgacgccgccgtaggggccgccgccgctcgccgcgccgggaatcgtgccaaagcggtcgtactgggccttcttctgggggtcggacagcacgtcgtaggcctcgttcagctccttgaactggtcttcggcatccggtgccttgttcacgtccgggtgcagctcccgcgccctgtggcgaaatgctttcttgatctcggcttcggaggcgtcgcgggagacgccgaggatttcgtagaggtccttagttgcggccatgataggtgaatcttgcctttcttcgttcgctcttctgtgctcttggtaacgcgcggctactcgccgtgcagcgcgcactgggcggcgcggacggcgcggatggcgcgctcgtagttcatgcgggtgggaccgatgacggcgacgacgccctcggactcgccgcgaccgtagggacaggccacgatggagacgccggccagctccgaggcggggttctcgtgcccgatgcgcaccatgaccgggcccccttccgcggcggcctcgtcgaaggtgctcagcagcacgcggtcgtcctccagcacttctatgaccggcagcagggccttcgaatcgctgaactccggctggcgcagaagcgccgagacgccaaggctgtgggcgcgagcgctttcggactcgcccaagcattctatgacctcgtcgatgatgagctgcacgagcgggtcgctgagggcctccaccgtgccggcgtccatggagcggcgcacgtcgcgggccgagtgtccggcgagcacccggttcagcaggttctgggcacttgccagctcgtcggcggatacctcgtcggcgaaggtgaccgtgcggttgaccacctggccgtcctcggccaccacgatgacgatggcctgccagggcgaaagcgacaccagcgtgatctggcgaatacggcccgcgagcaccgagggcgccatgacaatggacaggcagttggtgagccgggcgagggccgccgaggtgcgctccatgagcgcgtccagctccgaggccgaggcgcgcagctcgtcgaccatggcctggtgcgggcgctcctcctcggccaatcccgacgagagcagctcgtcgacgaaggtgcggtaaccggcgtcggtgggcacgcgcccggcggaggtgtgcggctgctgaatgaagccggcgtcttcgagggcagagaggtcgttgcgcaccgtggcggggctcacgcccaggcggtgccgctcggtcagggtacgcgagcccacgggcagcgcgtactcgatgtagtcctcgatcagcacgcgcagcactctctggcgcctctccgacagcatatccgctcctctcgccttcccgcaccgtcccgcgcgccgggcgcggaaccttccgttgttgacgccattttagcaaccgcaaggcgagagtgctaatggaagcgcccatctcgacgcaagcgacacacaagcacaggtggaaggcggcccttcgggaacgattccataggggcggtgcttgcgccgccctcccgagcaagaaagattttcggcgttgaagaggggcgaccaagatcgccccctacgaaggtggtggtatgcgaagcagggacgatgggttggcttacggggcaagatcgaggaggcggccgtagagctcgttgccgcagagccagccggcgtcggtggggcgccaacggccgtccgcgtgcttgaccagaccgagagaggcgagttcgtcgaaggcggcaaggactgaaccggtttcagatccgggggtcatcgaccccgaagatgcggccgtgctcgcggcgtcgtcgatgaccgctgcggcccgcgccacctgttcgtcggagacgccgcgggccatgcgcatgccaagcatgaggtcctcggcggccatctgccgcgcgtccagatcgtccaccacctgtccgtcctgcacccgcatgcgccgctcggcgttctgggtcatggtgacggccgagcgccccagccccaggtagggcttccccgtccagtaggccgtgttgtggcggctctcgaagccgggcctcgcgtagctcgccacctcgtagcggtgaaaacccgcgtcctcgaggatgagtcgcgcctcttccatagccgccccttccacatcctcgtcgggctcgtccatctcgccccgcatgacggcacgatcgaagggggtgtgcggctcgatggtcagcggatacaccgacacgtgggccaccccgagggccaccgcctcccgcacgctttccgcgaaggactcagcgctctgacctgggatgccgcacatcagatccaccgatacgttctcgaagcgctcctgggccgcgcgcaccgccgcccgggccgcctcggcgtcgtgggcgcggccgaggatgcgcagcacctcgtcgtcgaaggactgcaccccgatggaaagccggttcaccccgagcgcccagatgtcccgcaccatgggcgccgtgagactttcggggttcgcctccatggtgcactcgacctcgggctcgagatgcatcgacatcgacagcgcataaagaagcatcgaaagccgccgcatgccaatatagctcggcgtccccccgcccaaatacaccgtctcgatggccccgagctttccctccctcgaggttcggcggatatccatcacgagcgattccacgtactcgtcaatggccggcgagtcccgctccaccgccgatgtggcgaaatcacagtacccgcaccgcctcacgcagaacggaatatgcaggtagagtgccttatagggatcgtaagccatgagggtcctctctttccgaccgagtagtccgacgctaggaggcattgcaaccgagcgagttccgcagatggtatcgaaggcgcagcgatgcgcggaaagactgaccatggcgccttcgataccagcgaggactgtctgagcgaattgcgatgcctcctagcgtcggacggacaaccctgatgcgagatggacagcaggaaatcggagcgatattggtgcgagacggacaaatcacgaatgctcccgggcaatctccagaagctcgtcgaacacggcatcgaagtcggccagggtcgtgcagtagttgatgcgcccgcgggcagcggcggcgccgggcagtcccgccatataccacatggcgtgcttgcgcatgcgcacgatgttgcgcccctcgcgatgggtgagcagctccgcatggcgacgcgccatggcaatacgttccccaaccgtaggcggtgcaggttccgcctccccggcaagcgcggcctgcacctgggagaacagccacgggttgccctcggcgccccgggcgatcatcaccgcgtcgcagcccgtctcggccgccacggacacggcatcggcgccccggcggatgtcgccgttgcccacgacgggcacggacaccgcctcgcgcacgcgagcgatgacgccccagtcggcactcccccggtacagctgctcggcgaaccgcccgtgcaccgtgaccccgtcggctccggcctcttccatgaggcgcgcgaaagcgggcgccgtctcgtcgccttccgcccagccccgccggaacttcaccgtgaccggatgctccacggccctcttcacggcccgcacgatggaggcggccagcgcgggatccttcatgagcgccgagccgtcccccttcgacacgatcttgcgggcgggacatcccatgttgatgtccaggtaggccagtccctcccccatctcctgctcgatccaggcggcctgggaggccatgacgtccggctcgtggccgaacagctgcacggccacctgggactcgccgtcggccagggccagcaagtggcgcgtcttctcgttggcgaaggagagccccttggccgagaccatctccgtgaaggccatatccgccccggcctcgcggcacaaggtgcggaaggcgatgtcggacacgccggccatgggcgcgagcagcactcggtattttccgaagagcccttccacgactaaagaatcccgaacagcaaaagcccgatgagcacgatgaagcccagcacgaacagaaggcagccgatgcccacgaaggtcttggacgtgccgctcatgcccatgcgctcccgctcctcggcgatcttcttctcgtcgaagggatcgttgatccaatcgtagtcttcttttggttccctgctcatcggtgcttctttcgactgctgcgtttaacggtgtagaatgagcatagtttaatggatgcgtgccgaggacgcgtcgagatcacaagaagaggagacgatcgtgaaggtactgctcatcaacgggagcccgcgctggaagggcaacacgaaccgagcgctggaggaagcggccgcagcccttgaggccgagggtgtggagaccgagcttgtctggatcggcaacaaggagatccgcgggtgcatcgcctgcggcatttgcggcaagaccggcgagaagcgctgcgtgttcgccgaggactgctgcaacgagctcatcgccaaggccgccgagtgcgatggcttcatcgtggggtcgccggtgtactacgccggtatggccgggttgctgcgggcgctcatggatcggatgttctacgccggcggggcgaacttccgcttcaagcccgccgccggcgtcgccgtggcgcgccgggccggggccatcgaggcggccgaccagatcaacaagtacttccagatcaactgccagcccctcgtctccagctcctactggaacctcgcctacgggcgcacccccggcgaggcggaaggcgacggcgagggcttgcacaccatgcgcgtgctgggccgcaacatggcctggatgctcaagtgcatcgaggccggccgcgccgcgggcattaatgcgccggagatggagcccaaagtcatgaccaacgtggtacgcgaggatctgctgggcgaatagccctcttgcaccgcacacaacccgtagagggcgaccttggtcgcccctcatcagtgaggtactcatacgtgaagagggctgaccaaggtcagcccctacggagaatatcccggcagagaggcagctcctactcgtccaccttcaggatcgccataaaagcctcttggggcacctccacgttgccgatggccttcatgcgcttcttgccggccttctgcttctccagaagcttgcgcttgcgggtgatatcgccgccgtagcacttggcgagcacgtccttgcgcttggccttcacggtctggcgcgcgagcaccctacctccgatggccgcctggatgggcacctcgaacatctggcgcgggatgatctccttcagcttgtcgcagagcacgcgcccgcggtcgtaggccttgtccttgtgcacgatgaacgacagcgcgtcgatgggcttgcccgaaagcaggatgtccagcttcacgagctgcgagggcttgtagccgtccatctcgtagtcgagggacgcgtagcccttcgtgttcgacttcagcttgtcgaagaagtccaggatgagctcggacagagggatctcccagagcatctcgacggtggtctgggagaggtagttcatggtgacgaagttgccgcgccggcccacggccaggtccatcacggcgcccacgtagtcgggcgggatgaggatcttcgccttcagatagggctcttccacgtgatcgatggagccggggtcgggcatctcctggggcgagtgcaaagacaccatctcgccgcccttgaggtacacgtggtactccaccgaaggcgccgtggccagaaggtcgagcccgaactcgcgctccaaccgctccttgatgacctccatgtgcagaaggcccagaaagcccacgcggaagccgaagccgagggcatgagaggtctcgggctcccacacgagcgccgggtcgttcagcgacagcttctccagcgcctccttcaagggctcgtactggtcgccgtcgatggggaaaaggcccgtgaacaccatgggcttcgcctcgcggtagccgggaaggggctcgttcacgccgccgtcggccacggtgatcgtgtcgcccaccttcacctggcttacatccttgaggcccgtgacgaggtagcccacctcgcccacatagagtgcctcctcgggcacctcctgggggtgccgcgcgcccacctcttccacgaacgtctccgtgcccgtggccatcatgcggatcttgtcgcccttcttgatgtgaccgtcgaccacgcggatgagggccaccacgccgcggtaggcgtcgaagtagctgtcgaagatgagcgcgcgcaagggggccgcgccgtcgccctcgggggccgggatgttgtagaccacggcttccagaagatcgtggacaccctcgccggtcttgcccgaggcgagcaccgcgtcgtcggcgggaatggccaggccgtcctcgatctcggccttcacgcgctcgggctctgcggccggcaggtcgatcttgttgatgagcgggatgatctccaaatcggcgttcatggcgagcatcgcgttggccacggtctgcgcctccacgccctgggtggcgtccaccacgagcacggctccgtcgcaggcggccaggctgcgggagacctcgtaggtgaagtccacgtggcccggcgtgtcgatgaggttcagctggtaggtctcgccgtcgtcggcggtgtagctcacgcgcacggcctggctcttgatggtgatgccgcgctcgcgctcgatgtccatggagtcgagcagctgggcctgcatgtcgcgcttggccaccgtgcccgtaagctccaggatgcggtccgagagcgtcgacttgccgtggtcgatgtgcgcgatgatcgagaagttgcggatatgggaaagctcgtgggtcataatgtctttcttatcggcggcggtcttaccgggcgagcgggcccgcgaggcccctctcccctcccaatgtgtgcgtctcgcgaagattcggggccgcaagaccactttcttcgccgcgctcacgggaatctttggtattctaccgcattgtgtatccagcgatacgtgcacgcggtgattccaccgccaaatctgcagacgtggctgcgctttaagattacggttgctggcggctttccgaggcattcggcctcggggctgaggaagcggagaaatcccgccgctttccgattcgcacgatggcccgcagcggggtataccgccgcgcgttcgtgtcgttggataccaccgaagatgggaaacgaccgaaccagaaagggctagcattcatggctaacatcaagtcccagaagaagcgcatcatcaccaacgagaagcgccgcatgcgcaaccgcgccgtcaagagcgagctgaagaccgccgtccgtcacgtcaaggacgccgtggccgagggcaacggcaaggacgcctacgccttcgcctgcgaggcctgccgcctgatggacaaggccgcctccaagggcgtcatccacaagaaccaggccgccaaccgcaagagcggcatcatgcgcctggccaacaccgtggtgaccgtcgaggatatcgccgcctacgagaagccggcgccgaagccgcagaagaccggctccaagaaggccgaggccaaggccgcccgcaaggccgccatggccgccgcttctgaggagaaggcgaagcgccgcgagaagcagctgaaggaggagaagaaggccgccgagcgcaaggccaaggaggccgaggaggccgccaaggccgaggctgaggccgctgccgccgaggctgaggaggcttcggccgaggaggccgccgagtaggcttcctccccgcttcgcgcatttcgccgcaagccgagcgccgccccggatgggacggcgctttttgtttgcgcggaaccaccgcgcagatcgatcccgtaggggcagaccttggtctgccctcctcaagcgcgaacatcccacttgatgaggggcgaccaaggtcgccccctacggatcaacctgtctacaggtcgatggccactgttgcatgagcgcggcctttatttacaatgggaaacgagatacgaaaccgcccgatgagggtccagcgcggaaggaaccagcatggcagagacgatcggagcccgcgagcgtgggcgcattacgcccgacgagggcgcggtgctggcggcggagacggcccgcaatgccgatttcggcaagccggtgctcatctaccccaatctctacctggtgcgcgtgccccttccccacaatccgctgcgcgccctcaactcctacttcattctggacgacgacggcaccaccaccatcgtggacgtgggtttcaaccaccctgactgcgagcaggcgctcgacgacgccctggccgccctcggccgctcttgggacaaggtgcaagtggtgctcacccattcgcaccccgatcacacgggcaacctcgaccgcatttggcgcgagggcatgccggtgctcgcgaaccttcactcgttccaggaggtgaagaacctcatggagatagaggacaacgtctacggcccgctgctcttgcaggcggccaccttggagcagcagcgtgacctgaccttcgacgagaaggggccgcggctgcacgtgtcggcggagcttctgccgctttccacctatccggtcatgacttatctggccgacggcgactgcctcaaggtcggcgagttcgagttcgaggtgatcgagacgccgggccacgacccttggcacatctgcctctacgaggcggcgcacaaaatcctcctctcgggcgatcatgtgctggagcgcatcacaccgtcggtttcctcgtggtttccggcctacaacgccctggcggagtttctggagagcctcgagaaggtgggcggctacgatgtggacctggtgctcccggcccacggcaagccgttcaccggcatgcgcgagcgggtcgacttcctcatcgagcaccaccacaagcgcctgaaggagatctacgagctggtggccggcggccacgacgacattgttcagatttcccagcatgccacgtggcgctaccccgattggaagagctggccgctcgatcagaagtacttctccatgggcgagacgctggcgcacctcatctacctcgtgcgcgagggacgcatcctgcagggaatctgcggccacgagtactacttccgcatgccctacgaccgcaagaacctggccttggcgccggggacggctagctagcgcttgagggtttccacgagccagcggtagaagacctcgtcgggatcgctgccgctcttcatggcctgctcggcgtcgcgggaggaggcgagcgcccggcgcagctcctcgggacgccattggcgcgcccacgcgccgtggttcttcacgcgccagtcgggcgcgccgagggctttggcgagaccgcgcgggttgccgcgacgggccattgactgggccgccatgagctcgcgaaggcgcgtggtgcacagggcgatgagcacatggggcgaggtgctctccatcttcgctctcagggcgaggcatttaccgaggttgcgctcggcgaaggccgccgtgaaatcccatggcttcacctcggaggtgcgggccacgagtgcgcgcacctcgcgctcccccaccccatcggccgtgccgtgagccagggcgatcttcttcagctcgttgtcgaggtgcacggtgttctcgcccacgagctccaccagagccgaggccgctccctcggtaagcgtgatgccgtgggtgcaggccatggcgcggacgcgcttgggcagctcccagctcttgggcggggcgcagtcgatgacggccttggggcccgcggcggcgagcgccttgtacagcctcgtgttcttggcgagcttctccgcctcgcaggcgagcaccgtggtggcgctgggggccttgaggtagttgacgagctcctcggcgtcggcctttttcagcttgtcggcgttgcgcacgtagacgaggcgcacgggacttgcgaagggcatggtgttgcaggcggctgcgatggcggcgccctcggccacctccccatcgaactcgtcggagttgaaggacaaatcgcccatcgtggccaagcgcgccttgaggcgagcgatgaccgcctcgcgcttgagggcgtcctcgcccacggccaaataggcgggaaggagatcggtatgttggctgtcgctcatggccccattgtaccccatcgctactgcatcccctacctttgggtggagaccgtgagcgtatcttcggaaaacgccacgaccacatctcccgactcgtcgctgcagtaggtggcgcacccggttttctcaaggaagtccagcgtgttttgcgaagggtgaccgtagcggttggcctcgccgacgccgatgagcgccaccttgggagacaggcgctccgccaaagaggcatcgaggctctttttcgagccgtggtggcccactttcagtacctccaccccgcttgtgggcagcttgtcggtcagctgatccagctgctcggcctcggcgtcgccggtgaacagggccgtccactccgccgccccgtcgccatcgccgtcccaggaggcgagcaggcagaggctgtcggcattgccgccatcgtcggccaatcgctcgggccagagcaccgttatcgagaatttgccgcagcgcaccgtatcgcccggcgacagctcgacgagggcgtcggcgagtccctctgcccgcgctgtgtccatgagctccgagcatgctttgcaagagcaggcgggaagcccctcgggcaccagcagcgccgatgcgggagccacatccccgagcacggaaagcgatccgcagtggtcgtcgtcgctgtgggtgacggccacagcgtcgaggcggcccactcgctggcgcgccagggcggccttgagcagggaatcctggttgccggtgtcgatgagtagcgcgctcgcgccgcttcgcacgagaaacgcgtccccctggcccacgtccagcatgacgatggcatcggtgggcatgccgaggggaaggcgtagcacgaaaagcgccaaaacggccgcggccgccgtccccgacagccccccgatgctcactcgcggccaccaggcccacaacccgatgcagagcgcgccggaaagcacggccgccgccagaggcgcggcatcgatgggcacgcatgagccctgtagcgaagcgagggcgttaacgacggccgagagcggggcgcatgccagggccgccgcgccgatgagccccggtgccgcagcgggggcaaggcatgcgagcagtacggcgacgaacccgacgaggcacgccaaggaaaacagcggccccgctaccaggttggccaacggcgacaggagcggcagttgagagaagagcgccgccgcatagggctgcgtcgccagggccgaggagccggtgagggcgaggggatcgcccacgaccttcttcaatcgagggagccccgcgaaggccgaggacagcagcggtgcgaatagaacgattcctagggtggatcccgccgacaaggcgaaggaggccgaaagggcgcaggctggatccgcccccacgaaaagcagaaggcacagccccaatgcgctgagcgccgaattacggcggttggcccagagcgcgaacagccccgtcgcggccatgaccgccgctcgcagtgccgataccggcatcccggtgaacgcgacgtagccgacaagaaacagggcgctggccaccgtcgtcgctttgcggccgagccgcagcagcttcaatcctcccgcaacgaacagaaccacaatggagaggtgcgcccccgataccgccacgagatgggccagccccacggccttgaagcaatcgtagagccccgattcctcgatggccggcctccaaccgcacacaagagcctgtagaagtggcgcattgtctcccccgcacgcggcgatgagatccagggcgcatcgccgcagatggacaaaggggccgctatcgagcgctgcttcttccgagacaaacgcgctttcgctcgcggtgagagagccggccagcccggtgtcccagtagtatgctgccactgcctctgcgggcggcttgagcgttccggatgccgtcatagactgcccttgcagcagcgccgcatcctcgggcaggttaagccgcacccgtagcacgcggccatctgcgccacgaagccgcgcctcggcgtgccatccgaaatctccgcgacgggcatcctcggtgagctcggcgtgccaggtcaccggcgccgaatcgcctccctgcgcctctgcgtaggccatagagccgcgaagagcgccgccccaaaaggagcaaagagccacggcagcggcgagggagagcgccgccagagcgccgagcgagaaaccgtcgcctcgggccgcgcgcaaggcatgggatgccagccacacggcagcgcccagcgcaagcatccccagtacgggaaaggccgcggtgggcgcaaggcgcagggtcggccaaatcagcgccgttgcagcccacaggacgagccctgccaccagcaggggcggcagaaaggggcgcggcggcctgctgtcgagatcgcccgtcacaggcagagccgatcccgcatggccgcgagcttcttctcgccgatgccggagacccgcgtcaaatcgtcgatggacgaaaacggcccgttcgcctcgcggtcggccacgatcttctccgccgtcgccgcgccgatgcccttgagcgtttcgaattcctcggccgtggccgtgttgatgttgaccatcccgtcagcccctgaggaggacgcgccttccccagagccctgcgcgccgccggaagctgtcacggcgcccccatcggagggagtcgcctggctctcgctgcgggaggggatgacgatctgctggccgtcctgcagctcctgggccaagttcaccgcatcggtccgcgccttttcggtggcgccgccggccgccgtcaccgcatcgatcacccggctgcctgcgggcagatagtagacgccgggcgatgccacgcacccgtcgacgtgaatgcacagctgccccgtcccatcgccgctcgaggggagcaccacgttctcgacgctttggcccgacgcggccttctcggcgtcaccctcctcgccttcgacggcttgcaccgcttcgttgccagcgtcccccgatacgctcgccgaggccgcatcctgcgccctcacctcgaatccgccgctgagcgaagcgcagaaggcgtaccctgcgagtacgatcatgagcaccagcgccaatgccacagcgacgaagaccgaccggggcacgcgacccagatgcaatttctccgcgagcgattccgcacgatcttgaaaggccatgatctcctccttctcccgaattggaaaaaggatacgagcacacgaccgtatttatgacgcgggaatgtctcgatccgttccccgcgccgaccgtggtcgcgtcccgcctctgtcccaatcctcatccctcggtaccatccgcaggggcagaccttggtctgcctcgcgagtggaacagaggcgcgtgacaaaaaaggggcgaccaaggtcgccccctacggagaagcgcgattgagacacggaaatccgaagctctctatcgtcgggatttgctgggcggcttgtaggccgggcaggcgtagtcatggggctcggccgcatcggcgagggcggtcacccattcctccacagggaaagcggcctcggcctcgcgcaccgcctccagcttcgcgtgggtctcggggttgcgcggcatgaacagtgtgcagcagtccggcgcgtccatggacgagatctcgaaggtgcccagctcctgggccgcctcgatgatctccagcttgtccgagccaatgagcggccgcaacactggcaattccaccgcgtcgttcgtggcgcggatgttgtccagggtctgcgaggccacctgccctaggctctccccggtcaccagcgctccggccccttcccgccgcgcaagctcctcggccacgcggaacatgaggcgccggtacaggatgacccgcagagagggtgggcaggagagggatatctcgcgttggtagtcgccgaagggcaccacgtagacgcgcccgatgcagccggtgcgctcgagcacgtgcgcgatgtcgtccacgaggtactccgaggcgtcggaggtctgggggcgtcccgagaagtgcacgccgatgggcacggccccgcggcgagccatgcgccaggtggccacgggcgagtcgatgcccgaggacagaaggcacaccaccttgcccgacgaacccacgggcaggccgccgatcccgcggacggaccgcgcgtacacgtaggcggtgccctccacggcctcgacacccacggtgacgtcctggcccttcatctgcacccgcttctcggggaaccgctcgcagagcacctccccgatgtctcggttcatctgcatggagtcgatggggaacaccgtgtggttgcgccgcgcggacaccttgaaggtggagaagggctccgcctcggccagggcgatgcaagcggcgcgccccatgacctcgatgtccagatcgcacttgaagccacaggatgcgcgggccacgccgggcacgcccagaatggcatcggtgcactggttcgctacctcaagcgtggttccctcccgcaagaagacgagcaggcgcccggagatgcggtggatggtgacaacgggatacgcgccaagaagcgcctccaggttcttctgaaggcgcttctcgaatactccgcggttgcgtcccttgagcccgatctcgtgataatgcacgagaatgattctctggaactcttccatttagtggtttttcacgtcgatcgactcaggatcgtacgaaacctcgccacgggcgatctcgttgaaggccatggacaagggcttcgtatcggcggcgtgggcgatttccacggccgtctgcagctggatggcgcgatcgcgctggccgcgcatcatgtcgttgatgtcgtgggcgcgcttggaagccagcgcgcacagaagaaaacggtcgttgtcggtgcggtcaagcaggacgtcgatcttcggttcgataatgctcatagggcggatatcctcttactgttgctcggcgatttcgttgacgtaagcgacgagctggcgagtggcctcgtccaaatcgtcgttcacaagctgataatcatactccattttctgggaaagttccaccagagcggtgcgcatgcgcatatccaccacgtcatcggtctcggtgccgcgcccgcgcaggcgccgctccagctcctcgagcgaggggggctcgatgaacacgaggtgcgcctcgggcatcttctcgcgcacctggagtgccccttgaacctcgatctcgaggatgacctggcgtcccgccgccatctcgcgctccaccgaggcgcgcggggtgccgtagcagttgccggagtactcggcccattccagaaagccgccctcctccgccaggcttaagaactcctccttcgtgaggaagtaatagctgacgccctcctcctcaccgggacgagggcgccttgtggtggcggagacggacaaccaagcgtcgggcacttcctcgagaagacgcgcgatgagagttcccttgccggtcccggacggaccgcttacgacgaagaggtttccgtgtctcatgaattcctttgtgacgttgacgttctacttggacaggcgcgcaagcagagcctcgcgctgacgctcgccgataccgcggatgcggcggctctcggcgatctgcagctccttcatgatgcgctcggccttggccttgccgtacccgggcagcgtctcgatgagcgtggaaaccttcatacggcccacgacagggtcgtcgcgcatatcgagaacctgagcgacggtgagcttgcccgtcttcagctcttctcgtacctccgcccgcttgatgcgtgcggcctttgccttttcaagcgcttcagcgcgggcctcggggctgagttggggaattgccatttctgttctccttccagtttgggctgagggcatagtaccacgcattgatgaggaatcaacacctaatttactcggaatcaataaatgcggcatttttccccaattatcggctatacacgggccttattcagggataaaacgctttggagctactccaattccgcggcgagggcctcgaaggccgccacgggatcgtccgcctcggtgatgggccggcccaccacgatgtgcgacgctccgttcgcgaaggcctgggcgggcgtggccacgcggctctggtctcccagggcggcgccggccgggcgcacgccgggggtgacgatgaaggcgtcggggcccaagatctcgcgcagggcggccgcctcctggggcgaggccaccacgccggagatgcccgcctccttggcctgggccgcgagggccgccacctgttcgggcaggggtcgggcgacgccggtggccgcaagcgcctcgggactcatggaggtgagcaccgtgatgccgagggtcgccggcacgtccccgccgtactccgccgcgccctcctcggcgccgcgctggcccgcctccatcatggcggtgccgcccacggtgtgcatggtgagcatgtcggccccgctggccgccgccgagcgcgccgcgccctgcacctggtgcgggatgtcgtggaacttcaggtcgaggaacacgttgaaaccgcggcgcttgaacatcttcacgatggccgggccctcggcgtagtacagcgtcatgccgatcttgagccacttcgcgtggccctccagcttgtcggcaagggctatggcctcccaggcgtcgcagtcgagcgccacgatgacgcggtcgcgagcaggaatggaatcgaaggcggttagcattgcagggctcctatcagctcgttgacgtctttgacgccctgggattcgcagtagtcgatgatgccgtcgatgacgtcgacggtggcggtgggattgacgaagttcgccgtgcccacggccaccgcggtggcgccggccagcatgaactccacggcgtcctcgccggtggatatgccgcccatgccgagcaccggcacggaaacggcctgggctacctgccacaccatgcgcagggccacgggcttcacggccggtcccgaatagccgcccaccacgcgcgccagcttcgggcggcgggtgcgggcgtccacggccatgccgagcagcgtgttgatgagcgagatgccgtcggctccggcggcctcggcggccttcgcgatctcggtgatatcggtgacgttcggcgtgagcttcacgatgagcgggcgcttcgtagcggcgcggcagagcgacaccaccttctccacgctgggcacatggcagcccatggtcatgccgccggcgtccacgttggggcacgagatgttcacctcgtaggcggccacgggggcttcctccaaggcctcgatgacagccacgtactcgtcgaagctgtggccggagacgttcaccatggccgtggcgccgatctcggcgagccacggcagctcgatgtccttcaagtgctgcacaccggggttctgaaggccgatggagttcaacatgcccgaagccgtctcggcaatgcgggggcttgcgttgccctcccagccgttcaaagacacgcccttggtggtgacggcgcccagggccgccacgtccacgaagtcgtggtactccatgccggcgccgaaggtgcccgaggccacggtgaccgggttcttcatggccatgccgccgaggttcacgaacaggttgacgctcgtctctttcggtttgcgctgcattaccacaccacctcgctcgcacagaacaccgggccgtccacgcaggcgcggcgcttgccagccgtcgtatcgaccacgcaggacagacaggcccccacgccgcaggccatgcgcctctccatggacacctcgcagaacacgccggccgcatccgccatgccggccacgatcttcatgaggggctccgggccgcagcaggccacgtagtcgtagggcgcgccttccgcagcggccgccgccagggcctcttccacaagcggcgtgcagaagccggcgcggccgtaggtgccgtcgtcggtggagcaggcaggctcgcacccgagcacggccccgtagcgctcgcgggccacgagcgcatcgatggtggaggcgccgagaatagcatcggtggcaatgcccgccgccgtcagctcctcggccaaggggtacaacggcgcgctgcccacgccgccggccacgatgagcgcgcgcttacagccctcgggcggctgccatccgcgaccgatggggccgatcatctccaccgcgtcgccgaccgcgagctctgtcatgtgctcagtgccgaagccgagcacctggtacatcatgtccaccgtgcccgcctccgcatcggcggcgtacacgccgaaggggcggcgcaggatgtgggcctccatgcccggcaccttcacgtgcacgaactgccccggccgcgccgtcgtcgcgatttccggcgcgcgcacggtcatgagccagatgttgcaccccatctcctcgttcaccagaatgggcgcgttctcgttgcaaagcgtcataggctctcctgtcgcgtcagcggaaaaatgcatttgatgatattctaacgcatggcatattggttatcgaattcgccatgccacaaagagcagaaatcctaggagatttgcatggaggagtagcctcttgctttgctgctcctccgttaagcttagaactacagctcctgcaagggggcgacgtcgagctcgccggcgcgggcggattgcatgccggctatgagggcctgggcggcggcgagcgtggtggcgtaggtgatgccctggcggacggcggcgcggcgcagctcgtagccgtcgtcgcgggtggccacgccgagcggcgtgttgatcatgagcgagatctcgccggcggcgatggcgtccaccaccgagcttgccccctcgtggatcttgccggtcacctcgcagggcacgcccgatgcgcgcagcacggccgcggtgcccttggtggccagaagcgagaagccgaggcgcacaagctcccgcgcgatgaaggccacggcgcgcttgtcctggtcgttcacggagatgaaggccacgccaccctccggttcggcgtagtcgatggccatctgggtcttcatataggccgccgggaaactttccgcgatgcccatgacctcgccggtggaacgcatctccggccccagtagcgcgtcggcccccgggaaccgcccgaagggcatgacggcctccttcacgaagtagcggcccggcttcgcgaaatgctccggaaggttgagcacggccagcttctcccccgccatgatgcggctcgcgagcttcgccaagggcacgcctgtggccttcgagatgaagggcaccgtgcggctcgcccgagggttggcctcgatgacgtagacgaccccgtctttcacggcgaactggatattcaccaggccgcgcacgcccaaggccagcgcgatccgacgggcgacgctcgccatctcgtcctgcaccttcgccgacagcgagaagggcggcaggcagcaggccgagtcgcccgagtggatgccggccatctcgatgtgctccagaatgccgccgatgtacacgtcctcgccgtcgcacagggcgtccaggtcgcattccacggcgccttccaggaacttgtccaggtataccgggtggtccggggagacggccgtcgcctcggccacgtagcgggcgagcccctcatcatcgtagacgatgcccatgccccggcctccgagcacgtagctggggcgcacgagcagcgggtagccgatctcgcgggcggcggcgcgggcctcatcgagccctgcggccatggccgagcgcggataggcgatgtcgagggaatcgagcagcgcggcgaaccggtcgcggtcctcggccagatcgatggcgtccgggctcgtgcccatgatgggcaccccggcctcctccagagcacgggccagcttcagcggcgtctgaccgccgagggtgaccacgacgccgtcgggatcggtcgcgtcgatgacgtccatgacgtcttcgtaggtgagcggctcgaagaacagcatgtcggaggtgtcgtagtcggtggagaccgtctcggggttgcagttcaccatgatggtctcgtacccggcgtcggccagcgcgtagctggcgtgcacgcagcagtagtcgaactcgatgccctggccgatgcggttggggcccgcgcccaggatgagggcgcgcgggcgctccttggccgccacctcggactcgtcggcgtcgtaggtcttgtagtggtaggcggtcttcgtggggaactccgccgcgcaggtgtccacagtcttgaaggccgggcgcacgccgaggatcttgcggcatgcgcgcaccgtgcgctcgtcggaccccgtgagcacgacgatctcggcgtcggagagcccgtagcgcttcgccatttggaaggcctcggcgtccatgtcctccaaggcgcacccgcgcagggcctcctgcacggccaccatatcggccatgcgcgcgcagaagaacgggtcgatggccgtgcgctcgtgcagctcttccgcgctcatgccccggcgcagggcctcggccgctaagaagatgcgctcggccgtggggcgcgagagcgcggcgaagagctcctcgtcggaaagcgccgcctcttccccgcgcccgtcggccccgaaaccggcgcggcccgtctccagggagcgcagagccttccccagcgcctcctcgaaagtgcgcccgacggccatgacctcccccacggccttcatgcgggtggtcagcgtgtcgtcggccccttggaacttctcgaaggcgaagcgaggggccttcacgacgcaatagtcgatagagggctcgaagcaggccggcgtggtgccggtcatatcgttcacgatctcgtcgagcgtgtagcccacggccaggcgcgccgccgccttcgcgatgggaaagcccgtggccttcgacgccaaggccgaggagcgcgacacgcgggggttcatctcgatgatgaccatgcggcccgtctcggggtgcacggcgaactgcacgttggagccgcccgtggccacgcccacgcgctcgagcaccgccagcgacgcggcgcgcatgcgctggtactccaggtcggtcaacgtctgggccggggccacagtgatggagtcgccggtgtgcacgcccatgggatccaggttctcgatggagcacacgatgatgccgttgccggccgcgtcgcgcatgacctccatctcgtattccttccagccctcgatggactcctccacgagcacctcgccggccggggaaagctccagcccctgggagacgatgcggacgagctcatcctcgtcgcgcgcgatgccgccgccggcgccgcccatggtgaacgacgggcgcagtaccacggggaacccgagctcgccggcgatgcgcagggcgtcttccacggagtaggcgtagccggcccgcgagacctcgatgccgaggtcggccatgcactcgttgaagagtttgcagtcctcgccgcgctcgatgacgtccacgtcgcagccgatgagctccacgccatagcgctcgagcacgccggacttggccagttccacggccgtgttcaggcccgtctggccgccgagggtgggcaggcacgcatcgggccgctccttcgcgatgaccttttccacgaaagccggtgtaatgggctccacgtaggtggcgtcggccagctccgggtcggtcatgatggtggccgggttcgagtttacgagaatgacccggtagccctcctcgcgcagcaccttgcaggcctgggcgccggagtagtcgaactcgcaggcctggccgatgacgatggggccgctcccgataacgagaatgctcttgatgtcctcgcgcttggtcatttacgccacctccccttccgtgtcagctccgaacttccaaccggacaggcggtcggtcgcgatgtcgatgtccaggtagtcctcgcgtccctccataaggcgcgcgaaggcggtgaacaggtagtgggcgtcggtgggaccgggggccgcctccgggtggtactgcacgctgaaggccggcacctccaggaaggcgaagccctcggcggtgccgtcgtcgaggttcacatgggtgagccgaatgcgcccgaagcgctcgttggccacgacgggggcgacgcccttgcggccccactcgcgcagatcctccacatgctcggtcgcgccgccggaaagctcggggatcagcgcgcccaagctttggaagcggggacagaagccgtggttctgggccgtcacctctacccgtcccgtgagcaggttctgcaccggatggttgccgccgtgatggccgaacttcagcttgtcgatttctgcgcccgcggccttggccatcatctggtgcccgaggcagatgccgaacagcggcactttcccgagcagcttctccgcctggcggtaggtctcccccaccgcctccgggtcgcccgggccgttggagaggaacacgccgtcgggattcatcgccagcacctcttcggctggggtgtcccagggcaccaccgtaagctcgcagcccgaggccaccagaccgtccaggatggagcgcttcacgccgcagtggtagacgaccactttgaagcggggctcgacgggagcggaaagggcgaagctatgggagacgggcaggttcgcggcggtgtaggagtaggcgccgtcgcaagatacgccaacgacctggttctcgcccaccagcgacgggctctggcgcaccttcgcgagcagcgcggcgacatcggtgtcctcggtggaaacgacggcccgctgggcgccatggtcgcggatatggcgcacgagcgcgcgggtgtcgacgccctcgatggccacgacgccctcgcgcgccagataatcgccgaggctctcctggctgcgccagctggagggcgtggggcacatgtcgcgcaccacgagcgcccgcagggccggatgctccgcctgggcgtcgtcggcgttcacgccgtagttgcccacctgcggataggtgagcaccacgatctgccccgcataggagggatcggtgacgatttccaaatagccttccatcgaggtgttgaagcagatctctccgaaggcctcgccgggcgccccgcaggaggtgccgacgaacaccgcgccgtcctccaatacgagcaccgccggcgctcccgcaggcttcgaggtggccgcccgcatcttttccgcaatcttgctcaaaggttccgtcctttccgcgactcgctcgccttcgcctcatgtgcttcgccggcgccccgccgcgcatccctgcgccttcgcacccacgtgaaagcgcggcccgttccacagcggcggccgcaaaaaagcgcccccgccttggacgggggcgctcgcaagcacacaagatgaagttcgctcatcgcaccttgccggtctctcggtaccgtccgttaaaggtcatttttgagcataagacaccctgacaggtatgcatctgcacaaaattaagcggccgaagacggcagccgaatggcggcctagccctcgaggtcacaacctacgatgacctgcgctggacgtcgacggccagggatttgccggagaaggcgatgccgtaacgcaggctgcccgcgccgcttcccgccgcccccgcgtcgtaggctcgcgcctctatctgggccagggcctcggcggccagcgtctccaggcgccccgcgtcggcgccgcgctcgaacttcagctccagagtgatctcgggcagccccgcccgttcgggaaggaggcggatgtcgaagcgcccgcgccccgcctcgcggttcgagaccgggttcccgtagccgggcgcgccgaacaaaagccccaccaggagcatgtggtagctgttctcgctcgtcaggtcgtagcagctcgccgagttcagcagaatgccctccagctcctcggcaagcaggccggcgtccccgtcgaccagcgcgcggtgaaggtcggagaggagccgcgtggagccggccaggcccgtgaaccggcccacgatgtcgttgcggtacacttccgagatctcgcggttcggcacgcgcaagggacgcacccggccggcattgttcggctgggccacatcgtcggtcgtgaggtagccggccaggtagagcagcgaccataccgccccggcgcgcgtcgccacatcagggaaggacacgcccagatcgagcggtgcgtccacggttcccccctcggtcatcagcgagaagacgctgcgcatcgtctcggggtccgcgctttccaccacgctttggagcacgtcgttggaagaggtgttgccccagtagatatcggcaacaccgccgcttcggaaatagttgacgacgctccaggggttgaagacgtccgctgccccgaagcgatagccgtcgtaccattcccgcgcctcgccgaggctcgcatcggcaccaagataggtagcgagcgccaccacctcctcctcgagaaacccgtagcgctcatcggccatcacgtcgagcggagtgtcgacgacgagattgttgaggtcggagaagatggactccttcgagatgcgttgaacccccgtgagaaccgcgaactcaagcatggggttccctttgagggccccggtcagccaccgcttcagcacgctcacgacctcatggtaggatggtttcgtgtagcaggccgcgacaggggcgtcgtactcgtctatgaggacgactgtgcgacgtccgtgataggcggtcaggactcgcgagagccactccagggaggagacgagctcctcggcttcggcctttctgcccgtgacgcgctcgaaataggcccgctgctcctcgttgagcgcgccatctgaaagaacatagccgtggcgctcgtactccgcgcccacaatttgcgcgagcgccccaaggaaggcggcggcatcatcggtcttcgccgtcttcaagctgatgctgatgacgggataggccgcatgatgggcgcggtactggccctgcgcagcatcccagatggccagaccctcgaagagttcggtcgtgtcgcgggcaaccggatcgctcggcgaaggtatctccagaaagcgctggatcatactgagattgagggatttgccgaaccgccggggccgacagaacagcagggccgtggcgcctgagtcgatgacgtcggctatgagcatcgacttgtccacgaagacagacttctccaccacggacaggaaatcgtcgttgcccacgggcaaccgccggcggccggacaggtcggacaggcgcacgtcgccctcgcgatagatgccgttctcgtaggtgcctgtcatgccgcggcctttctccctcgtagcgtttccccgattataaacgaaggaccgcacgcggcggtccttcacagggaattagcaggaagcggaggcggcgcctacagccaatatatgcccgagttggggtagttggccaggttcggcggggcgtcgatggcgccgaggaacgcgccgtcctggatgcagatgagtgcgtagatatcattgaggttgtcgctgcagatgccccaccagccgtcgtgcaggtactgggcgacgaagtcctccggaatgccgagggccgcctcggccatggaggcatcgaagaccacgttgccctcggcgtccatgatggccgaatgcagcacgggctccacctcgggggcacgggcgccgggcgactcctcggcagcggcctgaacggccgcgtcgtccgcggcctgggccgtgcgcacccaaagcatgccgtcgttggcgtcaccgaaggcgtccagctcctcgccgagcggcacgagccacttcgccgcactgatagagtacagcccgtacaggtctttgttggcaccgccgtaggggttctcgcgctcggcctgcacggccacgatgccacttccgccgggctggtcgtaggccagcttaccgtcgataacgccgtccccgttcacgctggccgagtcgaaggtcaccgagccatcgtaagcgtaagccttatcgcgtgcggtggacttggtgtaccagccatagccgagcgactccggcacctcgcccagggccttctcgcccacgagcatcttgccgtcgacgtcggcgaggtagcggccgtccgcaggcgacgcgatggaagcaacaccatcgtggtagaccccctcactgagagagtcggcgttaatataatccccctggcgacccaaggagaacactacctggccctgctcatcgatcaccagggtgatgctctcctggccatcctccaacggcgataggggcatcaccaagcgcccgctctcgaaagcgtagccatcgcttatgaggctggagcggcccgttatccccgccgcggccacgacaggatccaggtccactgccacattgcccgcgctgtcgaagagcgcgtagtgcgtctgttcgtcgtgcacggcgtcccactcggcgtcgtactcgctcgtctcccaggtgcccagcaccagaccattggcgaataagccttgaattacgacatcagggttggaaagctgcatcgctatgccgctctcgctcacaatggagtagcccctgtcagcatggcccgcgaaccaggcctcgggaagagccggggccgccggctctggctcaggcgctggctctgggtcggcgggcgcttcgggttccggcgcggactcgggttccggggccgaggcctcgacaggggccggctccggctcgggggccgcgaaggggttcgccaccgcgatgcccaccgccgccagcgccaccacgacggccgcggtcacacccgcgacgaggccggtgcgcttcttcttgggaggtgtggaagaggggtcggcctcccctcccatcggcgcgccgcacttcgtgcagaacttggaaccgtccggcatccggttgccgcatttggtgcagaacatggggaacctcctaacctctcttcgctgcgagggcgcacacggcggcggcaacagaggccgccaggcacatcagcgggaacgccgtggccgaggcgatgccgtccaagagccccgacagcccgcagaagaccgcggcgcagacggccatggcgacggcgccggccacgagggcgcccctgcggccggaccgcgcgatgcgcaccgcgcccagggcgagcaggacgacgccggcgagccacagcagcaggcagccccaggccgcgccgcccaccagggccgaggcagctcctgccccctcgccgccgagcgccccgtagagcgaggcgtagtcgccgaaggcgccggcgaaggagggaagggcccacacggcgtaggactcgtcgaaggagaaggagccatcgccggcccccagcagggacgcgaggccgcccgcgtagcccgaggcggccgacaccacggggtcgacctcgagccacggcagcagcgagaggacgacggccgcggccgcgagcacggcggccgccaccgccagggcgggcgccttggcggctgcgggaggtgccgccgggcgcgacggagccgcgttggggacggcggccttagagggcgtcgggcccgcagtcggccgccctccggcgcccgcgggagcagccagccgggttccgcacttgccgcagaaggcgctgccgtcgggcagtcggttgccgcacttggggcagaacatggctactcccctcccctcggggcgccctcgccgccgggcgccacggccgcgttgccgtcaccgctgccggcctcgaccagctcggactcgccgattccggcgttttcgatcagctcggcctcgccgacgcccgcatcggcagagacggcggacgccaccttcgccccgcaggccatgcagaacatgtccccctccccgagcggcgcgccgcaggaggcgcacgcggggccggagggagcggacggcgccggggccgcctgggcccgggccctgtcggccggtgcgccgcagcccgagcagaacaggtcggcgccggtcatgcgggccccgcacaccgcgcaggtgaacccagcggccgccgtcgccgcggccgccgcctgctcgtcgatggccgcgatctggcgctggcactcctcgcgctcggcgtccacgcgggcgatcccctcgtagagcgcctcgcggccagacacgagcgccgcgtcgttccgcgtcgcctcgtacaggctcgcccccagctgggcggccagggcctggcgctgcttgttcagctcgccgatgcgggcgctcagcttgatcttgtcggcgccgcgccccgcggccgccgtcccccggttcaccgccgaggtcacgttgtccagaaatcccatgtgagtcccttcgaatgattagatgcaaaaaccaggagcaaagcagcaggttccatcggactcggtggcatagagagcattaccgagagtgtcgaccgcgaaattcttcctatagaaaggcgagtacgcagagcgctcccaccatggagctgatggaccgtcgtagctcgataccccttcaccgctttttacgagaatggcattatctccagaggtgtccacgcccgcatcgcgatagagtttgtaaaccgatccctcggcgttaagaatgtctccaacaggtctatagcgatcttcttcaccgaaatacacgtcacctatcggccccacaagctcaacgacggagggcagccaaagagaatcggatgtcgaagtcacggaggcggcacttttagtctcgccttcgttgttggtgagcttgtcgaccggtacgatgacagcgtcgaggtcctcgggcagctgagcgcgccacgttccatttaaataggtgcgcatcggagaagcctcccagccgccctcattagtcccctcctcgttcattggttcctgccccacgcagtccccgaagatgaacgtgatgccggccttgccgccggaggtcttgtcgtcgtgggcgaagccgacgatctgcaccgtggtctgggtgccgtcggccagcgtcactgacttcacctgggtgccgtcgagcttcccctcgggcgtgcacaggttgtacctcttcgccacctcgatggccgccgcctcgtcgccggccccgccgatctcggccgagatctgggacagctcgtcccacgtgtaggcctccacggccgacttcaccgcggcaccgcccgcatcctgggagtctccctgggcgccgtccgcgctctcgccgacgccgtcaccctggccgtcagcagcgttcgcgtcctgctggccgtccgcgccctggcttgcggcgggaatctccaccgcctccttgggctgcacgcctgcgactccgaaccagttcgtcgcaaacccggcgacgagcaccaccgcgacaacgacaacggccgcgatggcgccgatcttggcgccgctcctcttgggcaccggcgccccggcccccgcgccgccggaagccgcgccctgcgcgctccccgccggggccgcgccagccgcctgagcattcaccggcgccccacacttcccgcagaaggccgacccctccgcgatctcactcccacacttaggacagaacataattaccttcctttcctgatctattgtcttaattaaagaataagagaagcaggctggaaaacaggcttgtcgcggttagcgtcaccgctagcaatcgcgcaacctccaaagcgttttttcgataagatccctcgtcgcgctctccgtcgctacacactcccctcatcacgaacgctccgaacgcgatgacggcgatgccaaccagcaccagcaagaccgtgcccaaatgcacccgccaatcgtgtactgcggagagccagtaacttcccgcgagaaacacaacgagaatccccagaaccaacgttgacactaacaacagcgaacagattgtcactgcggcccatttccaccactttgccgcttgctctccctgcgttgcctcttcatcaagcgcgtcggtcataagccgtcccttccgctccaaagcgcaaaggaacccaagagcccttgggccttgaagctttctattcggttgtcttcagttgattgctgcgggaacgcgtcccgcgggaatgctgcgctagcgcgcgagggctcacgccgatttagcggtgagacccccccaggcaagtgtatgtgcgcttcgttaacagcatgtcggcaagtttagcacaggttggcaacgccaccaggattttttcgcagacggaatatgcgacgagccaatgccgacagcaaagcatcgcccgctgccgctgtttcagatgaatacccttttgcggtaacattgagggcacaccaaggaggtgcaccatgccaaccgcaacgaaagacgccgagaccaagttctgcacaagcgaagagctgaagcgacagaccctgaacgggcggcagacgctgcgccctgattccactacgggcatcaccgtccttccggcctggatggacgcccccgaggatgaggggctctacgacgacctcgtatgcgctgcattgaattcaagcgaacagaacgaagacgggcagtaagctgcaaagaggaaagagcttactggaggtattgccatgagagctgagtacgatttcaccgattccaagcccaatccctacgcgaagaggctgcgccgtcccgtcaccatgcgcatcgacgtggaggccatcgactacttcaaggaagaggcagcccgcacgggcatcccctaccagaatctgataaacctctacctggtgcagtgcgccgaggaaaagaagattctcgcgttcgcctagagcgcatccatgaagagatagccagaaggttcacctgaaggctccagagcattcaacagtttactcctccccggccaggcggtagcttacgaggctggggcgggcggtccaggggtcgggctcgatgagggcgtccaggccgaagacctcgcgcaggagggccggggtcatcacctcgtcgggggtgcccgcgccgcagatggcgccggatttcaaggcgatcatccaatcggagaagcgggcggccaggttcagctcgtggatgaccagcgcgatggtcttgccctcgtcgcggttcagcgcctgcagaagctccagcacctcaagctggtgggccatgtccaggtaggtggtgggctcgtccaggaggatgaggcccgtgtcctgggcgagcgccatggcgatccaggcccgctggcgctggccgccggagagggcgtcgatggcgcggtcggacaggccgtccaggtgcgtgatggaaagcgcccagtcgatgatgcgcttatctgcgtcggtcaggcgcccgaagcccttctggtgcgggtagcggccgagggccaccagctcccccacggtgagccccgccggcgcctggggcgactggggcagaagcgccatctggcgggccacctcggccgtgggcatggcggcgatggccgccccgttcaaatacaccgcgccgccgcgcaggggcatggtgcgcgagagcgccttcagaagcgtcgacttgccgcagccgttcggcccgatgatggaggtgatcttgccagcgggcacggccacgtccatgggctcgatgatgacgcggtcgccgtagcccaccgacacggcctcgccgcgcagggccgcgtcggcgaagtgcgcgcaggcgctgtcacaggtttcgcagagcgtatcttccacggcttacccctcctaggatttcgccagcaggtacaggaaatagggcgcgccgatgaccgccgccacgattcccacgggaatctcgttgggggcgagcagcgtgcgcgagatgatgtcggccagaagcatgagcacggcgcccacgagcacgcacgccggcacgagcgcccggaagttcggccccacgaggcgccgcgccatgtgcgggcacacgagtcccacgaaggtgaggccgccgcccacggcgcaggcgagcccggaggcccccacggccacagcggtgagggcggccgtggcccgcggcacgttcacgccgaggcccgtagcggccgccggcccgagccccagcacgttcagcgtgcgggaggcgtagaaggcgccggccgtgagcaccgctagccccacggcgagcagtgccacgttctcccagctggcgccccagatgctgccggcgagccagttctgcacgaaggcgtagtcgccgtcggacatgcgcagcatgagcagcgacgtggcgctggagagccccgtggccagagcgacgccgatgagcagcagccggcgcgggctggaagcgccgcgcaccaccgacagccgccagccgaggaaggccacggccgccgatcccgcgaaggcgagcagcggcagggccaccgccgaggggaagatccccgcgggcacgaagacgatgaaggcggccacgagcagcccggcgccggcgttgatgccgagcacgcccgggtcggccatgtcgttgcgggagacgccctgcagaagacacccggaaagggacagccccacgcccaccagaagcgaggtgagcacccggggcaggcgcaggtccaccagggtataggtgaggctctgactcgccgtgccggaaagaatctgccccagctcctcgagcgagatgctgcggtagccggcgttgatgtcgcaccacaaggccacaagcgccagcacggcgaggatcgccagggtggcgccggtgcgcagccgcctctttcgctcagtcaaggccggtcgcctccctccgcgcgcaccagatgaagaacggcacgccgacgatggcgaagatgatgccgatgggcacctcgctgggggcgatgagcgtgcgggcgagcacgtcggccaaaagcatgaacagcgccccgcccaccatggaggcggggatgacggcccggtagtccgaccccacgaagcgacgcaccaggtgcggcaccatgaggcccacgaaggccaccggccccgcgagcgccacggccgcgcccgccagcacgagcaccacgagcaggcacagcgcgcgggaggcccccgcgttcacgccgagccccgaggcggcctcgtcgcccagggacagaatggtcacgcgccgcgccagcacccaggaggccgccagcgccgccacgatgaacggggcggtcatggccagcgtgtcggcgcggatgccggccaccccgccggcggtccagaaggtgagcgagtagccgatgttgaagaagatggccacgccctgggcgagcgccgtgaggaagagccccaccgcgcagccggcgagcaccagcaggacctggcccacgttgcgccgacggaagctcacggccccgaagaccacggccaaggcgagggcggcgcccacaaaggagcagcccaccaccccggcgaagctcatgcccggcagaagcgccaggcacagcgccagcgcgaaggcggccccggcgttgatgccgagaagccccgagtcggccaaggggttgcgggtgacgccctgcatgatggcgccggccacggcgaaagccgcacccaccaaaatgcagcctgcggtgcgggggccgcgcagctccaagatggccacgtgctcctggttcgccaaatccggcgagaagagcgcgcccagcacctggtcgggcgggatgggggtgctgccgaagaacagcgagagccccgccgccagcgcgaccgcgatcacgccgacggcgaggaagaccgatgttccgaggcgcgacacgaacggcccccgctaggccgccgtatccgcgtgggcgcggaagaagtcggtgaaggcctgaagctggttggtgagcgtgatggggtcgcggtgcatgaaggccacctgctcgtagggcatgaggcgcccagtctggacggcgggcaagttcttccacagctgcgagtcgtccacataggccgagtcggcgccgtccagcacgccgtagcagatgaagtcgccggcgtagtcgggcagcgcctccacggagatcaccttgtaggcctcatcgccctccaccatggggccctggatggcctcgggcgccttcagcccccacatgtcgtagaggatggagccgccgcgggcgaagtggctgcccatggtgtagatctcctggggccacacctccaggatggacacggtgcggtcgcccacgatgccgacgatctcgtccttcaccgtggccaccttgtcgttgaactcggcgatgtaggcctcggcggcgtcctgcttacccaccaggtcggcgatgtagcggaacaggtcctcgtcggagcgcgtgccgtcggcgatgtagaccgtcggcgcgatcttggcgtacttgtcgtagtcggcctcggtgatggtgacgatgaggtccggctgcttctcggcgatcatctcgagcgaggtctcggccgaggtggtgttcagcgcctcgatgccgtcgcacagccccgcgaggaacgggttgttcagagcgtaggggctcgcgacgacgggcttcacgtccacggccagaaactcgccgaggtagtagtcgctcacaatggtctgggggttggtcggaatctccaccgggcccttgtcggtatccaccgtgcgcgtggctgcgcctgcggccgcatcggcgccggaagcgccgccgtcggtcgtagcggcgccctcccctcctgcggaggaaccggtagaagaggagcacccgccgagcacgggagtcagagcggcagtagcgaggaaggccgcgaaagtgcggcgggaaatcggggccatgggcagatcctttctgaaagctgagcaaagaagttagttatagtaaactcacagcgccggatgttatcacgggtttacttttatgcaagcgcttcggaaaacattcacaaacggcgctgatccattctaggcaacggcagtcggtttcccccaaggcatctcccctgttgtttctcagccgaagccctctcgttgcccaaggtgttagccgaaatgtgcaaaagagggtgcttctcgtaacttttcatgtccgaagagagcgcaggcgttcctgatttcgggtatttccgcaggtgaataccttcaactagagcctcaacgcgaaaactgactacgagaagtaccctcttttgcacatttcgcgcgggccgtctccttcaaggtaaacgaaatacaaaaaaaggagccgtcctcggacggctccttccgggtgaaacgctatttggcggcaggcgctactcgacgatcttgccgtcctccatggtggcgtagccgccgacgtagacgtcggtggcgcggccgacaagctcggctccgatgaagccggagttgttggccttggagcagaagtcgcccacctccacggtccaggcggcctcagggtcgatgaccgtgaggtcggccacgctgccggcctcgatcttcaccggctcctggcgcaggatctcgcgcggggcgacggccatggcctcaaccatgcggccgtagtcgatgacgccggcgcgcacgagatgcgtgagcaccagggagagcgaggtctcaaggcccgtcatgccgaagggcgccagctcgaactcgcgatccttctcccaatcggtgtggggcgcgtgatcggtgacgatggcgtcgatggtgccgttcgcgaggccctcgatgagcgcggcggcatcctcggcggtgcgcagcggcgggttcaccttcagcgcggtctggtactcggtagtgatggcgtcctcggtgaggaatatgtggtgcggggtcacctcgcaagtcaccggcagcccctcggccttcgcggcggccaccagatcgagcccgcgcttggtggtgatgtgctggatgtgcaaagggcacccggtcagacggcagagcgcgatgtcgcgggcgatctcgagctcctcgccctcggccggccagcccaccatgccgaggcgcgtggaggccacgccctcgttcacctggccgtcggccacgagcgagtcgtcctggcagtgggccatgacgacggtgtcaaactggttggcgtagtccatgacgcggcgcatcatgccggcgtcctggatgccgtggccgtcgtcggtgaacaccggcgcgccgtgggcgtacatgtcgcccatgtcggagagcacctcgcccttcagatccttggagcaggcgccggccaccacgacgcggcacttccccacggccgcggcgcgggctttcacatattccacggccacggcgtcgtcgaccaccgggctcgtgttcggcatggtgcacactgcggtgaatccgccgtgggccgccgcacgggagccggaggcgatgtcctccttctgctcctgacccggatcgcggaagtgcacgtgcatgtccacgaggccgggggtgacgatcttgccggcgaggtcgcgctcgacgcccttctccatggtgagattcgtgccaacctccacgatcttgccgtcgcggatgaggatgtcggccacttcgtccaggccgatctgggggtcgatcagacgagcgttcttaagcatcaatgccatcgttgctacctcctaggagcaggtacagggcggccatgcgcacgaggacgccggcgtaaacttggtcgaggatgatggagcgcttggggtggtcggccatgaagctgtccagttccacgccgcggttgatggggcccgggtggcacacgcaggcatcgggcttcagaagcttgtcgcgctcctcggtgagtccgtagagcaggttgtactcgcgcaggttcgggtacggcgcgccctcgaagcgctcgcgctggatgcgcagcatgtacaccacgtccagctccggcagcgcctcgtcgaggttgctcgtcacgtggtcggcgccgaggatgtcggggcgcgcgggcagcagcgtcggcggcgcgatgaccgtcacctcgcagcccatgatcttgagcgccgggatgagcgagccgcacacgcgggagtgggagatgtcgcccacgacgcccacgtgcaggttgtcgaaggagcccttctcctcccagatggagtacagatcgagcagcgcctgggtgggatgctggtgcttgccgtcgccggcgtcgatgaccgacacgccggacacatcggcgatcttgcggggcacgccggcccagcggtcgcgcaccacgatgcagtcgatcttgtaggagcacagcgtcttcacggtgtccacgaggctctcgcccttcaccgtggccgtagaggagccgccgaagttcagcgaatcggccgacaggcgcttctcggcgatctcgaaggaggagcgggtgcgggtggagggctcgttgaacatgtttacgacggtgaagcccttcagcgtcggcaccttcttgatgcggcgctcgttgacctgtttgaacgtcttggccgtctccaggatggtcatgatgtcatcggcggagtactccgtgatgtcgatgaggtgcttgtgatcgaaggccatggacctactcaccttcctttttcgtcagggccgcggcgcctgcgcgcttgcccggctcgatgtccagaatctccacggccgagatgccgtcgacttcctccaagaacaggcgcacgttctcgctggaggacgagggcacgttcttgcccacgaagtcggcgcggatgggcagctcgcggtggccgcggtcgacgaggaccgccagctccacggcggcggggcgaccgatgtccatgagcgcgtcgagcgccgcgcggatggtgcggcccgtgtacagcacatcgtccacgagcacgatggtcatgccgtcgatgctaaacgggatgtcggtggaatgaacctcgggagacatatgggtcgcgaagtcgtcgcgatagaagctgatgtccagcttgcccaggggaaccttgaccccctcgatctcctcgattttgtgaacgagcatcttcgcgagaagatcgcctcgcgtgacgatgcccacgagcgcgatgttgtccgcgcccttgttggcctcgaggatctggtgcgccatgcgcgtcaccgctcgctcgatgtcgtctgcatccatgcagaccgacttgaccatgctctcgtcgttcatacacactcccttcgtaaggtcagtgcgtacagacgagtccgcgaagccccgcgtccgagttttccgcgagcttcgtgccgcctcgcgggcaaaagaaaaagcccgtctggcgactaggcttcctgcgtcgttgcgcttgcttcccgctttccgggcgctgcgctgattggggttaccttgtcggcctctctgtaccgcatttaaaggacggttgcaccatacaccgcagaaagatgacttgcaagcattgtattgaattttttcaaaaaaggcgaaaatgggatggccacaggttcgcccaaggaagtcagcgaggctccgacaggtgcctgcaattcgcttgaagcgcggccgagcggctttggggccgtgagggaaagtgctgaatgcgaagggcaggtgcctgtcggagccgcagcatcgagaattcccgttgttgcgtcagcaacgacggaatctaaaagttatctgccttgatctcgaagtagccctgcgggtgctcgcagacggggcacttctcggggggctcggtgccgatctcgatgtggccgcaaacggtgcagtaccacaccttcacttccttgcggcggaacacctcgtcgttctcgatgcgctcgatgagcagctgatagcggttctcatggctcttctcgatggcggccaggccctcgaagaaatcggccagatcggcgaagccctcctcgcgagcggtcttggcgtagccggtgtaaatctcgacttcctcatcctcgctggcagcagcggccttcaggttatcgagcgtgcccggcacctttccgccgtgcatcttcttgtagtgcagcttcgcatgatgcagctcgttgccggcggtctcgttgaagatgtcggagatttgcttgtaaccgtctttggcggcctgctggccgtagaacgtgtactcgcaataggccacggcctcctgcgagagcgagctctccaagttcttccatgtctgggatttctcaagttccatgggttccaactcctttctgcgcggtgccgcttgtgctggcaccgtatcgtctcgtctatagtgagactcggcgcctcgcgctgcgacggctaaccttaaggagttgggtaatcgtaacttcgctattgcgctcgcgacataaaaagaaggccgctcgatcgagcggccttccggtgcgcactgattcgtgctttggcttaggcggccttgttcaggctgtccagctccttctccagagcggtgttgtccgcagcggagatccagccctcggggatgggggcgtcgttgtggcactgcgagcaggcgttcacggaagcgcgatgcgccttgtggcagtcgctgcactggttctcgccgtgctggggcacgtgcgggttgcgctccagatcggaggtggcctggatcaggtcgtcgcgagtcatgttgtggcaggactcgttcaggcagaactgatcgggctcgatgccgcgggcggccacgagatcctccagggacttctcgggcacgacctgctggccggtctgggtgttcagaacctcgtagctgccggtgatccagctcatgccctcgccgatctgctcggacagggtgggaacatggcaaccgaggcaggtggtgccgttctcggcgcgatgcacagcggccatcatgccggaggcgttggcgacctcgttgccccacacgtcagtggcggcctggccgggctcggcctcataggtgggcaggtaggcgtccatcggggtgtggcagatggcgttgcagaagctcggctgctcgtgccatacccagaagccggcgccggccacgacgagcacagcgacgacgacgcccacgacgatgggccacttcttctttttcttctgggcggcaggctcggcagtctgcctgtccacctttttctcttcttctgtcatgcctcttccttccagttggggatcctcgagatgcccttatggcatctccttccttcgaagcgagcgatctgccctccccagctgacctctgaacctcgaggggcaagggcggcgccattcgaagcgcgacgccatcgccccttggggtttcgcttcgctgtgcatgatacctgaacttgactgcaattgacaatgccgatcaccgtgaaatttttgccaatggcgccctgaacaagagtagagggacgacctcggccgtccctctacggatttgaaccatgctagcgcgagtgccccctccctgcagtggtcgcggaaggaagcgaggggcgacctcggtcgccccctacggattctctccgagaggcgtcactcgcttgaatttcttctattcctggatgccgtcggtctggcggatgagcttgcgcttgatcttgccgccgatagtcttgggcagctcgtccacgtactcgatgatgcgcgggtacttgtagggagccgtggtcttcttcacatgatcctgcagctcgcgggtgagcgcgtcggtgccctcgtagcccttcgcgagcacgatggtggccttcaccactttgccgcggatggggtccggcgccgccgtgacggcgcactccaccacggccgggtgctccaccagcgcgctttccacctcgaagggcccgatgcggtagccggagcacttgatgacgtcgtcgttgcggcccacgaagtagcaatagccgtcggaatcgcgccaggccatgtcgtggaggttgtagtactcccctcccacggcctcctccgtgcgctccgggttgccgtagtagcccacgaacagccccggcgggtaggcctctttcaggcccgtcacgcagatggcgccctcctcgccgtcatcgacctcgcggccgtcgtcgtcgagcagcttcacgttgagcaggggcgacggcttgcccatggagccgggcctcggctcgatccacgggaaggtggccagaagcaccgggccctcggtctggccgaagccctcgcggatcttcttgccggtgaggcgctcccaccggatggtcacttccgcgttcaagggctcgccagccgtggcgaagttctccacgctggacaggtcgtaggcggccacgtcctcctgcagcatgaagcggtacatggtaggcggcgcgcagaaggtggtgagcttgtagtcctgaatcttctgcaaaagcttggtgggcacgaacttgtccatgtcgtaggcgaagatggtggcaccggcgatccactggccgtagatcttgccccagccgaacttggcccaaccggagtcggtcaccgacatgtgcagcttgttctcctgcacctgctgccagtacttcgccgtgatgatgtggccgagaggatgggcgaagttgtgctccacggccttggggttgcccgtcgtgccgctcgtgaagtacatgagcataatgtccttggaggtgacgcccgcatctcccgtggggcgctcgaaggtgtcggggtagcccgcgatgagctcgtcgaaatcgacccagccctcgcgggagccgtccacgatgaacttctcgcgcaccgtggggcaatcgggcatggcctcttccacctgcgtgcagacgtactcgtcgttcaccgccacaatggccttcacgtcggcgctgttggcgcggtagaccacgtccttgcgcgtgagctgcagcgacgcggggatgatggtggcgcccagcttgcagagggccacggcgcacacccagtactcccagcggcggcgcaggatgcacatgaccacgtcgcccttgccgatgccgagctctttgaaggcgttggccgcctggttcgagaggtgcttgatgtcggtgaacgtgaaagtgcgctcctcgccggcgtcgttggtccacagaagcgcccgcttgtcgggctccacggcagcccactcgtcgacgacgtcgaaaccgaagttgaaggcctcgggaaccttgatggtgaagttctcggcgaagtcctcgtaggaatcgaattcaattctcgggcagtacttcttcagaacatgatccatagtggtgcttctctctgctctcctattttcgctttgtctgcgattccgctttgtccgcgaagcggaatcgcggtattccaattcgctcaaacagtcctcgctttatggaaatgcccactgggcatttccagtcgctgcggaactcgctcggttggaacaccccgggtcgcttcgctactcctccaaaaatgagatggtactattcggcgatgatggtgatgaacttgcaggggacgtcgccgttgcagcgctggccgtgggggtaggtggggttgaaatagatgctgtcgccggcgttcagctggatgtcgcgatccccgaaggtgaggatgagcgacccttccagcacgtagttgaactcctggccgtcgtggcacaccagctcggccggctcgtcgcacggatccaagatgaccagcagcggctgcatgatcttgcgggcgtagcggctggccatgtcctcgtagtggtagcccgggaagcgctccacctcctcggtctcgccgcggcgcaccaaatggtaggtgtcgagcttcggcgccgtgcccgtgaggatctcggtgaggtcgacgttgaacttgcgggccatgtggtagatggccgagatcgggatgtcctcgccggtctcctcccagctgcggtaggtgtcgatatcgacgccgagttcctcggccatggtgtggcgcgacacgtcgcaggcctcgcgcaggccctgcaggcgctcgcccaaatctttcaggttctcttcttccatgttcgtccttctgtgtcatccgttttgtccggcggagagcaggacggactcccccgtgctcaagcaatggctcgctcggcggaacagcccactgggctgttccgttcgctgcgcaacctgcgcgcggggaagcccgtcctgctccccgcctacatagccgcaatcgttaggctacgcgttgatgccgagcttgatggcttggcggttctgctcgagtttctcgggcttcttgccggccaccttcgcgatggcgccgtcgagcgcctcctcggagcaaaagccggtctcggcccagagcttgccgatgagcacgatgttgccgaggcctttgaggccggcctcctcgcacatcttggtcgcggggatgccgatgaccgtcacgccctcgggctcggtgagactcggcaccatggccgtgtccaccaccacgatgccgccctcttccacgttgtcgatgaacttgtcgaaggagggctggttcagggcgatgagcgcgctcgggcgcgtgatcagcgggctgccgatgggctcatcggacagcgtcaccgagcagttggcggtgccgccgcgcatctcggggccgtaggagggcatccacgaaacctcgcggtcctcgatgaggccggccgtggcgatgaccttgccggcgaacagcgacccttggccgccgaagccggcgacgacgcaggtgagatccttgcccattagttgcctccttctgacacggcctcgggatgggcgatggggcaggccgcattgcgggcgctcgccgcctcggcggcattggcgaagccgtcggcggtcacatcgcgcaccaccccgagcggatagtacggcagcatgttcacgcgcatccactcgaaggcgtcctgcggcgtcatgccccagttggtggggcaggtagaaaccacctcgatgaacgagtagcccacaccgtcgatctggttctggaaggccttcttgatggcctttttagccttgcgcacgttcttcggcgtatcgacgcagacgcgctcgatgtaggccgggccgtccagcgcgttcagaagctcgctcacgcggatggggttgccggccgtggacacgtcgcgcccgtaggggctcgtctgggtcacctggttcggcagcgaggtgggggccatctggccgccggtcatgccgtagatggcgttgttgatgaagatgatggtgatgttctcgccgcgagtggccgcatggaccgtctcggccatgccgatggaggccaagtcaccgtcgccctggtaggcgaagaccaccttgtcgggatgcacgcgcttcaccgccgtggccaccgcgggcgcccggccgtgggcggcctcgatcatgtcgcagccgaagaagtcgtaggagatgaccgagcagcccacgggcgccacgccgatcgtctcgccctcgatgtccagctcgtccatgacctcgcacaccagacgctccacgatgccgtgggggcagccggggcagaagttcgtgaccacgggcaacagggagtggggtcgctcgaagaccaccttcatttccttctcagtcgtctcggccatgctactcacctaccttctcgttcaaagcgacaatggccgccagcacctcgtcgggcgtcgggatgacgccgccagtgcggccgaagaactccaccggcacgcgccccgccaccgccaggcgcacatcttccaccatctggcccatgttcatctccacgtcgaggaacgccttggccgtgggcacgagcgcctcgatggcccgggtcgggaagggccacagcgtgatggggcgcacaagccccgccttgatgccctgctcgcgcgcggcgttcaccgccgagcgggccacgcgggccgcgccgccgaaggccacgagcacgatgtcggcgtcctcggtgagatagctctcggcctcctgctcggtctcctcgatgaccgcgtagcgctcgtagcgctcgcggacgaggtcctccagatcggacgcggtcaggtacagcgagttcgccacgttgtggggtcgcttatgcccgtggccgcaggtggcccagggcttctcgggcagatcctccggggcgagcgcctcgggcaggaccaccggctccatcatctggccgagcatgccgtcggccatgatcatgaccggcacgcggtacttgtcggctgtatcgaacgccttgaaggcgtagtcggccatctcctgcaccgtggagggcgcgtacacgacgatgtggaagtcgccgtgcccggtggccttggtggcctgccagtaatcggcctgggagggctggatggaaccgaggcccggaccgccgcgctgcacgttgacgatgacgccgggcagatcggcgccggccatatacgagatgccctcgctcttcagcgagattcccggcgacgacgaggaggtcatcacgcgggcgccggccgccgatgcgccgtagaccatgttgatggccgccacctcggactccgcctgaagataggtgccccccaccttcggcatcatcttcgccatgtaggcggccacctcggtctggggcgtgatggggtaaccgaagaagaagcggcaaccggcgcgcatggccgcctcggccatggcctcgttgcccttcatgagtactttctcagccattgaactacctttcaaccgtaatggccacatcggggcacatggtcgcgcaggtggcgcaaccggtgcacttgtcctcgtcggtgcaatgggccgggtgatagcccttggccgtgatgacgtccgggtcgagctcgagaatgcccaccgggcagacatcggtgcacagcccgcatcccttgcagaagaaatcgtcgatagtgactcgcgccatggaaacctcccttgcttactcgcgcgcgggcctcgccgcccgcgcctctctctcatcttgaatgggccgcccttaggaccagggaggcttgacgtacacgttcacagcatagccattgggaatgtcgtccagggcgcatggccccgtgttttcccgctgaatggcctgaatgggggcggtaatgcaggcaatgggaaggcccgccatcgaggccactgcctgggtatacgggacactttcgacgatgtgtcccaaagcagtctcgtcctgcaagtgggagttgcccaccacggccgtggccgccaaatggctcttggcctcgatctcgcacagcaccgccaccgcatcggcaggttcctgcgtgaggttgcggaaggcgttcaccacgtagagcatggcataaggccccgctgcgagggccggcgcgaagcgcgcgagcgccgtggcgcccacatcgtcgccgccggcatccacgatgacgaccgtacgccccgtctcgtcgcgataggcctccgccgcggccacggccagctccccggtgaccgacgggacgtcgaggctcgtgcccgcgcgaccgaacacgggcgcgatgagccgcgccccggcctcttccagaagatcgcgatactcgttcgagcggaagtacgggttcacgacgtccatgtcggaaagcgtcacgcggtacccggccgcggcggcgtccaaggcgaggttgagggcgaagttggtcttccccactccgtaatgccccgtcaccaccgtgaccggcgccaacgggaacgggagcctcgcagcttgatctgccgtcatcagatgagcccctcgggggtcttctgcgaggcgtggtgggtcttgtcctgctcgcggatggcggcccggcggatcttgccgttgacggtgcgcggcagctcgtcgacgtactcgatgatgcgcgggtacttgtagggggccgtctggcgcttcacccacttctgcagctcggcggtgaggtcatcgcttccctgccagccgtcggcgagcaccaccgtcgccttcacggcgaagccgcgcaccgggtcgggcacgccggtgacggccacctcgcgcacggcgtcgtgctcgagcatcaccgactcgatctcgaaggggccgatgcggtagccgctcgacttgatgacgtcgtcgttgcggcccacgtaccagtagttgccctcctcgtcgcgccaggccgtgtcgccggtgtggtaccagccgtcgtgcatggcctcggcggtcttctcagcgttgcggtagtactccatcatgatgccggccggatgcgggtcgatggagatgcagatctcgccggtctcgccggtgtcgcactcggtgccgtcgtcgcgcaagatcctcatgacgtacatcggcaccggcttgcccatggagcccgggcgcggcgtggagttcgtcagattgcccacggtgagcggggtttccgtttggccgaagccctcgtagatggtaaggccggtgtgctcgcgccagaagtcgaacagatcggggttcagcgcctcgccggccgtggtgcagtactccaagctggacaggtcgaaggcgtccacgtccacctcggtcatgaggcggtacatcgtcggcgggcagcagagcgtcgtcacgccgtagcgaccgacgagggagaggatctcggccggatcgtagcggtcgaagtcgtaggtgagcacggcggcctccatgagccactggccgaagaacttgccccagaccgccttgccccagccggtgtcggcgatggtgaagtgcagcccctcgggattcacgttgtgccagtgcttggccgtgatgaggtgcgccagcgcgtagccggaatcgtggagcaccatcttgggattgcccgaggtgcccgaggagaagtacatgagcatgggatcggcgccggccgtctcgcggcgggtgaagtcggccgaagccgcgcgcacctcgctgttgaagtcgcgccagccctcgcgcgcaacgggggccgcgcagatgcccgcagggcccgagagcgcctcgccgacaagctcgccggcgggagcgacccagttcccgtcctcgtcgcgcggggtgagcccggcgccggcggggttcacgaggatgagcgtctccacgctggggcactccttcaccaccgcgtcgatggtgccggcgatgtccccggccgaggtggcgatgatggccttgatgtcagccccgttcaggcgataggtgaggtcgtgctccttcagcatgaaggtggccggcaccgccaccgcccccagcttctccagggccagcatcgtgaaccagaactggtaatggcggcgcaggatgaccatgacgaagtcgccgcggccgatgccgcagtccgccaggaagttcgccgtcttgtccgaccacgttttcatgtcggcgaaggtgaaggtgtgctcctccccttccgggttgcaccagaccatggccgtgcgctcggggtcgttgatcgcgatgtcgtccacgacgtcgtaggcgaagttgaagttgtcgggcatggtgatgtcgaacttcgtgagcagaccgttctcgtcgtaggcctcgtccacgtagcgcaagttgatgtttctcatgatgatatcctcgggtgaagtcttgataggacgaacgattaccttgggttcggcgacgccggatgcgcggacgcgcggccgggcccggtagcgccggtcgcaagcccgcgagtcgggccgcctagataatcttctccccctcgggcttcatcacaatggcgaggaacacgcagggctcccctcccgtggcgatcatgccatggccgcgaccggagtcgtacatgacgacatcgcccggactcaggatctcctcgtggtcctcgtaggcgaatcgcatctgaccggagatgatgaagtcgagctcctggccctcgtggcgggacaggtgcacgggcacgtcctgctcctcttccaaatagggagcggtgaccacgaagggctcggccagcttgtggcggaaatgcggcgccttgtgcaggtactcgaagccagcgcggcgcttgatggaaaggcccgcgccctcgcgcgtgagcgagtagcccgtcaggtgcgggttctcgccggtgagcagctcgatgacgtcgacgccgaacttctcggcgcacttgtacaggaaggtgaaggagagatcctcctcgccggactcttgtgcggcgtactccgccgtcgaccggcccgtggcctcggccatctcctgcaacgtgagatccatgtcctcccgcagagcgcgaatacgccccgccacctctttgatattcggctccacgacctgcgacctccttatcggttctcgaaaatgactgtagcacgctattttactggcatctcggcggtcaatatttccaatcggttaaaaagtcggcgatgcgcctatagtttttcccgcagcctcgccatcgccagacgcgaagacgaaatggagaaatctttttgtcgaagacaatttctgctcgatgcaaagagggcggcccaggatttggaaattgtgctattttggcctgctgaaggccttcaagaaaaacgaaggtacaggaaagcatattttccaagagcgcgtgaccaaataatcacattttccaaacatgagactcggcaatacaaacgtctttgaagcaatcaagacgcatcaagcttctgaactggtgttttactgacactgagctctctactcaagcgacaatatcatcgtgcaaaccatatacgctttctaaaaattggaaaatgtgcttttttgaaatagcactccatgggaaatggaaaaactgaccaaatagtcacattttccatttcccatttcgctctatcggggaaagagaagcgagagtttaggctttgcgacgcaaaagggcgaggaagtgggcgtcggggccgccgggctctaaaacggtggagaagaacggcagctcgatgtcgaggtcggggtttcggcagggcaccacctcgaaggcggcaccggcctcggtggccaggaaggcctccacggcatcggcgttctcctcgtgggtgacggtgcaggtggcgtaggccagaatgccgccgggagccacatgggatgccgccgattccaagagacgtgcgtccagctcggccgattcggcaatggtttcggggcgcaggcgccagcggatgtccgcatgacgccggagcgtgcccagccccgtgcacggggagtcgatgaacacgcgatcgaaagtgcgctcgcccaccagggcgtccaagtcggtggcgtcgccgatgatggcctcgctcacgtgcgccccgtactgctcggcgcgctcttggagcagcttggtcttgaaggcgtgcacgtcaacggtgacgtactcggggatctgcttgccgtatcgccggtaggcgatactctggtcgaggatggtcttcgtggcgcggccggcgccgatctccaagaacgactccggtgccgtatctcccaccaccagatccgccactgcctgggaggtggcgtcggacacgagaagcaagccctggtttatcatgcggcgcacacggccatcgagcaggggcacgcccgacgccactttgtagcagccgggtacggcacagccgcccagcgccatggcttcaggcccagcgtgagccgctgcgagaaccgagacgacctcctcgtcggtggcggccttcagcgcgttgacggcgatgtagaccggagccggctcgttcgaggctaccatgaagtcgcgggcgccctcgggcccgagctctgcgatgagccgcttggcgagccacaccgggaaaccgtgcagccgcgcataggcggcgatatcagtgcgcgggtcgccgaaggggaagacctctttggcgcgcaccacgcggcgcagcaccgcattggcgagaccgcccgcgcgcggcgccaccgacttcaccagctcgacgccctgatcgacggcggcatgggggctcttctgcaaaaagacgatctcgtaggccgacaggcacagcgcgtcgcgcactgccggggccgcatcgtcgggcgagtccatgcagcccgtgatgatgtcctccagggtgccgcgcgtgctgaccacgcccagcacgagccgggtggcgaaggcccgatcctcccgcgacaggggcgagatatcgatggtcttggcgatgatgtcctgggcgaacgcgtcgcgctccctcagctggtggatggccgccagggcaagctcgcgggccgtcgtggccttgtgggccttctgccggcgcacctggtcgcggcgcggcgcgcctccgcggccgccgtcgcgaggcccatcgaagcgcgggccgcgatcctgcgggacgtcttggtcgggggccgccatgagcttgccgtcgatgaacacctcgcgcgggtggcccgcctcgcgggaatcgcgccgagggccgcggtctgtgcgcgggccgaaatccttgcggggggcgctcccaccagttggcttgccatcgcgggcacggaagtccttccggtcggcgtcggatcgctgctcgtcacgcgggccccggtcgtccttgcggaatccgccgggcttgccgtccttgcggtagccgccgggcttcccgtcgcgggggccgcgatcatccttgcggaagctacccggcttcccgtctttgcggaacccgccgggcttgccccctttgcggaagtcgctcggcttcccgtcacgaggcccccggtcatccttgcggtagccacccggcttgctgtctttgcggaacccaccgggcttgcctcccttgcggaagtcgccggacttgccgccggggcgcggcccgcggttctgccgcgcgccgccctgggcgttgcgatcgccctggctcgctcggtcgtaggatcgtctctggttgtgggatcgatgatcgttatgcacgggaccatgttccttcctcgccccacagcgcggggacgccggcggcaaacgagcgcgcgtccatggcgcgcttgccgtccggttttacttcggttacttccaagaccccctcggcgcagccgagaagcagtcggttcgcgataagggccgccgcgccggagcccaggcggtcggcaggagcatcgtcggccacgcgggccgccagcaccgtcagcggccggccggcgacgacggcccgggcgggatgggcggcgcccgaggcacgcacgcggcgatcgttcgcaacggcgctctcggcaggatcgaggttcagctcgcctttggcgatcttctcggcgtaggtgaccagcgcctcgtcctgggccacccagcgcaggttgccgccctcggcctgggccagcgccgtgagcagcgcgctggcgcccagggctgccagctcctcggtgagctcggcggctgtgcgcgaacctgcgggcagcgagcggcacacgcagtagtcgccggtgtcgagcccctcctccatggccatgatgcacacgccgatctcctcgtcgccggcgaggatggcccgctcgatgggggccgccccgcgccagcgcggaagcagggacccgtgcacgttcaggcagccgaagggcggcaggtcgagcacctccttggggagaatcgccccgtaggccgccacgcagatgacatcgggcgcgaacgcggcgagctccgagagcaccgcggcgtcgcgcagcgtgcgcggcgttcgcacgggaaaaccgcgacgttcggccacctccttcaccggagagggcacaagcgcctttccccggccgcgcacggcgtcgggacgcgtgtagacggccgcgatctcgtggaactccgccaactcgtccaagatttccgctgcgaagcggggcgttcccatgaagacgacgcgcacgctacttcacctcgatatcggtgtcgcccgggcgggcgccggcggccttggcctcctcgtaggcgcgcagggcctcgatacgagtcaccggatcgcagctctcgaagagcgtcttgccgttcaagtggtcgatctcgtgctgcaggcagcggccgagcaggccgtcgccctcgatctcccacaactcgccgtccaaatcgtagtactggacgcgggcccacggctggcgcttcaccggcacggtgacgccggggcacgaaaggcagccctcgccgccctcctccggctcgccggccaattccacgatctcggggttcacgagcacgatggggttcttctcccccttctcgccgtcccaatcgacgtcgatgacgaccaggcgcttggtgacgcccacctggggggcggcgatgccgcaaccgtagttcttgtacatggcgtggaccatctgcttggagagacgcttaagcgacttgtcgccgggctcgcacggctcgcagaccgtggcgagaatgggatcgggggaaataacaatgggaagcacggtattccttactctgtatagtgaagtgtcaatgcgctgcggcaaccccgggcagctctgaaatggcccgggatcgtatcagttgcttgggacattgtgaagcgcgaggcccctcctgtccagatgacccgcgaaatctacggacggacggcggcgggtgccctagctggcgggcagcgctcggtgggcgacgcgacgggcggcgacgtccatctgcaaggtagtgacggcggcgtgcagaagctcggcctcctcgccgtcggccccggcgttcatctgggccgtgagcgcaccgatggcctcctcggcatcgcccagggcaagctcctcggccaggtaggcgccgatggcctccggggtgctcgacgggtaggacgacccggcggtgagcacgcgcgccgcatggggcgtggcgagcgtcgccttcgtgacgatgtcggcaggtgcggcgcccgggttctcggaaagggtcgcgagcacgctctcggccagaaggcggtgcacctcctcgtgccactgcacctgggccagcgcatcggcatgggcgagccccacaaggggatgctggcaagcgagcgccagaaactcccgctcgaagcgcaggcggttgcgctcggcctgggaaagcgcgcggcgcacaggtcggggcgcgggggcctcgggcccggtctcctcctcggcggcgccacggggcgtctccagggctgccagccgctccagcacgtcggcctcctcgatgccgaggcgcccgtgggcccgcaggcgcgaccaggtgcgcacggcgtagtccttcgccaccagcgtgtccttgatgggggcgagcaccgccaggcacgcgtccagcgcgcgatcgcggccgggggcggtgtccaagtcgaagctgtcgaggcgccgttcgaggccgaactcgatgagcgggagcgccccttccaccaccgcctccaaagcctgcgcgccctccgcctgcacgaactcggccggatcctggttgttcggcagggtgacggccagaagctccacggagttgcggttcttgtcggagatgctctcgccgatgaaggccagggcgcggtcggccgccttctgacccgccgcgtcgccgtcgaacaggtagacgatcttcttgggcgcgtgcttggcgagcacccggatgtgccgcatggtgagcgccgtgcccagggtggccaccacgttggtgacgcccgcctcgtgcagcgcaatgacgtcggtgtagccttccactacgatggcgcagccggtagaggccatgcgcgccttcgcctggtcaagcccgtagagcacctgggacttgtggaacagcggcgtttcctgggagttcaggtacttcggctcgccggcgccgatgacgcggccgccgaaggccacgcaatcgccctgggcgtcgaagatggggaacatcacgcgctcgtagaagcggtcgcgcaccgggcccccgcgcccgtcgagggccacgttggcgcggatcatctcgtcgggtttgaagcccaaggccgaaagatgccggacgagcgccccgcgcccgggggcgtagccgagcatccacttcttcggcacctcgccgccgaagccgcgggaggccaggtacttccgcgcggcgtccggcccctcgccgcgcccgcgcatgagctgggtgtggtagaactcggccgtgcgcgcgcagatctccttcatacggctcttcaccgagcgcgacacgcccccgccccgcgtatcctccgcgatgtcgatgtgggcgcggtcggccagatagcgcacggcttcggggaagttgaaatcctcggtcttcatgatgaacgagaagacatcgcccccctccccgcagccgaagcagtgccacagctgggtcgccgggtcgatcttgaacgagggggtcttctcctgatgcagcgggcagcagcaccagaagtcgcggcccttctgcttgacgggggtgcgctcgccgatgaccgccacgagatcgctcgcgtcgcgaactttctggatatcctcgtcgctgatgccggccacgcgtccctccgctttcttctcgtcgctcttcgtcgttttctggaaagtatagcaccgccacgtgcaaacagatgttccgcagctacaatagcggcaaaactaacgaccagcgaaagcgagcgagccatggcagagaacaacgtcccctaccttaccctgagccccgacgtggaagaggccattcgggccgaccgcgccgccggccgcgtgagtccctaccgcaccgatgacgcggacgtggtgcgccgcgaggacttcgcccacgaccgggccacgctcacacgcccggcctttgtgcgcgacacagagaaggtgctgaacctgcccgcctataaccgttacgccgacaagacccaggtgttctccttcgccgagaacgacgagatctcgcggcgcgggctgcacgtgcagctcgtaagccgcgtggctcggggcatcggtagcctgctcgggctgaactgcgacctcatcgaggccatcgcgctcggccacgacacggggcacacccccttcggccacgcaggagagcggttcctatcggcctgctaccgcgcgcgcaccggtcgtaccttcaaccataatgtgcactcggtgcgggtgctcgacaacctgtaccgtcgcaacatctcgctacagacgctcgatggggtgctctgccacaacggcgagttcgcccagcaggtgctgcgcctgggagagacgaccacgttcgagcagctggacaacttggtggaggcctgcacggccgacgagtccaccatcaagaccctgcgcccctccacgctggagggctgcgtcgtgcgcgtggccgacatgatcgcctacatcggcaaggaccgccaggacgcgctcgccatgggggtcatcgattcgctttcccccttcgattccgaggcgatcggcgtgaccaacgcgaagatcatcaacaacctcaccgtcgatatcgtgaacaactcctacggcaagccggagattgccatgagcgaggaggtcttccgcgatcttaagctggcgaagcggcagaactacgaggtcatctacttgaaagagggcatggtggacgacgccgagaacctcgtggaggagatgttcgaggagatgtacgcgcggcttctggccgaccttctggaagagcggcgggaaagccccatcttccagcaccacgtgcggcgcctcgccgcggcatcgcggtccatcgtgcccggggagtacctggccggcgagccgaaccagatcgtggtggactacatggcctccatgaccgacagctacttcatggccatctaccgccacctgttcccgacaagccgccgcaagatccaaacccgcggctattgcgcggatctcatctaacccttactaatcagattcgctagcttgcaaacccgaacgcacgtcgcactctttgttttctgcacgatttggaaaatatgctattttggagcttccacaagattcccacgataacggactccagaaaagcacattttccaaattgctctttccaaaattacacattttccaaatcacggcgatgcaattatgcgagtgcaaattttttgcaatcgctctaccaggcttttctcgaagtctgtaattctaccctccgcatattaaacattcagatttggaaaatgtgcttttttgctcttcagtttgtccggatcttagaataccgtccatttaaacacattttccaaatcctcgcgctttatacatgcctcgatgcgaaatgagactcgatccataaagactacttttgcatctttccaaacacagagtctcccgagaaggtcatcttcacagatccccccgaaaaccagtgtcttgctgatggcaggcggggttgtcggcggcggtggtggcgagctcgtcgcagcgctcgttctcggcgtggcccgcgtggcccttcacccagacgaacttcacggtgtggggctctttggccgcaagcagccgcttccacagatcgacgttcttcacgggctgcttctgggagttcttccatcctcgcttcagccagccggccacccagttctggttgaaggcgttcacgaggtactgcgaatcggagtacaccgtcaccgtgcaggggcgcttcaaggcctccaggcccacgatgcagccgagcagctccatgcggttgttggtggtgcaggaaaaaccggcggagaactccttctcgtgcaccgcgcccgagggcgccgtgtagcgcagaatggtgccgtagccgcccggcccggggttgccccgggacgagccgtcggagtacagggtcacttccatgggagctccttggtggttggaagatgccgccacgtgtcccgcggcggcgaagtcgttgaaagagaagccggattgcgcggtcatgggctacagctccgcttccgtgcgctcacccaggtcgatgagctcctggcgggtgtgcacgtcacacttgacgtatatgcggcgcaggtgcgtatcaacggtgttcttcgagatgaagaactcgccggcgatgcgctcggcggtgcggccgcgcagggcgagcggcaagatctccgcttcgcgcttcgagagcttcgccgtgcgcgcgatgagatcgcaggcctcctcgaaacggtcgctctgggcgatgaccaccgagagcgctgccatgtcgcggtcagtgaacaggaacagatacgcgtacagcaccgccacgccggccagggccacgagcgccgccgacacgtcgaaggcgccgggaagcgccccgagcacgccgccgacgagcacgccggtgatctcgcccgcgaacagcgccgcgaagccccgggcgaaggagcgcgccgcgtccccgccgccaatgcggcccatgatgaggaacagcgagacgagcaccgagaagacccccagatagccggcgagcaccacggccacgccggagacgttcacgctctccagcagcggcaccgccacgaaaccgcccaccatgagcaggatggcgagccggtacgcgccgccgagcggccccacctcctgatcgggccccgtgggcagcacggcgcgcacgcccaccgagagcggacgacccccgtagagctgcagcgcagcggcgcaatacagcacgaagagcacgaaggtgacggaaagcgatgacgcggctcccccctcggcgctggtggcaagggcctccacggcaccggtggccaggccgtagaccaccgtgccggcgataatgcgaccggagagcttggcggcctcctcggttggatcgtcggtagtcgcggtctcggcgtcgcggtcagcaggctcgccgagcgcacgcagagcccaggcgcttcccacgggcagcacgtacaacaggatgtaggcgccctccacgggaatggcgacgacgaagaagcacaccgcggcgcccagggcgcttccgatgaacacctcgggcacggactggtcgatggaagccttccccagcacccggccccaccggcacagaagcagcgcgagagggataccggcggcgagcccctccacggcggcgagcgcgagccacggaatgccaggcgcaaggctgtgcagcgcgacgatgaggtacagcgctcccaccaacggcagcgcgtagcagcgaacgagaccctcggccacgaccatgagatgccgacgccggcgctcgcgggtcatgagcgcgaaggtggcggccatgacgaggagcacgcagagcaggtcggcccgatcgatgaggaacccgtgctggctgctctcgttataggagcccagatacagcatggcgaagagaaaggcctggttgcaaccgaaaccgaggatggcgtagcgcgcttggcgcaaacgcgaaagcgtcatcgtcgccatgaacctccctttctctctcgcattgacaacggtgtattctatcgcaatgaaacgaatcggctctcaccgacgggaacatccgacgaaatgaaccgcatctggtaaaacgaagagaagcggcgctggccgtatctggcagctgccgcttctcttgggagggagggttgaaacgaaccccgcacccgagggcgcagggacggttcacggatgttactcggccttcttgcgaacgaccttcttgaccaccttggtctctggctcgccggcagtggcgtaggcgacctcgggctcgtcctcgacgatctcgatgatctcctcgacctcttcgtcgtccttcttatcgaaggccatgccctcgcgcaggctcttcacggtcttgccgagggaggcgccgagtttggggaggttcttcggcccgaagatgagcagcacgacgacgaggatgataacgagctcaggcacgcccagtccgagaatcttcatagtgggtaatctccttctttgcttcgaagccggccgggacactccttgcgccgcgcttcaccgttttttgcgtttcgacgccgcccactatgcccccttccaagcctcctgcctatcacgcagacccgtgattttgtcacgtggcgaagaaatttccctgtcacacctttacgtgacaaagctcgttttcgctggtcagaagcttacgcaaaaaagggctgaccgaggtcagcccctacagaacaactatgggagatttttcctactcgtggatccagctgaacatgccgcggatgcgctcgccggtcttttcgatctcgtgggtgttgatggcctcgcgctgctcgaggagccacgcgtgcccgttcttgcaatcggcgacgaattcctcggcgaaagcgccgtcctggatgcgggccagaatctctcgcatggcctcgcggctctgctcgttgatgaccttcgggcccgcgtagtactcgccgtactcggcggtgttggagatggagtagttcatgaagtggatgccgctctcgtacatgaggtcgacgatcatcttcatctcgtggtagcactcgaagtaggcgagctccggcgggtagcccgcgtccaccaaggtctcgaagccggccttcaccagctccaccaaaccgccgcagagcacggcctgctcgccaaagaggtcctcctcggtctcctgggcgaaggtggccttgatgacgccggcacgcgcaccgcccacgccccaggcgtaggatagcgcgatgtcccaggcgtccccggtggcgtcctgggccacgcagatgaggtccggcacgccggagccctcggtgtactggcggcgcacgatgtggccggggcccttcggcgcgcacataatgacgttcacgtcctcaggcggggtgatgtagccgtagtggacgttgaagccgtgggcgaaagcgagggtgtcgccggccttcaagtgcggcgcgatgtaggtctcgtatacctcgggctgcagctcgtcgggcacgagcaccatgatgaggtcggcctcttcggcggccgtggccatgtcggtcacgcgcaggccggcctcctcggcggcctcgatggagtgcgagccctcgcgcaggcccacgcgcacgtcgcagccggagtccttgaggttcagcgcgtgggcatgaccctgggatccgtagccgatgatggcgatcttcttgtccttgatgatgtcggggttgcagtcctgttcgtagtagatggtgacggccatgagttttggttcctttctcttgttgccttttctatttcctaatctcgcgagctgcgggagagggccactttgccggtgcggacagtttccttgatgccgtaggcgcgcagcagatcctccaggccccgaagcttcgcgtcgtcgccggtggcctcgatggtcagcgagcttttgcccacgtccacgatcttcgcgcggaagatgttggcgatctcgatgatctcgctgcggcgctcggacgcggcgttcaccttgaacagcaccagctcgcgctcgatggcgccctcatcggtgaggtcggtgatcttgtgcacgctgatgagcttgtgcagctgcttggtgatttgctcgtaggccacgtcgtcggcgagcacgatggcggtgacgcgcgagagggtggggtcttcggtagggcccacggacagcgactcgatgttgaagccgcgccgggagatgaggcctgtcacacgggacagcacgccggggcggttctcaaccaggacggacagaacgtgcttcatcgcgcgccccccttctcttcgtcgccgtcgcggaacagcgtcttccagtcttcggggcgcacgtccacggtggagccgtcctggcccaaacgggcgcctgtgtcctcggggtctatctcccagcggccgccgaactgggcgtccagcttggcgcagggagaggtggcggccgccgcgccggccgcggccgcccgggcccgcagagaacccggggcggcgggcacatcggtgcgcacggcgcccacggccacgtcgatcgcccccatgacatcgcccaaagccgcccccggcgccaccatgggatagacgttctgctcgggagagatggccacatccaagaggtagggcccctccgcggccagcatgcgctcgatagcagcagtgacctcgccgggcgcctccacgcgttcgccctcccagccgtaggcctccgccagcttcacgaagtcgggcacgggcgcaagcagcgtctgagaatagcgcttgtcgtagaacagcttctgccactggtggaccatgccgaggcagcggttgtccaggatcatgaccttcacgggcacgccgttgatggcggccgtggccatttcctgggagttcatctggaacgacccgtcgccggcgatgcagaccaccgtggcgtccgggttggccaccgccgctccgatggcggccgggaagccgaagcccatggtgcccagacccccggaggagaggaaggtgcgcgggaactcccggggcaggaactggtgcgcccacatctggtgctggcccacctcggtggtgacgatggaggccgccggatccagctggcgtcctagctcggcaatggcgagctcggggacgatctcgtcgctctcctcgttctcggccatgttcgggtggtagaacgggtagcgggcgcgccacgcgtcgatgtcggcgatccactggtcgtctcgcggggcggcgccgtccttctcgagcacctcgagcatgccggcgatgatacccttcagatcgcccacaatgggcacatcggcatcgcggatcttcccgatctccgccgggtcgatgtcgatgtgcacgatcttcgcgttgggggcgaactcggtgacgcgtccggtgacccggtcggagaagcgcgcgccggcggcgatgatgaggtcggcctcggtcatggccatgttcgagtacttcgccccgtgcatgcccaccggccccaagttcagcggatggctcgcgggcacgccgcccttgcccatgagggtgacgacggagggaatgcgcatcttgtccatgagggccacaatctcgtcggttgcctccgacgagatgacgccgccgccgacgtagagcaaaggttgttctgcttcttccagaaggcggcaggcggcgcgaatctgcttggcgttgccgcgataggtgggcttgtaggagggcaggttcaccgcatctgggtactcgaagaccatggtctcgccggccacgtcgctcgggatatctatgagcacgggaccggggcgccccgtgacggcgatgtggaaggcctcgcggatggtgcgggtgagctcgtcggtggattgcagcaggtaggagtgcttgaccacgggcatcgtgatgcccacgatgtcggattcttggaacgagtcggtgccgatgaccccccggcccacctggccggtgatgacgacgaggggcacggagtccatgtaggccgtggcgatgccggtcaccgtgttcgtggcgcccggccccgaggtgacgatggccacgccggcgcgcccggtggagcgggcgtagccgtcggccatgtgcacggccccctgctcgtggcgggcgagcacgtgggtgatctggtcggagtcgtacagcgcgtcgtagagcttgatggcctggccgcccgggtagccgaacaccgtcgtcaccccctcggcctcgaggctggcgacgacggcctcggcgccaagcatggtgcggccctgcttggccgtgcgcgagcccgcaccccggggcgcgccttgggtggcggcgttgcgccggaccggcgttgtcggcttgccctcggccggcgttgccgcgcttgcggctgcagtgctgtcgttgatatcgctcacaggatgatcgcccccttgtcggcagaagttaccagtttcgcgtacttggccaacacgcccgcatcgtgcttgggcgccggtggctcccacgccgcgcgccggcgcgcgagctcctcgtcgctcacgttcagcgtcagcgcgccgccctcgatgtccacggtgacggaatcgccctcgcagatgagggcgatggggccgccggccgccgcctcggggctcacgtgccccacggccggccccttggtggcgccggagaagcgcccgtcggtgatcagggccaccgaggtggaaagccccatgccgcagatggccgaggtgggcgcgagcatctcgcgcatgcccgggcctccggccggcccctcgtagcggatgaccaccacatctcccggggcgatcgcgccgccgttgatggccgcgcaggccgcctcttccgaatcgaacacgcgggccggcccggtgtggcataacatggacggatccaccgccgccttcttcaccaccgagccgtcgggcgccaggttgccgtagagcaccttgagggcgccctgggcggaataggggttctcgcccgtgcggcacacctcgccgtcggccggggggcagcatctcgccaggtactcgggcagaggccccatgcaggtgagcgcgctctcgtccagcagccccaaccgccccagctcccccatgaccgccggcacgccgccggcacggtacaggtcgatgagcgggcgcgggccggagggcgcgagcttcaccaagtgcggcgtgcgcgcgctggccgcatcccagtcggccatggtgatggggcaccccgctgcgttcgcgatggccgtcaggtgcagcaccgtgttcgtggagccgccgaaggccatgtcgcattccatggcgttgcgcacggccgccgcattcagaatgtccttgatgcgcacgttatcgcggagcagttccatcaccttcatgcccgcgcgcttggccagacgaatccgctcggagtagacggccggcacggtgccgttgcccggaagcgcgatgccgagcgcctcgcacaggcagttcatggagttcgccgtgaacatgcccgagcagctgccgcaggtggggcaggccgtgtcctcgaagtaggcgagctcctcttcggtcatggtgccggccgccaccttccctgccccgtcgaagagcgtgttcagatcggtggagccctccccgtccgggcccgtgccgggaagcatggggccgccggagacgaacaccgtcggcacgttcgcccgcagcgcgcccaagatcatgccgggaacgatcttgtcgcagttcgggatgcacaccaggccatcgaaggcgtgccccatgacggcgcattccacggaatcggcgatgacctcgcgcgatacgagcgagtagtgcatgccctcatggttcatggcgataccgtcgcacacgccgatggtggaaatttcgaaggggacgccaccggccatatagatgccggccttcacggcctcggcgatcttgtccaagtgggtgtgcccgggaatgacgtcgttgcgcgagctcagcaccgcgatgaaggggcggtccatctcctcgtcggtgatgccgtccgctttgagcaggctgcggtgcggcgcgcgcgccacccctcgcttgatctggtcgctcctcagttccataggcctcgcttcctctcgcgctgcgtctccaaatacacaaaaacccgctgcaagatgcaccgggccggaaaacgagacagccgtgcgacgacgcgcacagggaggctctacgacagataacggtgtcgccggtccgacgctacttgcccccttcggcccggcggtaagcctgtcaaccgaaaggtcgttcgcaccgaactgctcagaggtggcttttcgggtcgcccaccgcctgctcgcaccaaccgcaggctctcttcagatgggttcgcccctacttttcctcgtcaacgcatttcatcggtattaacttggctcggaagtttagcactcctgcgatcaatcgcaaggcttttcgctcatatttctacgggaatctgacgaaacgggcacgggcggtgacaaatgggccgcgccgctgtgacgtttgacggtccgtcatggaagctgaccggccattccgtagactgttcaggaaagggaaacgtctattcaggagaggatacggccatgagcaccgctaccgtccatcgtcgcaagctggcaactaccggggccgtcccctcgggcgcctccgcagcaaagccgaggtctcgctcccgccgcccttccatcatcggcggcccccgaagcaccgttcccgttcggtcgcaaggtgccgagcaaccgacacgggccgtccgcgccgcttccctgcacccgcgccccgctgccgcgggcaacttcgtgcccgatccggtcaccctcgggctgaccgagcgcgccgagcaccccatgctcgcaccttcgttgcacgccttccgcgcctacgcctcgaaccatccggagttctccgagctgaaggcccggggcctccttcccatgatgcgggcccaccaaggattgcgcctggccatcttcggcgtcaccgccgccttggtgctgcttctcgtagcgcttctggtctactggtggctccttccggctcccgccgccgccgactccccttacgccaccgccgatgccggcgcggcccagagcacggccgtggaccggtgggggcagggcacggtgccctccctgtaccagaacgacgcctcttgggccgacgtcccctacggccaggccacgttggcttccaccggggctgctcccgtggcgctggccatggcttacgtggccgcgaccggtgacaccgagtacacccccgtcgcgttcgcccaatgggccaccgatcacgacctgaccgccgccggcaccgacaccgtcgcctcgttcctgcaacaggccggctccgcgttcggcctggccgtcgagccggtggaagttgacgcgcagacgctgcggcgcgccatcgtctcgaatgtgcccgtgctcgtcgtcacccagcccggcaccttcgcgccgacaacctcggtggtggtgctcgacgacatcgacaaggactcccgcatcgtgctgcacgacccgacgagcccgagccgctcggccaagagctgggccttcgacgacatcaccgacgccgccgcgctcgctttcacggtgcatgaggcgtgatttgtccctaggagagccgacggctatgggctaaagtggaagggaacagccccttcgaaaggaagccctatggattatcgtcaagttaccgtgcaccccgagtcgcgcatcgcccccaacgccacgttggtgggccatgtggaagtggccaaagatgccacgatcctgttcaatgccacgctgcgcggcgattacggcagccgcatcgtcgtgggcgagggctccaacgtgcaggagaacagctgtctgcatctcgattacaaccaggactgcatcgtgggccgcggcgtgaccatcggccacggagctgtggtgcatggctgcaccctgggcgacaacgtgctcgtgggcatgggggccgtcgtcatgaacggggccgttatcggcgcgaactcgctcgtggccgcaggcgccctggtgaccgagggcatgcaggtgccggaagggtcgcttgtggtgggcgtgccggcgaaggtgcgccggacgctgaccgaggaggaaatcgccggcaaccgcgaggcggccgagggctacgccgtcatcggccgcgacctggccgagcagggcatcctctactggggcgccgacatccccgccgacgcgcgcaccatcgccctcgcgcgggactagctagaggcggcgcactgccagatgagtccgtaggggctgaccttggtcagcccctaatgctcgaaagccgtaaaggctatcgcattggcgccgatcatctcgcgacagggggggcgaccgaggtcgcccccctacagatgggctttcgcactagttttcacgagcgaaacgcgctatatcttgagaagaaccccctcaataagccggcagaagtcggcttctcttgtttgggccacctcgtgcacctcctcgtcggaagggctcgcgccctccacgccgcaggccatgttgcttacgagcgagatgccgagcacgcgcatccccacatggcgcgccgcgatgacctcctcgcacacggacatggccacagtgtcggcgccccaagagcggaacatctgaatctccgccggcgtctcgaaggaggggccgagcaggcccaggtagacgccctcctgcacgggaatggccagcgcctcggcagtctgccgggccagctggcgcagggccgggtcgtaagcgtccaacatggagaagaaccgcggcgccatggcggcgggctcggtaccggtgatggggttgcgccccgtgaagttcagctggtcggtcatgatgcagaagtcgccgacgcggtagctctcgttgatggcgccggcagcgttggtggtgatgagcgtaccagccccgagccgggccatgagccacacggggaaggcgacctcttgggcggtgtagccctcgtagccgtggagacgtccctgcatggcgagcacccgtttgccgcccagcatgccggccacgaagcgccccacgtgcctgttggccgtggagacgcccatgccgggcacctcgccgaaggggacgaagacgggatcggcgatgcgctcggccagaggaccgagccccgatcccaaaatcaacccgacttccggccggaaagcgcccaggcactcctccatcaccgcctgggcctcatccagcgtccccctcaggttttccagagccatagagaatatccttcctagcgtttcgccaccagtacgcggggtcttcccgtcagatcgtccacgatatgcacgtcgacgaatcccgcttgctcggccacggcacgggcggcgtccatgtgcccctcgtacagctcgcaggcgagcacgccgccaggcttcagggcccgggcggcccactgggcgagcggccggaacagatcgagcccgtcggcgcccccgtccagggcgagcgtcggctcgaaatcggccacctcgcgcggaatgccagccataacggcggtgggcacgtagggcgggttggagaccacggcgtcgaaggtgcccatgcgcttctcgccgatgccggagcccagcgagcactgcagcacggccacgcggtcggcaagccccaaggcctcggtgttttctttggcgagcgccaccgcctccggcgcgacatccgtggcgatgacccgcacatccgggtgctcgtaggccagcgagcaggcgatgcaaccggatcccgtgcacaggtcggccacgagaaggcttttgcgagtctcatccatgcctgcagacgaggggcgaccaaggtcgccccctacggaggagtcctccgcagcatcactcggttcggctgccgcatcagcgtcgtcgtcattcgcagccgaggggcgaccaaggtcgccccctacggagagggaagcagattcccccgcctcctccagggccttcttcacggcggcgacagcctcgcgctcctgctcggcggcctcggggttccacgccacatcgcgggggccgggcgtcggcagcgccgcaagcacttcgctcacgagcacctcggtctcgggccgcggaatgagcacaccgggccgcaccttcacgttgatgtgccgaaaagccacttccccagtgatgtactgcaagggctccccggccccgcgccgccgcacatagtcgcgcagcaccccacgctcgtcctccgaaagcagccgatcgaaattgacgaagagctgcgtgcgcgaaagtccgcaggcctcggagagcagccactgcgccgagagccggggattctcatcccctttgtcggccaggtacccttcagtccattccagcgctttctttatcgtccattcagacatcgggttaacggcctttcagtagtgtagaagtcaggcgcggacaggaggcgatggtgccgcgcgcagttcattcaatggcatccgtgaaagccgcaaccctttgcaagccctgccattgaatgctgtttgagcacggtgccgtcgcctcctggccgcgccgtcaggttgaggctaaacagcagcttccagcttttgcgcgcggtcggcggcctgcaaagccgtgatcacgtcccccaggttgtcgcccagaagcaccccgttgtaggtggagttgaacccgatgcggtggtcggtcacgcggtcctgcggcccgttgtaggtgcggatcttctcggagcggtcgccggagccgatctgggccagacgctcggcgccctcggcggcctgctgctcggcgagcatcttctcgtagaggcgggcgcgcagcacggccatggccgcgatcttgttctgcagctgcgacttctggtcctgggactgcaccacgagacccgtgggcaggtgcgtgatgcgcacggcggagtcggtcgtgttcacgcactgaccgcccgggccgccggcgcggtacacgtcgatgcgcaggtcgccctcgttgatctccacttccacctcgtcggcctcgggaaggacggccacggtggccgtggaggtatggatgcgcccctgggactcggtcttgggcacgcgctggacacggtgcacgccggactcgaacttcatgaccgagtacacgtgatcgcccttcaccttgaactggatctccttgaagccgccggcctcggagggcgaggcgtccatggtctcggtcttccagccctgggcagcggcgaagcgctcgtacatcttgtagaggtcgccggcgaaaatggcggcctcgtcgccgccggccgccgcgcggatctccacgatgatgtccttttcatcggccggatcggccgggatgagcatgaacttgatgtcctcctccagctggggcaaccggccctcgatggaggcgatctcctcctgggcaaactccttcatgtcggcgtcggagagcatctccttggccgcttccaaatcgtccatggccgccacgtactcggctgccttcttggcgagcggaccttgggaggcgtattccttggcgagccggttgtactccttctgatcggcgagcactgccggatcgcccatcttggcctgcagctcgtcataagcctcgatgatcttctggagcttctctttcatatcagtttcctgcatgggtgcttcctttgcgtgaaacgggtgtgttggaaagcgcccgaaggcgcaactttgcattgtagcagaagggacaagaccctggcgcgctatctacttaatggccgtcgtcttcggaatctggaacgttgcagacgccgccggggcagcgctcggtgaggtcgaaggtaccggcgtggcgtgcgccggcggcggccaggcgcgccttcagctggcggtgccgttcgcgctcgcggcggcggtgctcggccaggatgcgggccacggcgcggggctgctcgcggatctcgcgcagcgcgccgcccagctcggcgttcaccgaatgggccgtgacggaggccagaagcggcatgaggaacacggtgacgccgccggcggccacgagcacggaagcggtctgctgactcatggcatcggcggagacggccacgctggtaacggccacgatgataggcagcgccgtggtgcagtagaaggcgacggtcagccgctcgcgcacgtccatggtgcgcgactcgcgccccgtggaaagccccacgaagatggggagcgcccgcacgaacagcaaaagcaggatgaacagcacgagcagctccggctgcgcgccgatagcccgcacgtccaccttcgccccggacaccacgaagaacagcggcacgaggaaaccgtaggcgatggcgttgtgcttcatctccatggtctggtcgcctgtagggatgaggtagcgcaggatgaagccggcggcgaaggcgccgagcacgatatccaaatcgaagacggcggaaacagccgttaggccgatgagcagcagattcaccgaacggatgaccatctgcgtgttggtgttggcattggcgacgatgaaccggtgcacatagccgccgatgcgctcggcgatcttcggcacggcggcggccgccacggcgatggcgaggaacgcgaggaggatgaccacggtctgccaggtggcccgggtcgagagcaaaagcgccatggcgatgatgggaagcagctcgccccaggtgccgtaggcgatgatctcgttccccatccgcgtgcccaggatgccgcgctcctgcagaatgggcagaagcgtgcccatggccgtggtagtgagcgcgatgaccacggcgagcccgtccagctcgaaggccgacagcgtcggccaaatggccacgacgacgaacgcgatggcgaaggtgaccgcccaggtagcagctccgcgcttcccctccgtaccggtgaggttcttcggcgatatctcgtagccggcgagaaggaacaggaaggcgaggcccaaatccgacagcaggttgatggcgtcggtagactgaatggcaccgagcccgtgagggccgagcagcgccccggccagaagaaggagcaccgtctcgggaatcggcttgcccggaatgagcccggcgatgatggggcacgcgacggacaccagcgatatgagggccagcgagaccaaatcgatcgccatgacgcttcctttctctcccctgcgcgaacgcgcgcggttttcgagtccactataggcattttaacgaatgtgggcagcatacagggagcggcgatgacagactgttgaagacgtgagcgattcagccgcagattatctgccgtctgtgccacggtttcgtgtcagccccttgacgcggcgtcgcgccggcagcgcctttggctagaataccaggcagaagcggatcccagccgatgcgcaccaaggcgagttcggcccattccgcactatacgaacatccatttaggaggatatcatggctgaggtaatcaagacggctgacgagttccagacgaaggtgctcgaggcgaagaccccggtgctcgtcgacttcttcgccacctggtgcggcccgtgccgtatggtggcgccggttatcgacgagatcgcgaccgagaaggcggggcaggtggccgtctacaaggtggacatcgatcagagtccggacttggccttcaagtaccaggtctccagcgtgccgacccttatcgtcttcgagaacggccagatcaaaaatgagcgcctcggcgcccagcccaagcagaacatcttggcgatgctctagtttcaacagaggcaatgttcagcgggaacacggggtgccttgaccgagcgagttccgcagatggcatcgaaggcgcaaagctgcagagtacgcaagatcgcctcgccttcgataccatcgaggactgtttgagcgaatcaaggtaccccgtgatcccgcccgagggagacccacaactatgactgaacaagttaccgacaaccgcatgggcgcgccggtgtggcccgatgagggccaggaggtgtacgacctcgccatcatcggcgcgggcccagccggtctcacggcggcgctgtacgcggcccgcgccggactctccaccgcgctattcgagcgcctctcccccggcggccagtgcgcccaaaccgagcacttggagaactaccccggctacacccgatccaccagcggcttcgagctatccatggacatgtacgatcaggccctctccttcggggcgaaggccatcatggaagacgtcacctccgtggacttctccgccgagcccaacaagctcgtcacgcccttcaacacctacttcgcccgcacggtcatcgtggccacgggcgcggtggccagccagctcgggctgccccgcgaggatgagctgcgcggccgcggcgtatcctattgcgccacctgcgacggcaacttctatcgcgacaaggacgtggtggtcgtgggcggcggcaacacggcggcggccgacgtcatctacctcgcgcgcatctgccgcaaggtgtacctggtgcaccggcgcgacaagctgcgggccacggccatctaccatgaacgcctacgcgagctcggcaacgtcgagttctgctgggacagcgttgccgaggagttcatcacgggcgagaacgggcgcgtgacgggactcaagctgcgcaacgtgaagactgacgacgagcgagtgcttgccgcttcggccgtgttcatcgccatcggcatgaggccctacaccgcttttttggagggcgacctggaaaccgatggcggaggctatatcgtcgccgacgccatgggcagaaccacgatgcccggcgtgttcgccgccggcgacgtgcgcaccaaggagctgcgtcaggtggtcaccgccgtggccgacggcgccaactgcgcccagtccgcctcagagtttctggaggccaaggaggccattgaagaggctccctcggcggtataaagacgtcc

SEQ ID NO: 10552 - DNA, 4054 bp, Unknown
  gut microbiota DNA sequence
cgtctcatactgcatgagcatggtgcgcagcttcagggccgcgtcggcatcgccgtacacctgggccgcctcggcgagcatctccgccagatcggcctcggcgctggccacggtcatgcgagcgttgcgctcgcggtcggcctgagcctccagcgacataacatgctgcagctcggtgggaatcacaatgtcgcgcaccttcaccgagatgatatcaacgccccagccggccgcctccttttcgatatcggcctttatctcctcatccagctgatcgcggcgcagggccacctcggccaccgtggagcggcccaccgcctcgcgcagcgaggtttgagcgagatacgatatggccgcgtagtagtcctccacctccacgcaggccttttccgcgtcccacgccacccagaacagcaccgcgtcgatgttcacgggcaccaggtcggccgtcagcgtgcgctcggcgcggaagggcgtggcgatggtgcgctgatccacgcggatggtcccatattctaagatggggatggtggcgtagaagccgggccccaccacgcggttcagcttgcccaggcgcagcacgaccaccttttcccagcccagggcgatatgcaacgatgaacaggccacgagcgccgacgccagagccgcaaggatacccacaagcgagatgcgcccctctacgagaaggtcgcaaacgagcacggcggcagccgcagccacgaacacggcaacgctgaacacgagagcgccgttgcgcgacgacttcttgggcacgtaggaggttgccgccagcatttccgcttcgctgtcgctccacggccccggcgccgcttcccattcggcgcggcgcaccttgcgacttcttgcgcttttcgtcatcagtcgatccttcctttcgtcctgctcggcaaatcgccttgccgttgatcgtattctgactttttcgctgcgcggacgcgcctcagctccctgttgccgcgaacgccatccgcatcgcgagctcgggactctgagaaacgtcgaaagcggcaagccccgtcacgcagattctcagggccacaccgccaaggagcaggcagcaggcaatccaaaggcccttcgtgcgccgatcccctccaagataacgacactccaggataaaaggcgcgaccaaaccgaccagcacaagcaccacccaaaacataatcgcctcatcgcccaccagaagaacgcggccccctgcctctgttcgggtatcagacaacaaaaacgccgcaaaaagagccagcgccactatctctgcgacgatcgctgcgcgatccatgcggcttaagcatcgcagtgctgcgccaaacggcacgcgggaatcgacgagagatgcgacgccgaaggctacggccacaccgcacgacagcgacgaaaggcagaagagcgccggaacgagccatgtcccgaaggcgaccaccgagggaaactgcatgaggagcacccccgtgtaaaccgccgtgaccattcccgcgatcacggcggcgacggcggcgacaagcaccacaaagagcggcaatcgcgcgccaacgccattcgacgcaagagcgaagaaagccgctaacgcagccgaagctagaagcgcccacgcacccaccgtcacgacggtgaagcgaggagccagccataaagagagcactcgctcgggacgaccggcatcggccataaggcaaagagagcccgctgccaacagcaccaggcagagaacccagccgcgggacaaaagctcgtggggcactcgcaggttctttcgcaaccaaagaaccaggcgaggcggcgattcctttgcgacccaatggctcgatcttgcactgtagcgaccgatattggcgcattccaatacgcccataacgacacaggcgcccgcccccgttcccccgaaaaacaagtaggctacggcaagctcgctgaacaatcttctcccctgccttccaacgccgcccctacattctgcgaatcatctcgtccaagtgtatccactcaatcactttatcgcaagttattacgataattattttgagaagaagccgacaacgccagctccgtcatggacaagaacctcatggccgacgcctttgctgccgacacatgagcggccccgtcatagtcgtcggcgatgtagcccactcccaccaactttgcagttttgccctcctttacgccatcttccgtcttgcataaagcctcataccgatagctatataatgactttgaatgtgaatctatgcaaaggggcatatccatgagtgagtcgagagcgcatcagtcgggcagcagccacatcgcagctggcacgaaccccaaaagcaagccttggctgacacccgacgaacaaatgaagcacctgcgaagccaaggggttcgattcgacctcatgagcgaaaaggacgcgatctcctatctagccaagaacaacaacttcttccgcttgagatcctatcgccaaggatttgccagagtcgaagagggcaagcgcaaagggcaatttgcgaatcttgacttcaagatgctcgtcgacctttccgtcatcgatatgctccttcgttatgagatgctgcgattgacgctggatgtcgagcatttctccaaggtcatgctgctcacgcatattgaaaagtgccacgaggacggatacgagatcatccaagatttcctggcaagttacgatcacccaaacggcagcaaaacgcccaatcgactgaagcaagaaatcgagcgtggcaaaaatagcccttataccagagatcttatcgcatcctttcctgattttcgtttccccgtctgggcctttcaggaagtcatttcctttggcagctttaactacttcacgaaattctgcagcgagcgtttcgaggacaaaacactggcgaacgacttctaccttttgcaagatgttcgctccctgcgcaatgcctgcgcccacaacaattgcatcatcaacgatatgggagcaaagccaggcggcaagcgacccaatgacaccatatctcaagcggtttcttccgttgcgtcaatcggttccggtcagcgccgctccaaattgagcaatgagcgcttgcgtcagattgtcgcgacgctctacctccataaggaaagagcctcgtccggagtcctagagcaccgcacagaagaccttggaaagtttgccgagcgtatgaaaaagaatatcgactattacgacggaaacaaccagatcaaatcgggatttcgttttatcggcagcctcattgaatcttggtatccgacagcgcagaacgacacgcaaacacaagcacagtcataacaagcgcatagcacgcgacacagtatgctccttcgcgataacaatatgcgcacaaccccaaatcctcggaaagctctaccgcatttctgctatgataagccagcatcgaaaaacgagcgatcgttttgtacgagggtttctcgaaagggaaaccctctagttttatgcattcccgtgcaatgtccagaccccaatctcatacttttctgagggacttcggctcaggttcaatcacaaaaaatcgacgacgccgcagtgggtgtggtagatggcgattcggatgtccaggtcgtgctcggcggcgaggcgtgccaattcgggagacgccgacagttcggccgcggcggcgcgggcattcgccacgctggcctcgtaggggtcgcgtacgtcgccgagagccgcagcgatgcgctcggtgatggccgccaccgacccctcttccccatcgagggccgccttgatggcgccacagtgggtgtgccccagcactagcagaagccgcgtgtgcaggtgttcgcaggcgtacaccgcactggccagctcgatgggccccacgacgtttccggccacgcggatgacaaacagctcgcccagcccggtcatgaagatgtgctcgggcaccacccgggagtcggcgcacgtaatcacgcaggcgaaggggcgctgcccgttctcgaacagatcggcgatgcgctcctgggacaggtcgcgctcgtggtcgagcgcctccacgtagatgcggtt

SEQ ID NO: 10553 - DNA, 24959 bp, Unknown
  gut microbiota DNA sequence
attaaaggtggtgcgcattccgtgcggttggacggaggctcggggcgccgtggtaagatgacgcagaaatgagaaatgcgcggttgagcgatcgcgtggatgtgttaggggtttgcatgaattcgcagagtccgggtgtgggcggccaagggtcgcgcgatggttggggcgctcctcggagcgcggcctggcaatctgcgtcgcagcaatccggcccgtggcagccgcagcagtcccggccgcagcagcccgggccgcagcagcccgggcccgattatgtctatgaggtgcccgaagattttcaagggcaacagagtgcctggcagagcggcgtcagcgggaatgcgaatgggcatccccagggcggcggccccgcgtcgggcacgtcggggactggttctgggtcggcgggcccctcgggcagtcccatccccggcatgtcggccaaggacttccagaagatgtgccggtcggtggacaaggccttctcgcagttcgctcgcattgttgatgcgggggtaagcgaggcggccgaggcgctggggcagtcgcccgagaagaacttgaaggcccacaaggagctgcaggagaaacgcaagcgcgagaagaaggcgcgcaaggccgaagaggaggcccgacgtcgtgcggcgcagcaggcttgcgggcaacagccttacggccagcaatgggcgccgctttcgaaggcgaagaagcgcttccgctcatcgggcggtttaacggcggcaggcgttgtcatgacggcaatcgggggagcatgcacgttcgctttcggaacgtttaccgtcgtgggcgttgctacgggattggcggtagggccgggaggcatcatcacggctgtgctgttcggggccctcaccgttggcgctgccggcttgctcgcgaacggcatcgggcgcctccgcactgcctcgcaactgaaatcggtgcgccgcatcatgggggagcgcgaggtgtgcaccttcgacgaattggcgagccgctcccaggtcaagcgttcgcgcgtcgtagctcgcacgcgcaagcttttgaagcagggccttattccccagggacgcatcgatgacgagcagacctgcctcatggtgactgacggggcctttcaccagtatcgtcagctgcagatggctcagcgccagacgaaggagaacgagcaggcggccgcggcggcccgggcggccgaggagacggcgcgagcggcccacgagcaggatatctccgagcgcctgacgcccgagcagcgcgcctttgtcgcccgcggccgcgactacgtgcgccagatggatgagctgaacgccgccatcgacgacgtcgcggtgagcgagcgcattacggccattcaggacgtggtgggccgcattctcgcccgcgccgaggaagagccggccgtcatcgccgggctcgaccgcctgaccgcgtactacctgcccaccacggtgaagctgctcgatgcctacgaccggttggaggaggaacctattcagggcgagaacatctccagctcgcgcagcgagatcgagcatacgttggaagtgctgcacagcgctttcgagaagctcttcgacgacacgtaccaagacctctccctcgatgtgtccgccgacatctcggtgctgcacgccatgctcgcccaagagggactcacggaaggccccttcgatgtgaaaccgtaagcaatggcttcgagcgcctaaccccggacgctcttgagcgcgaggctcgcaaggccccctcgcaatttccgattcatccgtaccgtgcccgtgaaaggatatgctatgaccaacgaactgaccgacctcacgaacattcccgccccgacgctcacgctcgatcccgtaagcgacggcgaggtggccgaggcctccatcatcgaggtggacccgcccgccgcgcccagcctcgccgactcgctttccgccgaggagctggcccaggtggacgccttcgcccagcagatcgacatcgccaattcccagcaggtgctcaccttcggcgccggcgcccagaagaagatggcgtcgttctcggagacggcgctcgcgaaggtgcgcacccaggatttgggtgaggcgggcgatcttatcgccggggtggtgaccgagctcaagaacttcgacgtggatgacgatgacaagggcttcttcggcctgttcaagaagtcggcgaacaagatcacgtcgctcaaggcccgctacgacaccgccgaggtcaatgtcgacaagatcgccaagaccctcgagggccatcaggtgcagctcatgaaggacgcggccacgctcgacaagctctacgagctgaacctcacctacttcaaggagctgaccatgtaccttctggccggccgtcagcgcctggccgaggtgcgcgagggcgagctggccgaactatccgccaaggctcaggcctccggctccaccgaggacgccgaggcggtgcagaaactcgccgctgcctgtaaccgcttcgagaagaagctgtcggacttggatttgtcccgcaccgtggccatgcagatggcaccgcagatccgtcttgtgcagaacaacgagatgctcatgatcgagaagatccagacgacgctcgtgaacaccattcctctgtggaagagccagatgctgctggcgctggggctcgccaacaacgaggcggcgctcaaagcccagtcggccgtcaccgacatgaccaacgagcttctgcgcaagaacgccgagaagttgaaagcttccaccgtggaggtggcccgcgagtccgagcgcggcattgtggacatcgagacgttgaaggccaccaacgagaacctcatccagaccttcgatgaggtaatgaagatccaggccgagggccgcgccaagcgcgccgaggccgaggcggagatgcgccgcatggaagccgagctgcgccagaaactgctggaggtgaagtagcccgtgcgcgtgatggcgctggatatcggggaagtgcgcgtgggggtggcggtgagcgacccgggcgagcgcgtggcaagtccggtgtgcgtgatgcccgccgccgaggtgaccggttgcgccaagcccttccgccggcttctggaagactgggagccggagctgctcgtctgcgggctgccccgcacgctcgccggcgaggagggcccccaggcggcccgcattcgcaaggaggccgcgcgcatcagcgacgcctgcggcattccccacgttttcgcagatgaacggctcagctcggccgaggccaagcggagtttgcgtgaaaagggtctgaccgagaaggagatgcgcggcaaggttgatatgatagccgcaagtctgtttttgcaatcttggctcgacgagcgtgcccgcgcttgaggtatttgcggggctaatcgccgggccgtttcgtagagaaaggccgcaccttggctctccatggcaagaaggtcacctattcgtcccactcctctcgcgccgcccgggcggcgcacgccaagggggatcgggagttccgcacctacgacacgagcgccatcatgccgaagaagtcgccggcgcccttcatttgcttgggcatcgtggccgtcgtcgtcattgcggccgtgtgcttcttcgccttccgcggttgcgccggctcgcaagtggaactgctcgcgcctggccagtcggcggaggtgaccatcacggagggggagaccgcctcctccatcggcgacgcgctggtggccgcgcgcctcatcggcagctcgcgggagttcaccgacgaggtcacgcgcctggaagcctcctcggcgctcattcccggcacctacaccttccagggcggcagcacccccgaggagctggtgcgcgccatcatggccggccccgcccaggtgggcgacacgctcgccgtgcccgaggacatcacccgtgcggagctgtccgagctggtggcgagcgccacgggcggccgcatcaccgccgaggccttcctcgccgcttccgagaacgcgagcgcctatgcggccgactacgcgtttctggaaagcgccggcgagaactcgctggagggcttcctgttccccaagacctacgccgtgaccgaggacatggatgccgaggccgtcgtgcgcatgatgctcgaccagttcggcacggagaccgccagcatcttcggcgacttcgccaacagctacccggcgagccaggggctcacgctgtaccaggcggtgaacctggcctccatcgtcgccaaggaatccaccggcgaccaggaggtgcacgatcatgtggccggggtgttctacaaccgcctcgcctccgatcggccctacctggaatccgacgccaccacggcctacgaggtgggccgcgagcccacggccgaggaggtgcacgccgagacgccctacagcacctacgcgaatgcgggcctgcctccgacgcccatctgctcgccgggcctcgagagcctcaccgccgtgtgcgagccgacccaaaccgaggacatgttcttctacttctatcccgatgccgacggcaacatgcaggcggcgttcagcaagacctacgaggagcatcagcaggccatcgccgataattccaacgctggtggcgccgacgggtcgggcgatgctgccgccggtgaaggcgcggccgcctaagggcgcccttttggtcttcaggtgcgacccatggcgcttctcacccccgatcgctatttctcgcgcatcagcgccatcgatatcgagcgcgatttgctcgggtgcggcctgactcatgtgctgctcgatatcgacaataccgtgcgcgcccgggatacgggatgcgtgccgcgcgatgtggggatgtggctcggtcgggcgcgggaggccggggtgagcttctgtttgctctcgaacaactggcatgccgacgtgtaccgattcgccggcgagctggagctgcccatcgtggccaaggccttaaagccgctgccgccggcgtttctcgcggctcggcggaagatcgggggagccgccgccgacacggtcgttgttggcgatcagctggcgaccgatgtgctgggagcccatctgacgggcatgaaggcctatatgctgcagccgttggtcgagcaggatctgccccacacgctgctgctgcgcaacgtcgagcgggctattttgggagatcgcaagccggagccggcgatcaatatcgcggaaagcgaggcgagccgttccgcggcgcgccgcggacaaggaagcgccccgcgccgcttcgggcagggcgcgcagcgcggggtcgaaggggcctcgcgcgaaacgggaagggaatcgctgtgagcgagaagctgtatgtgctggggcatccggtgagccattcgaaatcgccggtcatgtacaacgccgtctacgagaaggcggggctgccctggcattacggtctcatggatgtgccgacggcgcccgaggccgaggcgttccttgcggctcgcgacttcctttccatcaacatcaccacgccctataagcccgaggcgttcgctgccgccgatgtgcgggccgcctcggccacgctcgcccacggggccaacgtgctcgtgagcaaggacggggcccttatcgcctacaacaccgacggccagggctgcgtggcctatttggaacgggccggcgtcgattttcgcggcgcgtccgtcgtcgtttgcggcacggggccgacctccctctccatcctgcacgccgtggcccaggcggggccggatgaggtgatcctcatcggccgcgacaaggccaaggcccgcaacgtcatgcgcacctacgccgacgagctgggggcgatggtcggacgggtggtggacatgcccgccttcaaggaagggcacctgagcttttccgaggtgtacaagcaggtgggcttcaagttcggcagctacgccacgtcgcggcaggccatcgcgggcgcggacatcatcatcgacgccacgccgctcggcatgagggagggcgaccctgcccccttcgacacggcgcttctgagcgcggaccagacggtgttcgacgtggtgtacggccacggcgagacggcgttggctcgcgcggcccgggcggcggggtgccggtttttcgacggtgccggcatgctcgtcggccaggccgtggtcacggtgggcatcctgcgcgacatcaccggcgaggcggccctcgatatccccgaggacgagctgttcgcccttatggcccaggcggccgggtttaatctcgcctaaggcccctcgggcgcgcggggatttggcggccgagatgcctttggccccataggcggcgcggcgctgtcctgctatcatagcggcaatggaaaacaccctagctcgaaaggtcgcgccataatgaaccgcactaagatcgcccagctctacgccgatgccgacgccttcgccgggaagaccgtcaccgttgccggttgggtcaagtcagtccgcgatatgaagaacttcggcttcgtcacgttgaacgacggcagctgcttcaaggacttgcaagtggtcatggaccgcgcgacgctggaaaactacgacgagattgcgcaccagaacgtgtcggcggctctcgtgtgcgaaggcgtgttgaagctgacgccggacgccccgcagcccttcgagcttgccgccgagagcattcgcgtcgagggcgcctcggctcccgactacccgctgcagaagaagcgcgccacgccggagttcctgcgcacccagcagcatctgcggccgcgcacgaacctgttccgcgccgtgttccgcatccgctcggtggccgccgcctccatccaccgcttcttccaagaccgcgggttcgtctacgtgcacacgcccatcatcacggcgagcgactgcgagggggccggcgagatgttccgcgtgaccaccatcgacccggcccaggtaccgctcgtgagcgaggaggctgccgcggcctcggacggcgcgcttgtggccggcgaggtggattggagcgccgacttcttcggcaagcccacctcgctcaccgtgtccggccagctgaacgccgagaacttcgccatggccttcggggatgtgtacacgttcggccccaccttccgcgcggagaactccaacacggcgcgccatgccgccgagttctggatggtggagcccgagattgccttcgccgaccttgaggacgatatggaactggccgagagcatgctcaagtacgtcatccgcgacgtgatggagcgctgccccgacgagttggccatgttgaacaagttcgtcgacaaggggctactcgagcgcctggatcatgtggcctcctccgactttgcgcgcgtcacctacaccgaggccatcgacatcctgctcgcggcgcaagcggccgggcgcgccttcgagtatcccgttgaatggggcatcgacttgcagaccgagcacgagcggttcctcaccgaggagcacttcggccgcccgacgttcgtgatcgactatcccgtcggcatcaaggccttctacatgcgcctgaacgacgacgggcgcaccgtggccgccatggactgcctcgtgcccggcatcggggaaatcgtgggcggctcccagcgcgaggagcgcctggaagtgctcgagcggcgcatcgccgagctggacatggacgccgagcagtaccgggcgtatctggacttgcgccgtttcggcacctgtcagcacgcgggcttcgggctcgggttcgagcgcttggtgatgtacctcacgggcgtgagcaacatccgcgacgtcatcccgcacccgcgcacggtgggcaacgccgagttctaagagggctcagggctgctcccgcccgcactttaccgtcccgaaacggtcgggcgcctctgcgtgcgctacaatgggtgccgatctgtctcgggcgccctctgtcggcgcgccctgcgagaaagctgcgtctatggaatacatcactgccggagaaagtcacgggccgaatcttacggccatcgtgacgggcgtgccggccggcctgcccgtgtccgtcgaccacatcaactccgatctggcccgccgccaggccggctacgggcgcggcggccgcatggccatcgagaaggatacggtgcgcgtcacgagcggcatccgcttcggtcgcaccatcggcagccccattgcgcttgaggtggcgaaccgcgattgggagaactggaccggccgcatggccgctttcggcgaggcgccgcgtgacttggtgcgtgaggtgacgccccggccgggacatgccgatctggtgggcgcgctgcgcacgaataccgacgactgccgcaacatcttggagcgcgcgagtgctcgggagacggcggcgcgggtggccgcggccggcgtggcgcgcgagtttctggcggcgctcggcgtggaagtgatgtcgtacgtggtgtcggtgggagatgcggccatgcccgaggagacgatggccgacgtcgccgagcacaagccgctcgacatcgagctgtcggagatgcgctgcccggacgcgaaggcgaccatcgccatgaagaaggccatcgaccgcgcgaagtccgacggcgagagcttgggcggcaccttccgcatcgtagtctgcgggcttgcgccggggctcggcacctacgccacgggcgccgatcgcttgacctcgcggctgggcgcggcgctcttttccatccccgccatcaagggcgtggaattcggcctcggttttcaggcggccgcgcgtcctgggtcgctggtgcacgaccccatcgtgctcgccgacggcgagtttcgccgcacgtcgaacaacgccggcggcttagaaggcggcatgaccacgggcatgccgctcgtgatcacggcggccatgaagcccatcccgacgctcatgacgccgctggaaacggtgaacctggacacgctctgcgtggaggaggcgtcgaaggagcgctcggacgtgtgcgcggtgccggcggcggccgtggtggccgagggcgaggtggccttcgcgctggcgaatgcctacttggaggctttcggagacacctgcatggccgatatcaaagcgaacatcaaggcctacaaggcgcggctgcgcaccatggggcgctaagatggcagaacgcatggagctgacccgcccggtctttttcgtcgggttcatgggcgccggcaagacgtcggtggcccggcgcctcgcccgcacgtgcggcgtggcctcggtggacatggatacctacatcgagcgccgcgagggcaagaaggtgaaggagatcttcgccgagggcggcgaggagggattccgcgccatcgagacggacgtgctgcgcgagctgggcgctaagcccgaccctttgctcatctcctgcggcggcggcgtggtggtcacgccggtcaaccacgacgtcttccgcgaggccggcttcgtggtgtatctggaagtgaccgccgacgaggccgccagccgcatcagcgatacgtccacccggcccttgttccagaacctggaagcggcccgggcccgctgcgaggagcgactgccgctgtacgaggcggtggccgacgtgcgcgtgagcaccgccggcaaatcggtgccggccatcgcgcgggaagtgcagcgcattttggaaaaggagggaatcctgtgcccgcaacaaagatagtggtcaacatccccggcgagacgccctacgacgtgcgcatcggcgctacggtgctcgccggcctcggcgagtcggtgcggcggctcgatggcgtgggagacgcgccgcacctgctcgtcctcaccgattccaacgtggggccgctgtatctggaagaggccaagtcgtcgctgaaggcggcgggcttccgcgtgagcgatatcgtcgtgcccgcgggggaggactcgaagtcgctcgcggtggccggggagatctggtcggccatggcatcgctcgggctcacgcgcgactgcgccgtggtggccctcggcggcggcgtcgtgggcgatctggccgggttcgtcgcctccacgtacatgcggggcatcccgtttgtgcaggtgcccacctcgcttctggccatggtggactcctcggtcggcggcaagaccggcgtgaaccttcccgaggggaagaacctcgtgggcacgttcaagcagccggcctacgtgtgcgcctccacggcggtgctcgccacgctggacgaccgcgaatgggcctgcggctgcgccgagatcgccaaggcgtcggtgatcgattccgacgagttcttcttctggatgatggatcatgccagcgccctggaggcgcgcgatccggtggtggtcaccgaggccatcgcgcggtcggtggtgttcaaggccaacattgtggccgaggacaagacggagagccgcggggtgcgcgagtgcctgaactacgggcacaccctggggcatgcggtggaggcgctcgcgggctatgggacgttctcccatggggccgccgtggccgagggcatgcgcttcgcggcgcgcctcggcgtggatgtggtgggcacgtcggccgagctggtggatgcccaggacgagcttttggacgggctcgggctgccggcgcttgactggtcggcgccggccgacgagatgctggccgccatgaagcgcgacaagaagacccgcgccggcgaggtgcgcttcgtgctgccgcgcgacatcggcgactgggaactggtggccgtgcctgacgacgtgattttggagcatctgcgccggtgggaggcttccaagagtttgtgacgttgacggcgatcggtcggggaaggtgctccgcagcccgctgcgcgcttgatccccttccgaacgcggcaaaagaaacagcgaagatgacgcacataagccggtaccatcctggcatcgttgctgctgaagtggaagctgtttcttaacggccgcgttctccagggggcgcgcagaggtctgcggagcaccttccccgaccgatcggagagaggcgaactttgttgaagaagatactgctcatgaatgggcctaacttgaatatgttgggggtgcgtgatccggctatttatggcacggacacgcttgaggccatcgaggagatggtgcgtgcctacggggccgagcatggctgcgaggtcgactgctttcagtcgaaccacgagggcgcgctcatcgatcggctgcatgcggcccatggcaactacgacggtatcgtgtacaaccctggggcgcacacgcactattcttacgctttgcacgacgctgtggaatgtatcgacgtgccggtggtggagattcacatctcggacattagcaagcgcgaggagttccgccgccactcggtgatcgcgccggcctgcgtcgcccaggtgaagggcctcggcaaagagggctacctgcgcgcactggatattctgctggaaaacgctgtggccgaaggtagcgaatagcccgatagggtaggacgccggtgcgacggggcgtcccgcgcgcaggttgcgcagcgaacggaacagtccagtgaactgttccgccgagcgagccattgcttgagcacgggatgccccgtcgcaccggcgtccggacgaaccaggaggaattcatgacggtattcgacgagttgaacgatccgaaggcctgcgagcggcacctggctcgcttgcgcgagacgtttcccgagctgggcgtggaggcgtttctcgtgcgcgacacgtcgaacatccagtggctcaccgccttcgacgatgtcttcgacgaggaggcggctcatgctctgtatgtctgccccgaccacgcgtggctgcataccgactcgcgctatgtgacggcctgcgagaacgccgcgcggctcaagcctttggaggtgagcgccgagcgcgaaacccacgcgcagtttgccgccaagcggtggggaggccggcccgtcggggccgccgatgcgcttttgggtatcgaggacggcgtctcgctcgccgagtaccgccgcttgcagaaggcgttcgccgaagccgacgcggaggagcccttcgtggagaccgatggcgtcgtggtgggcctgcgcgcggtgaaggaccgctacgagatcgcgcggatgcgcggcgcccagtccatcaccgacgccgccttcgagcacatcgtccgctatatgcgcccgggtatgatggaacgccaagtgcagttggagctcgaggagttcatgctgcgccatggtgcccagggcctggcgttcccctccatcgtggccactgggcccaacggcgcgagcccgcacgccattcccggcgccaccatgctggaggccggccagtgcgtcgtgctcgatttcggtgcccgctcctacggctactgctcggacatgacgcgcacggtcttcctcggcgagcccgacccagagatgcgggcggcgtgggatgcgctgcgggaggccaacgagtccgtggaagctatgcttcggcccggcgtcacgggcaaagaggcccacgagcgggccgaggaggtgctggcggcggccggcttcggcggccgcatggggcacgggctcggtcacggcgtgggtatcgacatccacgaggaaccggtgctcgctccgcgcaacgagcggccgcttgcggccggcaacgtcgttaccgtggagcccggtatctacctgccgggcaagttcggcatgcgcctggaggacttcggcgtcgtgaccgacgacggcttcgacgtgttcaccaactccacccacgacctcgtggtcatctagggcgctatgattggcggcgcgtgcatactggtcgtggaagacgacgcggctatcaacaaggtggtctgttcctatctgggcaagctgggcgccgagtgtgtgccggcgttctctggcaccgaggggctcatgcatttggaaggggagcgccgcttcgatctgctgatcaccgatctcatgctgcctggggcgccgggcgaggaggtggtagccgccgctcgggcgcggcacgtgcccatcatcgtgctgtcggctcgagccaccgtggccgaccgggtcgatcttttgtgccttggtgccgacgactacctggtgaagcccttcgatctggaagagttggccgcccgctgcgaggcggtgctgcgccgggttggcgggggaggtgcttccggcgctggcggagacggcggcgatgccgacttcgggaatcgcacctccgcctctgcatcggacagggccgctgggcccccggcggcttctcgggcctcggatggcatcgcctgtggtacaggctctgacgccgcgtcccagagccccgacgagtgtctccgctttggtagctggatgctggacgagggcgcccgcgcattcatggtagcgggcgagtccgtgcgcctgacgcgcacggagttcgacatcctgcatgcgctcatggctgccccgcgcagcgtgcacaccaagcgcgccctatccgaggctgccggcggcgatgcagcagccctggaggacaagaccgtctccacccacatcggcaacctccgcgccaagttgcgtctcaccggcaccgaccgctacatcgagaccgtctggggcgtcggcttcaaactgcgcgacgtgatctgaggcctctgcgcgacttccggaacgtcgaaatcctcgcatttctcgccatttccaaaaactattaatgacctgcggatatcctctataatgccagttcagaagcttggcgagaaattcgagggtttcgacatgacacaccacgtgcgtgatgcatggctgcaaagcaggctcaaatcttggcactttcttggaacttttcaggaagattctgcaaacgcgtcgcgtaggatagagggcaaagagcagttccgagggaaaggatgcagccatggctgaatgcgaagaatcccctgcggcgcgggcgatggctctcgattgcgcgcacctcacgcgcgtcttccatggaaagcgagcggtggacgatgtgtccctggccctggcgcccggggatatctatgggcttgtggggcgcaatggcgcgggcaaatcgacgctcttgaagctgatcgccggctatcttgcgcctacaggtggcgccgtggcggtgtgcggcgaggcgctgcgtccttgccaaacaagcgcgcgcatcggctgcctcatcgagcatccggcggtgaacccggcgctcacagggttcgagaacgtgatggtgcgggcactcgcccagggccttcccgatccgaagacctccgtggctgaggttatggaggccgtggggcttcgggaagcgggccgcgaccgcgccaagggctattctctcggcatgaaacagcgcttagggctggcgctcgcgctcatcgggcatccggacgtgctgcttttggacgagcccttcaacggccttgatcccgaaggggtgcggcttgtgcgtcgcctcctggagaatcttgccacgcagcgcgaatgcgccgtgctcgtcagttctcacgtgctcgatcagcttgagcgcctggtggatcgctacggcatcttgcgcgaagggcgtcttgtggcccagatgaccgccgaggaggtggaagaggcctgtcgcgactacctgtgcgtggaaactcccgaagcgccccgggctctggcggtgcttgagagcgctttcccggatgcctcgttcaccatgatgcccgacgacgccatccgcctgtccggcgtcgatgccagcgaagtgggtcgcgttctgctagcggctgaagtgcccgtgagcggcctgtatactcacgcccgcgatatcgaggactacttcatcgggctcatgggcggcaccagtttggtgcgaagttgctcgacggagtgcaccgtgaaaggaggcgagggaaatgcttaacctattccgcgcgcaatggtatcgactggttcgcaatcgggcgttttggggcctactggcagtgttcggcgtcctggtcttcctgtttgtgattcaggtggacgagcaatcggtgcgtgagggggtctaccggaattttcccgccctcggaggagcgcccgagggcgtaggggtgacgatggacgtcgaggcggtgctgggccagttttgggtgccccagttgctgctggcttttgtgggcatgctgtctgcggcctttttcggggacgactttagatatgcgggcgtgcgttcgcttgatgtaatgcctgagtttcgctggcggtatgtgggaagtgctgttttgatcattgtagtgattgccttgatcttccttgtggctgcctctctcgtcgcatggttggctcttctgcccaatccggtgatgagcgtggggctgagcggtgggcgctttttgcgttggggccttttgctggtggcgataagtcttgtctacgctatggccgcactggccgtggtggcagcgacgaatcgggctgggctgggaattattgcgttcttccttttggtgggtgttctccccgacgcactccttcagctggcttcgggctggctctcagcgtttcaaggaccgatcgccgcagtggtttcggcgttgccctccgcgcaactagggcaattgagtgcagagggctttacgcctgtggcaaccgatgtgttgatgctgctgccgtggcttgccgtcgctgtggcggggtgtggtttggtcatgcgacataaacggctctgatggaaatcgtgaggttgaaaaggagggccctatgatctggttgggagtgccctgccttttgttggcggtggccttggcggggtatgtggcggctacggagcggcagatgcgggcgttggccgacgcgctggcggtgcgcgggcgcgatctgcggcgggtgcggctgcggtttcccacgagggcggcgcgggccttggcccaggaggccaacgggctcatcgacgaggctgatgctgctcgccttgaagcggctgaggagcgtcgcgagctgcagcggaacctggcgacgttctcccatgatgtgcgcacgcccttggccggtgcccaaggctacctgcaactgtacgccgtggcggaaagcgacgaggagcgcagcgagtgcgtggcggcggctatcgaacggctcggtgtcatgcgggtgctggtggatcagctcttcgagtacgccaaggccgtaagcgacgatcgggagctggctcgtgagccggtggatgtggcggacgtgttgggggagtgcctggccgagctgtacccctctttcgtcgagcgcggctgggcgcccgaggtggcggccgacgaggccgtggaagtgcttgccgatcgcgaagcgctgacgcgcatcgtggaaaacgtgctgggaaactgcctgcgccacggcagtggggcgcctcgcatcgaactgcggggagctgttgatcccgcgcgtccttccgatacggcgtgcttcgcaggcgacggcgcagcggcagggtgcagtggctttgcgctctcgatttccaatgaggccgaggggctggaggctttggacgtctcgcggctcttcgagcgattctatcggggcgatgccgctcgcagcaccggcggcagcggcttggggcttgccatcgctgccgatttggcccgcgccatgggcatgagccttgaggcaacggtgccggatggccgcttcaccgtcacgctttggaaatagagatacggcctttgcggcgctcgctagcgctgccgcttgtcggcggtgagcggttgagtttccaccgtctaacctttgcgtggttgtgcttgcgtaatttccgcgagccgcgcccttccccgtgctataactgaaaccgtacagaggtaatttcgatgccggaaaggacggtgaggagacgatgacggaacggaagatcaatcgtgggagcgagattcgggccaagggaaaatccatggggcgcgagcgctcgggtgtatcggccgatccgtctgacagaccctcgccgcaagccggtggcttaaaggctgcgtcttcggccgaaggcgtccgaggcggtctttcgtcttcggtggaatctgcggaaggctcgcccgccgctcccgccgagcgctcgatgaccctgcgcgccgccctgtttctgacaggccgcatcgcccttatgctggtgggcatcgcggtcatggccctgggcatcgacatcgtcgtgaaggccgatttgggcaactcgcccatctccgccacgcccaacgtgctctccctcgggttcacggccgtgagcttcggcacgttcatgctggggtggcagtgctttctcgtgctggtgcaaatcgctcttcttcgccgggagttccgcttggtggacttgtggcagattcccatctcggtgttcttcggcgtgtgcattgacaccttcatggcgctgctcggccccgctgcgccgacgagctatgtcgtctcgtggctgtggctcgccggcggcatggccgttctcgcgctgggcattgtgatgacggtcgtctcgggcacggtcatgaactgcggcgaggccgtggtgcaggccgtagtgcgcaagacgggcgcccggttcggcaccgtgaaggtgggcttcgatctcgcctgcgcggccttggcgtgcctgtgctcgttcctgttcgtgggccatttggccggcgtgcgcgagggcaccttcgtctgcgccgccttcaccggcgtcatcgtgaacgtctacatgggcctctacggcaagctgcgcgacgcagcccgcagccgccgcgccgcagattctggtacggcgtcggaatgctgcacatcggctgaaacggtagggccctttacttccgagtgaataaatactaggcggtggctttttcgtctggatcgaacaagcagtctggctggtggacctgggttacgcgtggctggcgtcgcgcgtggccattgccgatcgcctttgctatgcgcaggatcgtgtaggctccgaagagggcggtgtatacgagcagcgatcgctgcgcggcgattccgccgtgcagagctgccggcgccagaatgaatgcgagatggtagaataccaggccgaaaaatacataggaaagccgctgcgctctattccaggttgttgcagtcataatgcgtttgaggacgttaagtgacgtgatccctaagacggttaagagtgcaagcagaatgagcgccacagccatggagacgacgatgttctcgtcgagattgttcgtacttaggagtcgcggcagataggagacggcataaacggtcacatggctcatggcgagtatccaggcgatgatcgatagctctccccgaatagggctgaggcggcgatgaagacgggaggtgctgtcgagacatcctatgagcatgacgatggcgaagagtgccagagcaagctcgcatcgttgtacgagttccaccaggattccccacagccagcgggggaggacaatgaagccgctggcgagatagagcgtatcgagggcgatggcgcagaggtagaagacgaccggccagcgtttgatcggttttcgaagcaggtagactgccgcgcaggtcgtagggaaagtcagaaggaagttcatggcggcctccttggtttcgagaagcgacggccgacagctcatcagagcgtgccggccgtgcgatgcggtttacgagaggggcgttcccgctagctcgttttcgatgctggcaagcgttatcgcggtgaggtgcgccagcgcttgatagaagctcccctcagctgcgctgttgagcttttcgagataggtcggcgcccagggaagcagatgctgatccagaaactcgccaacgagttcggggcgattgctggcgagccagctgagaagcgcgagcatgcgtccgatgtggtcgatcggctcccggctttccgcctcgtggagctcgatgccctgggcgcgcatccatcggctgatcgcgaggcacgaatcgccgaacacgaccgcctcggaatcgaggtacaccgatccccagggaggcgccgctagcttccgggggccgacgaaaaggcggtggtaggcgcggtctgtctcgtggatgtccgctctgcctgttcgggcgagctcctcggagacggcatgcaagtcttcggccgtgccccagggccattcttcggcgaggttcatggcggccaagccgcggataatctccttgcagtggggcagtgccgggcgctccaagaagagggtgcccaaaagcagggcgcactgctcgatatcctcaacgttcgcgttcatgactattccacttccagcggattggcgatgtagccttcgtcgagattgtaggtgttcgagtcgatggcttggcaggagccgataacaaggttgggtgccgtggtcggctcgggaaggggagcgacttggctcgtgtccccgtacttttctcgcagctcgtcaatggggccgaattcaagggctcgcagtgggcaggcgcctacgcacatgggctgttcctcgttgcgcacgcgggccagacagccgtcgcacttgcgggcgcgagagagttcggcgtcgatgcgcggggcgtcgtaggggcaggagtttcgacaggtgccgcagcctatgcagacttctggatcggaattcaccaggccggtctcctcgtccttctgcatggctccggtggggcagttttccacgcaggcggcgttgtcgcagtggttgcaggagatcgccagatggtagttgaatgccgtcttgttccaagcgccctcggaggtcttctcccagctgccgccctcgaagtcgtagatgcggcggaacaggatatcgggtcccaggtcgtggtagtccttgcagaccagctcgcaggtcttgcagccggtgcagcgggacgagtcgaaatagaagccgtactgggtcatgggttcctccttaagccttctcgacctggacgagcgtggagccggtcgacggacagttcttcgagatgggcgaccaatggtggccgctcagtgtgttggcgttggcgccgatatccacgccgtcaactatttcgcgacgatgtgcatgcggcattcccaccacgccgggcatgatgcgggaagtgacgcgggccatgatctgtacctcgccacggtcgttgaacacgcgcagggtgtcaccgttctggatgccgcgcgattcggcgtcgatggggttgatccacaggcagtggcgacaggcctgctggagctcctcgattacctggtagcggctgtggaactggtttttggccttccaagtggagaacaagagcgggtaagtgtcgttgatatcggccacgccctcgatttcggggaagtagctgggcacgggacgtactacgtcgcggtcgccgttgtggaacgtccaggtgtcgcgaatggtggccaggcgctcggagtacaactcgatctttcccgacggcgtcgtgcgcgggcggccctccgggtcgtcgacgtagtctttgagggcgatgaaaggaacggcttgcaccgggtcgcgccagaagcccatttcgagcccctcttggaacgacggtgcattgccgttgggggccgagggacggctgtactcttcgtagcgggtctccatccagtcctcccaggttttgccctcggtgaactcgtcgcgcagcccgaggcgctcggcgagatcggcgacccaatcatacgagagacggcattcgaactgcggttcctggacagggcggccgaagacgaacccgagagcggatccgccggtcacggtggaaaccatgttcatgcgttcctggtacatgagatcgggcaagatgatgtcgcagaagggcagtgaagtggacatgatgacgtcgcagccaaggatgaactcgcacttgctctcgtcttcgaggattgtcgcggcccaattcaggtcggagctggagttgccgaagcagccggcctcgtacagggcgaggaacttgatgccgacctccagcttgtcgccgccctggatgccgtcggtgagcgcggtcatctcgagcggatggtcgatagcgttgaaccggccggagatggagatcttcttggtgacgggattctctccgatgggcaccgagttccacataccgccgtcgaagttcatctgcatgcccttgccgttgaggccggggcatgtgccctcgcggccgatattgccggtgatgacgggaagggcagcgatggcggctgcgttccattcgccgttgtgccgacgctgcggcccaaaaccttgggtgatgaagcaggtttcgtggtcggtgatgaaatgggcgagataggtgatcttctcggagggaagcccgcagatgggggcggcccactcgggggtcttaggaatgttgtcatagccggtgcccatgatatagtccatataggaggagtttgccggcgcagattcaggcatcgtgtcggcatcaaatccgacgacatacttgtccaagaaggccttgtcgtgcttcccctcgctgataatgacataggcgatagcgctcgccagagctccatcggtgcccgggtagatggggaaccactcgtccggattgccagatgacccctctcccaggcggtaatctacgaaggcgaccgggatgcctgcctcgcgcgctttggccacctcgtagacctctcccatgccgcacatacgcgattcgcccgacccgcagccgaagaacagaccgcaatcggcgtctttgatggccgaggtgttgcttccgagaccaccagcacaatcgaatgtctggctgtcgaagccgaacaggtagttggctgtctgggcgatctggccattcgattccgagttaatggttcccaaatgaccgccggtcaaattgaaaaggcgctggatggggtagttgcgggttcctgttgcgcacaggaagaatgcctcgggaccgtaggtgtcaagggtgtagcggtacttctcggcgatgatatcgagagcctcatcccagctgatgcgttcgaactccccgcttcctcgtttgcccacgcgtttcatggggtatttgaggcgatcggggctgttgatccattttcgcaccgaacgagccttgaggcacgcgcggaacgatacagcgccgaactcgtcgtcgccgtcggtgtcgttgtcgatccagcgaagggtgccgtctacgacgtggcacttgagggggcatgcaacaaagccgcagtggcagcagctctgccagatgatttctccctcctcgggaatctcgttggcgacgacaccattcgaccccgtctgcgcgagctcacctttgctttgcgcgctctgaggggcgcagccgaatagggaggcggcggtgccggctccggccgcagttgcaagggtcgcgagtgtcgatcccttgatgaagcctcgccgcgagacggccctctccgttgcttttctggtcatagatatctccttcctctcttaggcggcgtcccaatagctgctgtgccgcttgacgacagtgtgcgcctagagagggggccatcgtgagacctcgttttggtgaaagggattcaaaacgtgtcaacctttttcgtgattttttgagaaacgcctggtgatcgcagaatcagcagagagtgtaaggcgtggttgtgctgagagggaattatcttttctggtagacttcagctgttcgcggatgaggaggggcactgtcgatgaaactgttcgatgcgggcaagatcatctcgtcgtctctcggcatggccgtggccatgtcgctttcgtcgctctttttatggaagagtgactggctttccgttccttctggttcctttcacggctcccatggcatggggatcgtcatcggcattgtgacgagcgcggcggtgatgttgtggtgttctctgtcgcggcaatcgctgcggcgcttcgggatgcaagtagtccctcctattgcccttgcgagcctcgtcgtctctggtttgccggtggtgcaggggtcggctcagtgggtacttggcatcgccattcccgtgatcggctcttacacgcttatgttctcgtggttctacgttgtgtctctgcgcgatatcgagggcagcctcatgaccctgctctttgcctgggtggtaagcttttttgtgagaactttcttcgagtcgtttacaggagcggcggtaaccttggctatttccgctaccctgatgagcgtctgctggggactgcttcttgtccaagcgcgtcaactcgatctcgcttcgcccatggcgtcgagctctttctccgccaatcgtgtgagctatgtccatgggctcgcaagtttctggcgtagcgtgctgtactgtggcaccttcgcctttctcgggggagttgttcgctttctggctgtcgacacgacggccatgaccttcatcaactatagttctgcgctcgcgggcctgttcgcccccatcgtccttatggcgctctggcggtttcggacggtgcggtacaacatcgatggcgtatttcgcctggcgttcccgctgatcgtggtcgctctcggaattctgccattcgctgctggcatcccctttgtcattctagcggcgttgctctacatgacatatagcttcttgtcgctgagcgttcaggcactttccattcagatttctcatgactacggcattgaccccgtgttctgtctcagcttccagacgctcgtgtgcgtggtcgcccagggggtagggtatctcctaggagcctgcgcgcccgcaggcgagtccttcggagtttccccctatgccgtcatcgccctcgggtcggtgtgctttctcgccttagcgctctacgtcacgcgagcgctgcatccctcgcaatctgagaaaagccgacccgtcgagtttctctcgctcgctagcggacgagtcgattgcgggacccagtccacgccgtttgccgagattgaagaggaagacgatggggctgcgtcagtctctgaggagacgatcgtccggccgcgctacgaggataagacggctcttcgctgcgatctcatagggcgcaagtacgctctgtcccagcgggagatcgaagtcatgcttctctttgctcgcggaaatactatcagctccatagcgggggagttgttcatatctgacaacacagtgaagactcacatgcggcgcctttacgcaaaactggggattcacaagaagcaagagttgttcgccctcataaacagctacgtcgagtgacccatatttttctttgcgaagagggcgcgagacggctatactgtaccagtttgaaccaaacgcggcggccgaccggagggtttgctgcggcgcgtgagcaggaaaggaaacatccgtggcaagcatttctaccgccgatttcaagaacggcatgtgcatcatcaacaacggcaagatgtgcaccatcgtcgagttccagcatgtgaagccgggcaagggcggcgcgtttgtgcgcaccaagctcaaggacatcaagaccggccgcgtggtcgactacaccttcaacgccggcacgaagttcgattccgtgcgtcttgagtccaagaagatgcagtacctctacaacgacggcgccgattactggttcatggacaacagcacgttcgagcagatgcccgtctccgccgatatggtgggctccgcggccgattggctgaaggagaacgacgaggcgacgctgctgtacgccggcgacgagctcatcagcctggagccccagatgttcgtggagctcgaggtcacccacaccgaaccgggcttcaagggcgacaccgccaccaacacgctgaagccggccacgcttgagacgggcaaggaggtgcaggtgccgacgttcatcgagatcggcgacgtcctgcagatcgacacccgcgacggccgcgttatcaagcgcgtttaaagttccgccgccgtttcagtgatcttgggcctcccttcggggaggccttttttgtgctccagacaaaatgccctcgcgattttcccgaaatgttgcgtttgttagcattcgcgggctcatttccggagcgccccccatccagttcagtgaatttgggcataattcctccgttatgccccccgttatgagctgaaaacaggatccaaacagggtcgtgtgagccatcttcatgctaacaaacgcaatttcttggaaaaaa

SEQ ID NO: 10554 - DNA, 14433 bp, Unknown
  gut microbiota DNA sequence
gaagaaggcgaaggcgacgccgccggggccgacgtgggtgccgatgacggcaccgacctgcgtgaggggcagatcgttcggcacggcggactcgtcggcggccgcttcctcggcggctttcgcctgcgccaggctgtcggcgatgtacttgcgggccgtcgcgtcggacaggcccgagtaggccacccagatgggccgcgtgaagtcgatgccgccggtctcgtcgatcttctggaacaccatgttcttcgactgcttcgatccacgggccttgccgagcaccacgacgtcgccatcgacgacgcccaccacgggcttgatggagagcatgccgcccacgagcgccgccgctccagaaatgcggccgccgcggcgcaggtactccagcgtatccagcgaggccacgagccggatgtccttcttctcctggttgaggcagtaggcgatatcttgggcggaaagcccttcatcgcgcagggcccaggcgcgctcggccaagatacgctcgccgatggtggcgttctcgctgtcgaccacgaagaccgactccttgaacggggccgcggcgatgcaggcgctctggtaggtgccggagatgtggctggaaagcgtgatgcagacgacctcgtcgccggcgtcgacggcctcttggaagaggtcttggaacaccataggagggatctggctcgtgcggggcagatcgtcggtttctacgaggcgctcgaagaactcctcgcgcgaaaggtcgacgccctcggcgtactgttcggagccgaatgcgatggtcatggggatgatggtaatgtcgtgggcgcgggcgtagccctcttccatgtccgccgacgagtccacgatgatgcgaatggccacaatgcctccctcgaagtcgtttcccttattttatcgtccgtacgcggggcctcggcgaggcggcgtaaaggcaagtaaattgttcataatttgggaacggtttctcgattgacagcgagccgcaaaagtggccactgggaagtgtttagccttccaccagatcgagcagctcctggtgggaatggatgccgagcttcgcgtagacgtgcttcacgtgggccttcacggtgttgcgggacacgacgagcgcctcctcgatgtaggcgcggtcgcggccgcgggcgagcatggcgaacacctcggcctcgcgcggggtgagggagaactcgcttgcgatggcctcgcagcgggaggcgaaggcctcctcgggggtgcgggccgcgggcatcggcagcggcactggccccgttccggtgcccggtaccgcttctgctcccgcatcggctcccttcccggcggccgttgcccccaccagcaccggatcgatgccgtcgatggctccggcgaaggtgaagcgtttcagcccgatggtcacgtaggcggcgaacaccaaaagcagtactgcgggggtggccacacgcagggcgggcatgcttgccgcggcgccgttggcaagcatgcccgcggcggctcccgtaagcgatcctaaggccgagacaccgtttccccaggctaccgttgtgatggctccgagtgggttgcgcgcggcaatggtgatgagcgccatctgggcggccatgatgaacaggccgttgcctgcgttcagcagcgccacgtcggccgcaccgctgtcagcggcgagcaggggctgggttgccagaaggaacccggccatcaccgtgagggccgacagctgcacgagaccgtcggcgggaaagcgccggcgcgaacaagtcacgtaaagggccacgagggcaagcgggatggccgagagaaacgacatgcgcggtgtgcctgccacctccccgaagcgcagggcgaagccgaaggccacctggaacaaaaacaagcacacgaacagggccgagaacggcgcgaggaacgaggccggccgcgtgacggcgatgtcgctcggcgaaggccggtcgtgggccatgtcgaagcaaaggcgggcgccgcgggcggtaagcgcgatggccgccaaggggaaaatcaggaagagggcggttccgacccacgggggcagaagcgacgacgcggggctcgccgccagctgaacggtgtaggccgcagcgatgatcacggccgtcgtgtgcatttcgaggcacgcgagataaagcgccgtcgacaccgtggccaccgatcggccgatggcggcgaggctcgcacccgcaacgaggagcgccggcgcggaaaacccaagccccagggacagaagcgcgccgccgcctacaagacaggctaccgccacggcgacgatggcgcgctcccgcagaaggcgcggggcgcggtaggccgcaagcccaaggccgagcaaagttgctgccgagaacgtgacggagatgtcgcgggcgaacatgaagatcgcgtcgaactgcgggaagagcgagccgttcatgagggaggtggtgccgagcgtcaaaagcagcgcgacgaacccgcacaaggggcttgccttttctgcggtgcattccgtttccatgtcgctccctttcgctccctttcgctccctttcgcctccctccattctacacgcgaaaaccccctgtccgcacgggacagggggttcgctcttataaccgctggtcgctggaggggaggcgcgaccggcggtatcccttgggaagggcttgacgaactgccttcgcgggatgtggaataaacggctcgcgaaggcgaaggggccttgaaggcgcggacgccttacgcctgcccggttgccgccagcatgccggcgcggcggccgaaggtcatggtgcgcccgcaggcaaggcccgtcagcaggttcgggtagctcaccgagaagaagccgcccgagtcgttgccggtgaggtacaagccctcgatggggtcgccgttctcgtcgcaggggtgcatgttcgtgtcgatggtgacgccgtcgagcgtcgccaagaaccacgccccggtgcgcacgccgtagaagggcggcgtgtcgatggccatcaggcggtgcttctccttgtagtagtcggtgtcctcgccggctgcggccatctcgttgtagtgcttccacgaggccacggtggtctccacgggcaggttcagtttctcagcgagctcttccatggtgtcggccttctgcacgtaaccgtcctcgatgagcttctcgatcataccgtccaccacctgcatggggatgttgttcttcgccccgttggggaaggggaacagccggcagcagcccacctcgtcgaaggcctcggcctgcgcggcgtggttcgcgtcccagatgtccacgtaggtctggtgcggctgcatgatggtggagtgcagcatgtagtcgtaggggccgctctcgttgcagaagcgctcacccttcaggttcagcttcaggaagggctgctcgccgaaccagaaccagcggccgagcaccccgtcgccggcgtactggtcgggcttcacgcaggcgcggttgaaggtgcaggccgcgccgagcggatccatggtggcgccgagccacagcgccgccttgatgccgctccccgtggggttgccgccggagccaggggctgcgatgcggatcttctggttccaagcctggcggtcctccatcatctccaggttgttgccgtagccgccggtggagaggatgacgcccttgctggcgttgatgcgcaggtaggggcgctcgccctgcacgtcgcgggcgatgacgccggtcacgcggccggtctggtcggtctcgcacttgatgaactcggtgtaccagcgcacctcggcgccctgctcggcggcgtaggccaggatggactcggcgaagccccactcctcgtcctcggccacggagtcggtcttttgcggactgtggccggtggcgaaggccttgtcgcggcccgggtcggaggtatcgcccacgccgccctcgaattccatgacgagcttgccgtcgcgctggatgatgtcggtgagccagtccaccatggcgccggactcgtcggcccacagcttcaccaggtcgtagttcacaaagccgttggcgtagcggacgatgtcctcgacggcctctttcttctcgatgcggaactccgggaactcgtcgaaggaggcctgttgcaggcgcgagtcgatggcgccgatgtcctcgcggacgttgtgcggggtgccctggcggtcgatgccgagcacgcgcgcgccgttctcggcggctgagatcatggccgggataccgccggtgcccatgcccacgacgagcacctcggtgtcgatggtctcggcgatgtcggcctcgtcgatgacgggcggcgctcccagccaggaggggccgccgaagtcgccggtgctcgggttggcgggatccgcggttgcatagccttggccgcatccggacagcgtgccggcggtcagcgcgcccacggccgcgaggccggcgcccttgaagaagttgcggcgggaaacgttactctgcattgggggcctcccatccttcgggcagggtcaggtcgtggcactcgttgcagacgagcacctggttctcgtgggctttatggcagtcgccacattccagggccgcgtcctcatggttggcatgcgggttgtacttctcgtcgttgccggcgaatccccacaggcccgcggtgatctcgtcgaaggacttgcctccgtggcactcggggcgcgcgcagaactcctcgcttgcgaactgcttgcccgtggcgagcatggtgccgtcctcagtcatggggtagttgtcggacacccaggccatcgcctccgagatttgggtcgtcagctcggcggtgtggcagtcgaggcacgactcgccggccttcgcgtgcacagtcacgcccagctgcgggtcgccggagtcgtaggtctccacgtagtagtccatggggctgtggcagatggcgttgcagaagctcggctgctcgtgccacacccagaacccggcgccggccaccacgatgacggccgccaccacgccggcgacgatccacccgcgcttgggacgtttcttgggagccggtccgcccgcggccgtcgctgagccggcagctgcggccgagcttgtgtccgttgccgggcccgcatggctcggcgcccccgcggccctcttctcttcatcgatgctcatgatcgcttcctcccttccttgtcgtgacagaaacgatggcgcccagtgtgcgccgcgccgccccgaaaagctattaccccagcggggtaaacttcgcgtttagcctgataaataagggatattaaagggcgagcgcttgtttttcctgccctaagcggagggagagcttgaggatgctgttttccatctgcgagtactgcggtcatgaatgttggttccatcgatcttatcccgcgaacgcttttccacggtcgcggcacggtatcgtgcttgcccatgaacgtgtatctttcccataacacggcgctgctgttctggcgcgcttggtccgccgccgcggctattcctctgtgtgtgttccacgatttgggcgtggcggacgcgtcgctgtttcctgcgactctctttccgacatcggaggtgcttcgcaatgaagcggtgctgagcagggatgtgcggacgatcttggaggacgcactgcaaagcctcgcgggcgcagatccggtgcgtccggctgacgcgggttcggtggcctcgccggacggttctgcggcgtctgcggccgccgtcggcgggatgctcccgcaaactaccgccgtggcgtcggcgctgaaggaggttgttcgctctcggggagcagcgccgctgcacatcatggtcgcaaagggtcatggcacgcggaactccagcgatcttatacgccatcgctcggtcgccgcttttcctcggcaagctttcatcaaagtagctccgggcgtgttcgtctgctctcctgagctcgtcttcgttcaaatgacctcttcgttgacgcgcggagggctcttggcggtcggttacgagttgtgtggctgctatccgctgggggaggagtgcgtcggtgccctcgtgcgccgtcctctttcgtcaccgcggcgccttacggcttttgccgcccgtgcaaagggtctggcgggcgtgaaggtggcccgatcggcggcgaagcaggtgcttgccaagtcggggtctctcatggagaccgaggtatccatcattgcgttctccctgttttcccagggagggctgggcttgagaacgcctcttctgaacgaaccggtcgcattgtccgatcgtgcgaggacggccacgggattgagccgcgtggtgtgcgattggctttggcccgctgagcgagttgtgctggaatacgacgggcacgatgcgcatagctcgccgcagcaacgagcccatgatgcccgcaagcgcgatgccttgcgcatcgacggcttcgaccttgccgttctcacgagctcccaatttcaccacgtcaaccaatgcactgagctgctgcgcggggttgcccgaagcgccgggcaaaggtcgcctgccctgaagctcgagcacctcccgcgtcatttggccttgcgcgagcaggtacggaaacatcatcgcgcccattttccctcgcgttttcggagggcgcgttcgtaagatgcgcccgtaaggtatgtctgcgggacgtatccgggggacgcatccgcaggcgtgcctgcggggggcttcgcaaggcgcgggttccggaaaggtctcttcggatcgcctcggccttggctgcccggttcgcttcgggaaaagcgtcgccgctgcagagaaaagtgcgattgtgcgagtcttgagaggtgaaaaactcgcacgatcgcactttttcctgcatcgggggccttttcgagcgctttggactcgcacaatcgcacttttctccgcacgagatgccaaaaacttgttttggagggtctcggagccgggaaattagctggaaatacgatagggaacaagcggttgttctctgcatcggggatctcggagctgggcgattggttgggaaggtaggggaagggcgggggagggaagttcgggattcgccccttcggccgcttcgttgatgtttcttgtcggcaaatcgggcggcgtggcgcggggccgtggtaggcttcctctataatccgaaacttgatctttgactaacctgtgtataaggaggtgtgagttcatgccacggcttcagatcatggacacgaccatccgcgacggtcagcagagcctctgggccacccgtatgcagatcggcgacatgctgccgatcctgccgaagatggaccgcgtcggctactgggccatcgaggcgtggggcggggcgacgttcgactcctgcctgcgctttctggacgagaacccctgggagcgtctgcgcgccatcaaggcgaacacgcccaatacgccgcttgccatgctctcgcgcgggcagaacctcgtcggctacaagcactactccaaggagatcgtgcatcgctttatcaacgcggcgcaccgcaacggcgtcgaggtcttccgcgtcttcgacgcgctgaacgacatccgcaacgtcgtggacaacgccgaggccatcaaggagtgcggcggtctgttcgagggcgccatctcctacacgatctcgccggtgcacacgctggactcctacttggaatacggccagcagctgaaggatctgggcgccgacaccatcgccatcaaggacatggccggcatgctcacgccctatcgcgccgagcgcatggtgaaggcgttcaacgaggaaatcggcctgccggtgcacatccactgccactatgtcggcggcatggccccggccaacatcctgaaggccgccgaggcgggcgtggccgtggccgacacggctcatgctccgctcgcgttcggcaactcgcatccggcggtggagatgatcgtggccgctctgaaggagagccgctacgacaccgacctcgacctcgatctgctgttcgagatctccgagtactgggaggagatgcgcaagcgcggccactacaagcgcggcgtgtcctcgctcattcatatgcaggtgtactcgcaccaggtgcccggcggcatgatgagcaacctcatcagccagctggaggtgcagaaggccgcgcaccgtctgcccgaggtgatggccgagattccgaaggtgcgcgccgaggtgggctatccgccgctcgtgacgccgatgtcccagatcgtgggcacccaggcggtgttcaacgtgctgacgggcaagcgctggagcgtcatctccaaggagatgaaggactatgtgtgcggctactacggcaaggcgccgggcaacatggacaaggaaatcgtggcgaaggtggccggcgacgccgagatcctggatccgaagatcgcccccggcacgctggtgaccaccacctacgacgagtgcgccgccgagattggcgatttggcccaaagcgaggaggacgtgctcatgtacgccctgttccccaacgaggcccgcacctatttgagcaagcaccgggtatccgagaaagtcgatttcatgctggagcaggagtccagcgccaccaaggaggacgattacgtggacatcaatcagattcgcgagctggttcgcgttgccgaggagagcggcgtcggagagatcgtcgtagaggaagagggcatgcgcatcgctgtccgcatgccgggtcagggtgctccggccgctgccgtgcccgccgctccgcaggcccaggcggctcccgttgccgccgtgcccgcgccggccgccgaggagccggcgagcgatcgtccggccacgtggaagccggtagtggctcccatggtgggcacctactacgaggccccggctccgggcgagccgcccttcgtgaaggtgggcgacgaggtggccgccggcgagacgctgtgcatcgtggaggccatgaagctcatgaatgagatcgccgccgaagagatgggcaccgtgcgcgaggtgtgcctgtccgacgccacgccggtggagtacggcaccgtgctcttctacgtggagccccacgaccccacgccgggcgcgtaggagacaagcatgttcgagaaaattctagttgccaaccgcggcgaggtggcgctccgcatcatgcgcgccgcccgcgagctgggcgtgaagacggtggccgtgtactccacggaggacgccgacacctatccggtgcgctacgccgacgaggccgtctgcatcggccctgcccagtcgaacaagagctatctggtcatggcctccatcatcgccgcggcgaagaacaccggcgccgaggcgattcatcccggctacggctttttggccgagaacgcggagttcgcccgcgcctgcgccgacaacgacctggtgttcatcggccccgcccctgagtgcatcgaccgcatgggcgacaagtcgtcggcccgcgagaccatgaagatgtgcggcgtgcccacggtgcccggttccgacggctgcctggatacggtggaagaggctgcggccttcgccgagaaggtgggctacccggtgctcatcaaggccacggccggcggcggcggcaagggcatgcgcgaggtgcacgacccagccgatctcgcggcccagtacaaggccgcccgcaccgaggccggtgccgccttcggcaacgacggggtgtacctggaaaagctcgtgctgcgcccgcgccacgtggaggtgcaggtgctcgccgacgaccacggcaacgctgtggcgctctgcgagcgcgactgctccatccagcgccgccatcagaagcttctggaagaggccccctcgccggcgctttccgagaacctgcgccgcgacatgatgaaggcggccctgaaggccgtgcgcgccgtggactaccgcaacgccggcaccatcgagtttctgctggacgagcgcggccagttctacttcatggagatgaacactcgcgtgcaggtggagcacccggtcaccgaggagatcaccggcaccgacatcatcaaggagcagctgcgcatcgccgccggcgagcccatgagctgcgcgggccgcgccccgttcacgccggcgggacacgccatcgagctgcgcatcaacgccgaggatcccgagcacggcttccgcccgtgccccggcaccgtcacgcgcttcgagcccccggcgggccccggcgtgcgcgtggagacctacctgcgccccggttcgcgcatctcgccccactacgactcgctcgtggccaaggtggtcgtgcacggccaggatcgcgccgaggccgtcgcccgcgccaagcgcgccttggacgagttcgttattgaaggaattgcaacaactatcccgttccacaaacgcgtgctcgataacgaggtattcttggccggtgacgcgacaaccgactttatcgaaacccagatgggagacgtactatgacagaccagatgaacgtcgagggcctttccatcgccccgggggtcatggagaccatcatctccgtggccgccagcgaggtggacggggtggcctcgctgggctccttcgccacgagcggcatccgctccatgctggcgagcaagccctccacctccggcatcgagaccaagatggacgagggcggcaagctttccgtggcggtgcacgtggaagtctactacggctacgtgctgcccgagctggcggcccagctgcgcaccgccatcgccgaggcgctggccacccaggctggtgtggaggtgtcctcggtggacgtgtacatcgacggccttcagttcaaggcgtaggtggcgcgcggtatggctccgagaatccacgagcgcacccgcgaccgcgtgagcgcggtgcaggtgctctatacgagcgagctgacggggaaatcgcccagcgagctgctcgattgcgggctgtgcctggtggctcgtgaggctcccgccgatgaggccgaagccgccgaggcgggcgcgttcggccgcatcgaggagggaacgctgaccgactacgccttggcgctcatccacggcgtggaggcgaaccaggctcaggtagatgagcgtattgaagcggcgtccgagaactgggcgctctcccgcatgcccatcgtggaccgctccattctgcgcttggccgtcttcgagatgttcaactgcgacgacgtgccggtgtccgtttccatcaacgaggcggtggagctggccaagggcttcggcggcgaggatgattcgccgcgctttgtgaacggtgtgctggggcgcatcgcgcgttctatggaaggtgacggcgcgggcgcggtcggggtggccggggctgatgctgccgccgccggcccggtggatgccctggtgggcgcctcgggcgcggccgcctgcgtgcaggtgggggtgtaggcgccatggccgacgagcagggtcgcaccttcgaggacgtgcacgagcgtctttccgagatcgttgacgaggtgtccgccgaggacatctcgctggacgacgccttgaagctgtacgaggaggccgtgaagctgggcctttccgcgtgcgacttgtccgagcaggacttggacgcgtttctggcgacggaagaggaaggcgagtcttccccggctgaggagggcggcgcaagcaccgcccctacgggttcaaccgacacgacgtcttccgctgacgcgcccgcgcccggcgaggcctaaaggaaaccgcctatggatgtcccgcgcatactcgatgctatcagctcgccggccgatttgaaggtgctcgacaatgaggagctggccattctcgcccgcgagatccgccaggagatcgtcgccaccacctcggtcaccgggggacatgtggcgtcgtctttgggcgccgtggacatcatcgtggccctggagagcctgctcgacatgccgcgcgaccgcgtggtgttcgacgtggggcaccaggcctacgcccacaagctgctcaccggccggcgcgaggcgttcaaaacactgcgcacctacggcggcctttccggcttcaccaagccatcggagagtccctacgacgtgcacccgtcgggccatgcgtccgactcgctctccatcgccacgggtctcgcgaaggcgcgtcagctgaagggcaccgacgagaaggtggtggccctcatcggcgacgcgtcgctcgctggcggcatggccttcgaggcgctgaactacatgggcaacgagcagttgccgctcgtcgtcatcttgaacgacaacgagatgtccatctcgcgcaacgtgggcgccctcatgaagcatttgggcaacatccgcgccaacagccattaccgcgaggcgcgcgaaggcttgcaggcggccatggagcagggcggccctgcggcccgcggtctgctcggcttcggcaagaacatgaaggaatccctcaagcagatggtgattccccataccatgatctacgaatcgctcggcattgtgtgcaccgctcccatcgacggccacaatatcgccgagctgcgcgacgttttgtcgctcgtgctggaaatggacggcccggcgctcgtgcacgtggtcacgcggaaaggggagggctacgagcccgcccgccgcgatcccgaggcgttccatggcaccggtccctacgatattgccacgggccgcgcgttgaagaagcccgggcgcgcccccagctacactgaggtgttcggcgcggcgctcgccgacgaggcggccaacgatgcggatgtggtggccatcacggcggccatgaccggcggcacggggttgaagaccttcgcggcggagttcccctcgcgttttgtggacgtgggcattgccgaggagcaggcggtgggcatggcggccggcctctcatcgggcggcaagaagcccgtggtggcgctgtactccaccttcatgcagcgggccgtggaccagatgatcatcgatgtggccctgcccgaggccaacgtcgtgttcgccttcgatcgcgcgggcctggtgggcgatgatggccccacgcaccacggcgtcttcgacatggtgtacacgcgcatggtgccgaacatgcgggtgctcgcgccctccgacgaggcggagctcgtgcacgccctgcacacggcgctcattttggaaggccccgtgtcgctgcgctacccgcgcggcgaggccgagggtacgccgttgccggatgtgccggaaatcttggaagtggggaagtcccgcacggtgcgcgagggggacgacgtggccctgctcgccttcggtcgcatggtgggccaagcccgcgccgccgccgagctgctgtccgccgagggcatcgagtgccgcgtggtggacatgcgctgggtgaagccgctcgacgaggaggccatcgccgctgcggcggcctgtcgtttggtgatcacggtggaagaaggcgtcatcgcgggaggcgccggcgagggcgtgttggaagtgctggcccgccagggtgccacgacccctgccgtcacgctgggcatccccgaccgcttcatcggccagggccccgtgtcccagctcttcgccgacctcggcctgaacgccgagggcatcgccgccaccgtgcgcgaggcgctgcgatagcgccgttcgcgctcgtgccgatctggattagaccagcttcttctccatgatgtagtcgtccatgacgtagccgtcgccgatatcggtttccacggcgtcgatgacctcgaagcccttggctttgtaggcgcggatggccatctcgttgtgcttgttcaccgtgaggtagagggcatcgaggccgcgctcgcgggcgaggcgctcgtagaagcggatggtggccgagcacaggccctccccgcggtgctccttcagcaggtagatcttcgagatgaagaagcggttcgtgtccgcctccacgtgtccgccggtgtagccgacgatgcgggggacggcggcggtgcgggcgaagtcctcggtgtcgcgggccagctcgccgtcgcggtcggattcgatgtcgtcgttgacgcggccggctacggtgtcgccctggtcgtggatgtcggcgccgtgcgtcgccgcgcccagctcgtggggcgtttcgtcctcgtgctgcatgatgaagaagtactcgtagccattgtcggcgatgtcggtgcggaaggcattcaggctctggaacttctccaccatgtagtcggtctgcgcttggccgatgatggccggccagtactcgttccaaatatggtaggccatatgggccagggcctcgacctcttcgtcgcgctcgacctgtcgaaatgtaacgctcatgggtgcatccttccgcgtcgtgacaaaacttttcgaaaaagtggtcacaaaatcgagttctgggttttctttacgggagatatgacccaattaacggctgcgagcctgcgcaatatagcgtttggcgatatatccctcttgttctcatgctgccttgaggcctgcaaaaacccagaactcgattttgtgaccaaatcgcgccgattttttgcaagggca

SEQ ID NO: 10555 - DNA, 2373 bp, Unknown
  gut microbiota DNA sequence
tggaagaggcgcgcaccgatttcgcgcgattgcttctagccaagcacatgctggaggcggccattgccacctgggaatcgaagcgccagccagaggtgtatctgcgggcgagccggttgctgtccctcatgaccgaagggcggtggactcgcgtgagccttacgcgcgagggcactctggaagtagccgacgccctcgggcgcacgcgccagccggtgcatttgtccctcggcacgtgccagcaactgtatctggccctgcgcattgcgctgctcacctgcgccgataacgtggggcgggccattcccattctcgccgacgacatcctcgtgaacttcgacgagcagcgccgccttggggccgcccgtgctttggtggagctgtcggaggagcgccaggtcattctcttcacctgtcacgaaggggtcgcgagggccttgaagaaggccgcgaagcaatcaggacgtccggcgacggtgatcaacttatagattaaacgggtgtggctgcatgaactcagtcaccagaaagaccacgaaggacagcacgagcagaatccccacaacgatgctgaagatgcgccggttgcgctgcaggcgtcgcagtgccgtgcgccttacgaaggcccgatcgccctcgggcgtgcccaggggaggatctgccgcagcgggcgtgcggcgcggtggctggttgtcggtcatgtagggtccttcgcaagcggaagcgtcttaactccgtaaatcttagcacgaagccctccattccgaagcattagcctgtgcggctggtatactgagcccttgcggaatgtcgttttcagggcattccccgcccaacgtcgaaaggacttgaagatgcccagcacagtgctcgtcggcgcccagtggggcgacgaaggcaagggtaagataaccgacctcatcgccagcgactacgattacgtggtgcgcttccagggaggcaataacgccggccacaccgtcattcacggcgacaagaagctggcgctgcatctgatgccctccggggtcatgtacgagaacgccgtgccggtcatcggcaacggtgtcgtggtagacccgggcgtgctcgtgaaggaaatggccatgctcgaggccgagggcatctcctgcaagaacctgaagatttccaacgacgcgcacctcatcatgccgtaccacaaggatctcgatggtgccgacgagaaaagcctcggcgacaagaagatcggcaccaccaagcgcggcatcggcccctgctaccaggacaagatgggccgcaagggcatccgcatgcaggacttgctggacgagaagatcttccgcctgaagcttgaggcggcgctggcccagaagaaccccatcttggagaagatttacggtctgcacacctacacggtggaggagatctgcgacgagtacctgccttacgcgcgtattctggctccctatgtgtgcgagtcggcccatatgctgaacgaggcgctgggcgatgggaagtccattcttttcgaaggcgcccagggcacgctgctcgacatcgaccatggcacctatccgttcgtgacgtcttccagctgctgcgcgggcggcgcttccacgggtaccggcgtcggccccaaggccatcgaccgcgtgctcggcatccagaaggcctatgtcactcgcgtgggcgagggccccttccccacagagctgaagttccccgagaacggcggcaccggtcaggatgcggaggacggcgagcttctgtgcgccgccggtcatgagttcggcgtcaccacgggtcgcaagcgccgctgcggctggttcgatgccgtcatcgggcgctatgccgccgaggtgaacggcctcaccgatgtggccctcacgaagctggatgtgctttcggccttcgacaccatcaaggtgtgcgtggcctacgagtgcgacggcgtgcgttacgactacttccccatgcagcaatcggtgttgcatcacgcgaagcccatttacgtggaactgcccggctggaaagacgaggacattaccggttgccgcacctacgaggaactgccggagaacacgcgcaagtacatcgagtacttggaagaggtgtgcggcgtgcccatgagcatcatctcggtcgggcctgatcgcgaccagaccatcattcggatgtcctggctgcgggacgagtagcttctctgctcgttcggggctgttggcggcggaggggcgccgtgctcagacagtcctcgctcggtggaacagtccactggactgttccattcgctgcggaactccgcgcggacccctccgccgccaacagcccctgcttttccgagaaaagtagcactgacgttacgaacgacctgtgatttcttagaagaaa

SEQ ID NO: 10556 - DNA, 4171 bp, Unknown
  gut microbiota DNA sequence
tccgaggacgctatcatgggtctcaagcaggcatggcgcgtggcctgctccaccaaggagcgcgctctggccgagtacattttcgagcggctcgagccctacctgtccgacgacgaggtgcaggtctgtgtggagcagctacaggtgctcgccatggagcgtctcgagggcatcggtctttccggcgacgatctcatggaaatgacggaggccctttccggcgacttcatggaaatggtggggccgatgatggccgccgccgttcacggcgaggacgcggccatggtccaggccgaggcgctggcggcgccgtcgggggccgctccggcaggggatgaggcctcccagcccgtcgatatcttctcctacgacagcatctccggctacggctccgccgtggcgcgcatgcgctctctgggcgtgggcctggccggcactcccgagttcgacgatttcgtcgctatgctgaactcccgccacgggctggacgccatgccggtcgtcgacagcctcctgttctgctcgccggcccgggaggatgcgagccgcttcatgctggccacggtgggggagctgggactcccggccatccgcatgcgcatggaggagaccttccaaggcgtgcccatgctctgcgtcagcgcccaggccaccgatgccgagaagctcgctagcctgcgccacggctttgcgggcccgggcatcctggtgctggaggatctcgatctgtggggagcgccggtcatcgatgccgccgacgatatggcgggcttcttcatggccgccatatcccggggcgcacgggaggcggtgaacctcatccgccaggcggtggagaaccccgacgtctacgtgctggcctccgcctcgtcgctcgaggccatcgatccgttcttcacggagattttgttccccctcacctgcgtcgatatcgactatcccaccgctgaggagcgcgccgacatttggatggatatcgcccgcgaccatccctccatccgatcggtgagccgcgacgagctggtgcgcctttcggcgaacctgccgcgctacgacatctacatggcggcccgcgaggccatcgaggaagcctacaagcagggccttgtggagcgccgctacattccggtgtcccgggagaacctcttcgacaagctcgccgcctaccagccgctcgattccgccgagtacgccgagctcgagcgcctcgtcgtctccgacttctccgcctccttgggcgatttgaacgacttggtgggatagccggtggttatttgccgaattgaacgggcgggcgcgaacccgcccgttttctgtcgggagctctgcttccgtgtgaagacgaccgatgaaggaggacgggatctgtggtccgccgcaagaatgcagaaccgatagattggccctgcgaggggccggccctcgatgactttgtgacctcgatgctcgccaggggagacgagctgtaccgcgatctgccttggcgccatgtggacgatccttacgcggtgctcgtctcggagatcatgctgcagcagacccaggtggcgcgcgtcggtcgcttctgggaacggttcctgtcggcgtttcccacggtggatgccctggcgtccgccgcggtgcccgatgtgctcgagctgtggcagggcctcggctacaaccgccgcgccctggcgctcaagcgcacggccgacaggtgcgccgccgagggggccggtcggcttccggaaacctacgaggggctgctggcgctgcccggcatcggtccggctacggcggcgggggtggtggccttcgcctatcagcggccggccgtctatctggagaccaacgtgcgctcggtgtttttgcacgagctctttcccgaagaggaggccgtaagcgacaaggttcttttgcccctggtcgaggccgccgctttccacccggccgccgcagccgatccgcgccgctggtactacggcctgctcgactacggcgcgcatctgaaggccacggtgccgaatccctctcggcgcagcgccggtcacagccgccagtcggccttcgagggctcccgccgccagaagcgcgcctggatcacccgccgcgtgctcgccgctcccgagggcgtctcccgcgcggtcgtgctcgccgacctgaacacggctgagctcgctgccggtcgtcccgaggtggagcctccgctcttcgattccatcgtcgccgacctcctcgccgagggcttcttccgcgaggaaaacgatacgttgaccccctgagggaagaaagggttcgctgtgggtttcatcgagttgttcctgacgggcgtcgggctttccatggacgcgttcgccgtggccatctgcaaaggcctcggcatgcggaagatacgttggcgcgatgcgctggtgatcgccctgttcttcgggggctttcaggcgctcatgccgcttatcggttgggccgcaggctcgctgttcgccagcaccatcaccgccgtcgatcactggattgctttcgggcttctcgccttcatcggcggcaagatgctctgggacgccttccacgaggaggactccccgtgcgtgtgcgggcgcgattgcgcgacgtgccaacgccgcggaggcgccgattgcgacgatcccgaggcggcgcggcaggcgccgatcgccccgcccctcgattatcgcgagcttgtcatgctcgccatcgccacgagcatcgatgccttggctgtgggcatcacgtttgccttcctcggagtgaacatttgggtcgccatcgcgatcatcggtgtcaccactttcgtgctgtcgcttgtcggcgtagtggtcggcaaccagttcggctcgcgtttcgagaagcccgccaccatcgccggaggcatcgtcctcatcctcatcggcctgaaaatcctcatcgagcacctcgccggctaacgcgcccctgcgtgccgcgcccctagccgatcggtgcgctctcgcagccgtccgatccccgcagtcgcccaattgccctcatcatccgacgcgcccgatcctgcactttttaaaatccgcaggcccgctgttaaaccaccattgacatatagccgtacctctccccgatgctgacgcggttggccaggctcaggaagggatgcgactccaggtgcgtcagctcgcgcgtgcacacgtaggtccccgacgcctcgtgggcgaacagcagctcgcggcggccgcgggcgctgcgccggaactgctcgcgccagcagaaccagtcgaggtagcgctggaggcgcctgttcgagaccccgttgaagcgcccgatgaacgccttgagcctggagtgcagggagttcaccatctccagctcgcggctggggcgcacctcgtggggcctgcccccgagcgagccggcgtaggagcgccgcccgtcggtggccaccgagcaggccgccggcagcctcctcagcgcgacgagcgccacccccggcccgtcctcggcgccgtcggccagctcgcagaagcagtcgccggtctcgctgacgccgcacagcacgcacaccgacccgccgagcccggcgcgggaggcgtcgtggccggtccggtgggcgggcctccccaggccgaaccagccgcgggagtggttgcccggcatcgactccgggaagtacgtgccgtccatctcgaaggactccccgcgcgccggcagcaggcggcgccccatcacctcgcagacgcgcatcctcatgaaccacgccgtgtacagcgacacccccaccctggccgccgtctcgcgcagcggcagcgcgtcggccatgcaggccgcgaactccatccacgcggccgcgggcagcttcgagcgggcgagcagcccgagcgtgccggcgccgaaggtccggccgcacccccggcacagccacctctggcggccggccgcgtcgcggcccttcctcacgaaggcgggacagccgcacctcgggcagcggtcgggctcgcccccgcccgaggcgagctcctcggctatggcctgccgcagggcctcggccagcctcctcttctccgcgagcggcatcctgcgcacttgatctataatcccgtccatggggcctcctctccggtgctttctcgacaatcgcatcgtagcgggaggcccctttccgcgtgtaccgaaagtgggtctatgtcaatggtggtttaacagcggg

SEQ ID NO: 10557 - DNA, 1961 bp, Unknown
  gut microbiota DNA sequence
caatcccgtagggggcgaccttggtcgcccctcccgagcggtgaggtttctcagtctgggagggcagaccaaggtctgcccctacggatcgcttctgtgggatgttggagaacccggggcggtgcgccggggtaacccggaaggggaggttcgcatgaagaagctgtttctcatcggcggcatgggcgccggcaagtccacggcgcgcaaggcgctcaccgacgagggcctggcttggatcgatctcgatcaggtggggcacgaggtgctcatgtgggatacggtgaaggacgacttgcgcggcgcgttcggcgatgacatcttcgatgagaacggggaagtggtgcgcagcgccctggccgccaaggccttcgcgacgccggccgccacgcgcaagctgaacaccatcacgatgccccgcatcgaggagcgctacaccgatctcatcgacggcttcgaggccgagggcaagcctgccgtggtggtggagtactcggtgttccgcaaccgccagagctcgctggcctacggggccgatgtcgtcatggccgtgctggcgccgctggagacccgcatcgagcgcgccgtgaagtcgggcttttccgaggaggacgtgcgtgcccgcatcgctcgccagatcaccgacgccgaccgcatcgaggcctcggatgtcgtcttcaacaacgacggtacccccgaggagctgcgcaacgaggttatctcctggtggagcgggtataagaagacgatctagtgggatgtattctcagattttagcgaaggccctgagagcgctagttctcggggccttgctttggctgcatgaaggtagcgatgaattctctggcgcgctcatccttggcttgcgcaattaggtcttctgcgcttaagccttctggccatggcttggagaaagccgctctttcggcaatcctctggtctgctcccttgagtttatcaagttttcgagctatctgttcgtcttcttctctcacgattaccacagtcccagcagatgttgcattccgaggctggcacctgctatgcagatccagcagatgaggcccatgaggatgggcttgccgccggatttcacgagcttcacgagatcggtgttcaggccgatggcggccatggccatgatgatgaagaacttggaaagcgtcttcagcggcgcgaacgccgccgcgtcggcaccggcggccacggcgatggtggtgatgatgctggccacgaggaagaacaggatgaacatcgggaaggcgcgcttcagcgagaagttgccgaggccgtcggcgccctccttgcgggccatgacgatgccgagcacgagcgtgatggggatgatggcgagcgttcgcgtgagtttcacgatggtggcgtcgtccagggcgttcgagccggggcgcatgccgtcccaggcagctgcggcggcggtgaccgacgaggtgtcgttcacggcggtgccggcgaataggccgaagccctcgttggacatgccgagcatgcctcccagagttgggaagatgagcgccgccaccacgttgaacagaaagatgaccgagatggcctgggccacctgctcgtctttggcgcggatgaccggggccgtggcggcgatggccgacccgccgcagatggacgagcccacggcgatgagcgtggcgatggcggaatccacggacagcacgcggtagaggatatagcccacgatgagcgccgtggcgatggtggtgaggatgataggcaagctctcggcgcctacggccgcgatctgggcgaggttcagcccgaagcccagcaggatgaccgcgtactgcagcaccttcttcgccgtgaaggcgatgccgtcctgcacggtgccgcgcgcggactgcttccaccaaagggcgatgaccatgccgatgaggatggcgaacaccgggccgcccaccacgggcagcgcctcgccgagaaaccag

SEQ ID NO: 10558 - DNA, 1954 bp, Unknown
  gut microbiota DNA sequence
cacaggcccggccaccagcgcgacagacgtcgcgccgcccgcggcaagcacagcgatgaggctctcgtccacccgacccaggctcttcaccacgaccaccttcgccgggtcgtacttgccctcggccgccgcttgcatagcagcatccatgatgaccgccgcgccgtcgttggcctgcatggccgccacagccgcgcgcagaagctccttgtcgtcgggcttcttcgactccagcgccgccgtcggacacacggtagcgcaggtgccgcaaccgacgcagcgctcgggggccacggccaagtcgttgccttccacgagaatggcacccgtaggacacgcctcggcgcagcgacggcaggaagcgttgcgattgcgcaccaccacgcaccggctcggctgcacggccagcgactggctctcaagcttctcgaaaagtcccagaatgttgtccatggatatcctccctctgtgggttaattggcacaacgaaatacggccgcctctaagggctagccgcgtcgctcctcaatatccatgtcaaagatcaaagagggccgaatcgttgcggtcatggtgattccttccacaaatcatcgtccccaaacccactgctcagtatggcgaaaacaccccgctctgtcaacgggaaggcggcgcaaagtcggcaaggcaaagcggcttcctgcggctctcgcatcctaccgccagcccactgtcaggaccgacgtctccggagacgattcggaaatctcccagcacaccgacgtcgtcgcctcaagcagggcggcgtcgtgggacacgagcagcaaggcgccgggaaaggcggccagaaggcgctccaaggcctcgacggaatggagatccaggtagttggaaggttcgtccatgatgatgagctccggttcatcgagtatcccgaggccgagcatgagcttgcgcatctcgcccgggctcgttcgctcgccttccaccaagcgatcgggatcggaattgagcgccgcggccaccgccagcacccgcccccgactgcgcgaatcgagggaggccaatcgagaaagcgcatcgcggtactgctcggcggtgggctcctgcgggatgacgagcacccgcgcggtcgggtcgatccgccgtgccacctcactcaccaacgtggtcttcccggcaccgttggggccggtcagggcgatgtgatcggtgttcccgatggaaagcggaggcacaagaagctgacgctcccccagagccagcgtcatttccggctgacggtaaagaaccttgcgcgcactcggctcggcgcgcatccacaaatcgccgtcgtagcgcttttccaccttcacctgcgccagcgtctcctcggcacgagagaggcggctctccatacgagagctgagcttgccggccacgccatcctttcccgtgtagacggccagcttgacgcgctctttcccgctatgatccttcgggtcgagattgcggcagctgcgcatgccggccgcgcgcgaggcctcctcccgacggcgctgggcctcgcctgcgagacgctttttctcgcgcttcgcctgttcgcgctggcgaagggccgttttccgctcgagctccccctgaccgcgtccctggctgtagccgccgggccgcaccgtcacctgaccggccgccatgaacaagcactgggaacacagcgcatccagcagggcgcggtcatgggagatcagcaggcccacgcccttgaagcgcgcaagagctgccgtaacggcctcgcgggtggggacatcgacgtggttggtgggctcgtccataacaagcagatcgggacgctgccagagcgcgcaagctacctgcagccgcttttgctggccacaggacaaggtgtcgtagcgccacggccagtcgtcttccatgtctaaatcacggcgaagggccacggcgtcgcggtcgtaggcagcgcactttccat

SEQ ID NO: 10559 - DNA, 7895 bp, Unknown
  gut microbiota DNA sequence
ctccggctctgatgagaagaacaagagccccacatttttcggcttcagatactctttggggccctgcacgatatccatgcgctgacacagttcgacgaagtccatcgtatcggcctctgcatacaaagagcttcccacctcgcggaggtatcccttgatgagcgtgatgcttaagtcatcgacttctgcatcgtggttcacgcggtcatcaaaagggatattgttggcgaggctgtacagatcgcgcctctcggcctcagacggagccagagtactcgccatcttacgaatccagtatatccgctcgcttttcttccccatgcttttcggagaggagtaggggcgcacgctgccgccaggcgcccaaacgacaatgaaggttttgctttcgtattctgcgacatccacaatgggcatatagtccggctgaatgagcttgcatttgttgaccatgtccttgagccacgggtcaattttatccgctggcacgcccgtagaaatgcgatgccccgccgcatcctcgcgaatgccaacgacgagatatcctccgccccagttatcaatatcattggcaaacgcgcaaatagtcttaagagacgcctgcggatcccacgtctctttgaactcaatgcgggcattttccacgatattacccttgatcagggtttctatgcttgtcggaagccccatggcatctccctatcactatcacgttgcctcaggatgatagtataaatgatagtgatgagagtgcaaatgatagcgatgagagcgataagcgatagcagtgagcaatcgccgttcatggggcatttgtggcgatcgcgaacttgttcttgattaatttggtcatgaaaagtattatttgattctattaataatttcggctctcagagagaaaggagaagtatggcctgttcattccgctatttcctacttaaacgctgccaaggtttgaccggtttaaacactacgagcacgaagaagttcttcgccgccgccgaggatgcgcatcccgaggcattcgcgccgcttcttctgcttgcgatctgcgacggacgcgaggagtacctgctccgacgcgcggaaggcacgaaagcggccgaaacgttcgacgaattcgtcgaaagctggcatgcgtcggggcgtccgctggaggtgtacctgggcatgttgcccgacggcgacccgttcaaaaccatcctcgtcgaatggcgcaccgactcctcgcgtatcgaggtcgaccgcaaaatcttgaagtacgtctcaaccgccttcggcgatcttctggccgacaagaacatgacccgcgccgaggcctgccgcgtcactcgcttgaacaaaggcaacttctacgccttcctcaagggggacacttcgaaaatgagccgcaagacggccatgaacgcctatcgcgagatcgccgcgctctagcgcacacgaagccgagcaaagccgagcaagactcgcgcccaaacgccacgggcccgcagccgcaaaagggctgcgggcccgctttcgctgcgggagaacacaactcacgacaaccgactccgccctcccctaccgcgtctccccggaagcagacgggaaggtaagccccaaagagagctcgctgccttccaaggtggcctcaacttcgatgtcctgagcggcggcaaggctcgctacgacggcaaggcccaggccggcacctccccgagcccgagcagcgtcggcacggtagaagcgctcgaaaaggcggctggcatcgatagccgtcggatcggacaccttgttggaaaaaatcaaagtgcgaccccgctggacaatagacggcgcggacgccccgtagcgcaaagcgttgcttaccaggttctcgaacatgcgagccagcgcctcgctgtcggcctcaaccatcaaggattcgtcggggaagtccaccgccggctcccagccgcgctcttcgaaagcgggaaactggcccgtgagcacatcagcaagcaccggcagaacgacaagggggcgcctatccagctcggaagcggcgtcagtggcgcgggcgtaggcgaaaagcgcgtcgagcaggccctccatgtcggccaggcgcgcttcggccgcctgcaggtaatgggcgcgacgagcatcgtccggttcctcgacggccagggagacatagcccttcgcacccatgagcggcgtgcgaatgtcatgggacaggctcgccaggtcacgctggaactgacgctgctcggaggcacgctcgcgctcgcgtcgatcggcggcatccagcgtgccgttcaccgcgcgagccagatcgacgaacccaggcccgggcatctcggtggtcaaacggctgttggagcgcccgtcgcgattccgcaggaagcgggccatgcggcgaagctcgtggccgtacagcagcaccatcgcgaacccgcagagcgccaggcctccgaagcaaatggcaagcgtcacgatgctcctttcttgtcgtttctctcagggaagtttacccccgaagtctgcgggaagcacgcaaacccccttgttttgcctgagtctctgatcaggtaaaacacagcataatgcctggtaaatcgctcaccgcaactaagccataacgcgggggtttgcgcgcctcgcgcagccaaaacgcgggggtttgtgcacctcgccgctcccaagggactacaaatcgcgcttgcgcagcgggccgaacgtcagcgcggcgcagagggcgactgcgacaccgcccacgatgagtacctgcacggcgaggggcgccatggtcagcggagcagcagcaggcgtcgcgagcagcgtcgaggcatgattgcccacattctgcatgcacgacgcgagcgtccacggctctagcgcgccgatccagggcacgcctcgacccagcagaagcagcacctggccgagaagcgagccggcgatgccggagctgaccacgagcgcccaggccaccccggccccggcgctgcgggtcgcccacacgatgaccgccgtcgtgcacccgtaggcgaaggccagaagccaggtcaacccgaggaagagcgccagatcgcccaacgggcttgccgccgcataggtgaaacctgccgccgcgaaggacgccgctccggccagggcggccacggccagatagaaggccgcaagaagaccgacgagcaccagcttctcgccgtagtagcgcacacgtccccggcgatccatcaccaggttgcgcgcgaagcgcatggagaagtcctgggcgaggaagagtgccgtcaccagcgagacgaccacggccaacgcccctcccgacaccgccatatctcccagcatatcggccggcgaggccagggtgcgcatgtcgcgggacactccttcgaaatcggcgtcgctgagcgcctcgggattgtcggcgacgagatcccacagctcgctcgaggcgaatgcggaatcgctcgccgtctcatcgtcgcgcatgctgtcctcttcggattcggccgacccggcggcctcggcagcgcctagcgtgtccagctcgtccagcgacaggccgcgccccgaggcgccggccgcagccgcggcctctgccgatgcattcgcagcgccagcatccccttcgcccaggacgccggccccgccggtcgccccatcgctgacgttcacggtcatctcgaagcccgtcgccgtcatacgcagaaactccggcgaggacacccagtgcatcatgccggccgccagagcggacagggccaccagcacgatagcggccacccagaacatcttgccatgcaccagacggtagatatcgctcttcaacaagttaaacatactgcgcgcccccttccatcagctccacgaagtactcttccaaatcgcggtggtcttgggacagctcgcgcaccacctcgccggagcgggcgagcaggcggctgatggcaccatcgtcgtagtcgcccgcgacgacaagggccccgtccggctccgctttgaaggcgagcgcgggatacgcctcttccaaaagcgccagggcccgggccgggttctcggtgcgaacgcgcaggctgctgcgacactcggcggccacctcctcggccgtcatctcgcgcaccatgcgcccgtcggcgatgaccccgtagcgcgtggccatgcgatcgagctgatcgagcacatgcgaactgacgaccactgtgatgcccaaggtttcgttcacgcgcacgatgagattgcgcatggcgcgcgtcgcctccgggtcgagcccgttgaacggctcgtctagcagcagcacgtcggggctgccgagcagcgccatggcgagccccagccgttgcttcataccgagcgagaacccgcgcaccttcttgttgccaaccgaggagagtcccacgagcctgagcatctcctcgcagcgggccgggccgtccacgatgccccaggcaagcgccttcgccatgaggttccggtaggccgacaggttcacaagcagccccggctcttcgatcagcacgccgatgcgccgcacgccgccgtcttcgagctccccgtcccccgccgaggctcgatcgctttcgaacagtacgacctcgccagccgtcggaagggcgtcgccgcagatcatcttcatgaccgtcgatttgcccgcgccgttttttccgacgaagccgtagatgtcccccgcagccacggtcatggcgaaatcgcgcaccacagcccggccgtcgtagaccttggtcagcccgcgcgcttcaatgacattcacggccgtctcccttctctcacagatcccatcgcttccgtcctttctcgcttataccgcatttccagcgactttcagtgtggacgcgggaattaaagaaagttctggcgaagcgttaagattgtttgaagatgccgacgccaacgcatccgcgcgtattatcctgcttgccatggaaaccgtcgccgacatactcatcatcgaggacgacccctctatcaacgaggtggtctgcgcgcatctggagcgtcgcggctaccgctgccgccaggccttctcgggcaccgagggtctcttgcttctgcgcgagcagcgcccggacgtcgttatcaccgatctcatgctgcccggcgtgcccggcgaggagatcgtgcgcgccatccgcggcgccgatagcgcgctgcccatcatcgtcatctcggcgcgcatcaccgccgccgacaagatttcccttctgcaagccggcgccgacgactacctgaccaagcccttcgatttagacgagctgcaggcccgcatcgaggtgcagcgacgccaccatgccgagcgcgcgcatgccgggacggccgcaagcaccgcgaaggcggacggctcctcgcagctgctcgccttccgccgctgggagctggatcccgacgggcgcgtcttccgcgtcgacggcgaggaagtggccctcacgcgcacggagttcaacatcttagagctgctcatgggccggccgcaaaaggtgttcaccaagcaggagttgttcgagttagcttggggcgagccctactcggtggaggactccacggtgaacgtgcacgtttcgaacctgcgccgcaagctgaagcccacgggcaccgacggctacctgcaaaccgtgtggggcatgggctacaaactgcacaatgcctgacgggcggcgccgcagagggcttcgccgcgcatcgctcgccaacattcctgatgcttttgctcatgaatgttgttgacctcaccccctttcccgtcaattaagctcgtaaatctcctgaaaaccgtgatggtctggcaatttctcccaagttgacacggtgaaacaccgcgcactgtgggacaatgggcagacttatccaactactccggtgaaaggttccgccgtgttcgatttcttccgcaaaaagggcaacaaccccgaggagcccgccaaagacggcggctcccagaacgcggccggcgccaccgcctcgggccgcaccacccgcgacgcgctggcggagttcaccgccaccccgctgcccgacgccatcgacggcctgctgttccgcgtgtccatggccgacccgaccgacccgacctcgtcttcgggcttcgacgcctacgccgcccgcctgctctccgaggccgaggcgcccagcctgcgcgccatcgccgtggagcatccggtggaactgcgccgcctgaacaccacgggcctgttctggtccatcttcgacgacagcacgatttcagccggcaaccggggcaccattctgcgcatcgagtccgtgctcgatcgtttggccctcatttcgaaggccttggaaggcgacgagggcaccgcctttgtgagcgccacgaccgagagcgcctgcagcgagctggactggcaggtgctgcgttccatcgccaacgatgccaacgattacctgaccgccgccgaacgcgataacaagctggacacccagtacggcacgacgggcacccgcggcggcaactgggatctctccacgcgtctggccgccgcctgcgaggccatggtgctccccttccgcctggaataccgcttcgcctgtgatgctggcacgggcactattgtggccagcgtgtcgctgcctacccccgacgtgttcccgaagtcgcgctggagcagcgccacgggccagtgggccgattgcgccgcccagcgccctgccgccgcggccgcctacgccctgcgcctggcggctctcattgccgccgccgctttcggcacctccgtcggcgtgacgcgcgtcgtcgtgaacggccgcgagggttccatcgcgggcccgaccgtgatgtcgctggagttcggccgcatccccttcaccatgggcgccatggcgaagatccgcagcggcgagttctccgcgccggccaccgaatgcgacccggctgcgctgttcgacatgctgcatctggcccagttcgccgtcaacatcgatgaggcgggcaacttgcagcccgtcgagctgctgccggtggagctgtcggttcccttcacccccgtggccgaggacacccgtcctttgccggagaacctgcgcgggcttctgcatgccgacatcgtgagcgatttggacgtcatgagcgagcagaacgccgatctggccgcccgctatcgcgccatcatggaggagaaggacgactcgctgcttctggcggtggcccagctggaggacatcgtcgccgagacgagcgccgccgcgacgagcgacgtcatagcggacgacctcgcccaggccgccgagccgcgccgccttctgtactgcgagaacgtcttcgcccgctatctgacgagcctcgtggaaagcgaccccaccgtgcgttacgtgcgcgcctcggacatcggccaggcggcccgctcgtcgctctcgcgcatctaccgcgacatgggcgacttggacgccgccgaggcccaggcccgcgcctgcatcgagctggcccccacaagcgccccggcctacaacgacctcatcacctgcttcgccgagggcgaccactacgaccggatcatcgacgtggcccgcgatgccctgcgcgtggccgtcaccgggaacgacatcgcctatgtgtactaccggctggccttcgcctactggcagacgggacgtttgcccgaggcgctggcctgctacctgcgtgtgccggagacgagccccatgggcgaggccgccctgcgcgagcgcaatgatttggtgagcgagatgggcaacaacgtgcccggcagcgattgggatcccacggcctgcctgcgcacggccggcgtgcccctggcgcccttggacgacgtgatggaagtggtgggccgcgcccttatcgagctctgcgacgccaacatgccgctggccgccgcccctctggcgagcctcgtggcgagcacccagcgcaacgacatcctccacgccgtagccgccag

SEQ ID NO: 10560 - DNA, 2113 bp, Unknown
  gut microbiota DNA sequence
cagaagaggtgaaggccggccgccgtgcgcgcgctgagtacctgaaacagttcgaaggccccgtggccgaggcatcaaacgccgccaacaacgcctatctgaaggccaaccagcagcaagacggcacccgcagctacggccgcatggtagacctcctcctcgccgaggcccgagaagagaagcccgaggaaacgccaaccgactaatatccaaggcaaccgagcatcttcgccgagggatacgaaaacctacttccccgcccgtacacgggcgcggaaaaggccgtattccagggaatcgacgagcgcgttccaggaggcctcgatgacgttttccgagacgcccacggtaccccaggtgtctacgccgtcggtggcggtgatggtcacgcgggtgatggcgtcggtgccctgggactcgtcgagcagacgcaccttgtagtcgatgagctccatggcctccacctgcggatacgacgccacgatggccatgcgcagggcagcgtccagggcgcccacggggcccgcgctctcgcccgtggcgacaaaacgcccctcccccacgtggatcttcaccgtggcctcggacagggcgtctttagccagggctcccgtgtcctcgcgatcgtccacgatgacgcggaagctctccaacgtgaacgccggcgcgtacagcctcaggtggcgcatgagcagaaggcccagcgagccgtcggccacctcgtaggtgaagccggccgcctcgcgcgccttgatgtcgtcgagcaccgcctgcacgtccacgccggccgcttccagatcgaagccgaggcttctcgccttcgccagaagcgatgccttgccggccagctcactcaccactgtgcggctcgtgttgcccacggcggcggggctcacgtgctcgtaggcggcggggaaccgcgcgatggcgctggcgtgcaagccgcccttgtgggcgaaggccgaagagcccgtgtagggatgatgcgcgggcatggacacgttgcagagctcggccacgtactgggccacgcctgtaagctggacgaggctgcggtgccccacgcattccgcacccatcttcagctccaagtcggcgatgaccgtgagcaggtcggtgttgcccacgcgctcgccgatgccgttcacggtaccctgcacctgcgtggcgccggcgcgcacggccgcgagcgtgttggccaccgcgcaaccggagtcgttgtggcagtggatgccgaaagcctgactcgggaaggcagcgactgtggctgcgacgatctgctccacttcgaagggcagcgcgcctccgttggtctcgcaaagatccaccgaatcggcacccgcctccacggccgctcccacgcaggccagggcatagtcgcgatttgctttgaagccgtcgaagtagtgctcggcatcgaacaccacatgccggccagccgccttcaagtgggccaccgactcgccgatcatgcgcaggttctcttcgagcgtcgtttgcagagcgcgctccacctgggcgtcccacgtcttcccgacgatagtgaccaccggcgccccgcacgcgacgaggtcggccaacccgggatcctcggcagcggcgacgcccttcttgcaggtggaaccgaaggccgcgatttgggcgtgcttcaaatccatagccgccacttcgcggaagaaggccacgtccttggggttcgacgcagggaagccgccctcgatgtagtcgatgccgaactcgtcgagacgccgcacgatggcgagcttgtcggccagcgagagcgtgatgccctcgcattgctccccatcgcgcaaggtggagtcgtaggtgtagatgcgcgtcgcggtcatagatgcctccccgaatctctggtcgggtgccattatagcgcccgcaaagtcatccgcacgctttcgccttcacgatgcagctgaagcccccgttttcgaccgcctaacccagaaccttctcgaaggcgatgcgcggggcgccggcctcggggccttccgtcagcgtgatatcgccgcaggggatgaagccgaacttctccactgcccggcgcataggggcgttgtcacgatgagtgtcgatgcgcaccgaggccatcccctct

SEQ ID NO: 10561 - DNA, 6781 bp, Unknown
  gut microbiota DNA sequence
gggcgcgcccaccgagcagctagtcgatgtgcttgccgtagcgctcctcggtgatctcatcgagggtgcggccctgggtgttggggcaccagatgacgcccaccacaagcgacaccagaaggaagccgcacataatgatgccggcggtcacgaagcccgagggggtttccacaccgagacccgccacggccacgagcgaccagatgcccaaaacaccgcgcaccaggaagaacatgatgccctgcacgccgccgcggtacagcgtcgggaacagctcggtagaccacagcgcgtagaagcactgggccgagaagccagctgagatgccccacagcgccacgaacacccacagaagccagccccagctgtcggccgtgcccgcctccagctgcatgccgaagaacaccatgaccacccaagctgccagcgccatcacggccgtggccgcgaacaggatgcggtgaggaatcttgtcgccgaacttcgagaagatggcgagcgagcccaccgctgtgaggatccacatgaccgcctgcagaagtgagatggtcgtgtcgtccaggttgccggccgccgcgtacatgtagggcatgaactggcccatggtgccggccacgatgttccaggtcagatacaccgcaacgaggaacacgatggacttcacgttcacggagttggtcagcgcgcggcccatcatctggatgaaggtgtcgcgcttgccggcggccgcgtcctgcttttccgtccagtccttcgactcctccagcttgcgctgcagattccacgcgatgagcgccaccacgaacaggatgaggaacagaaggcgcatggcgaacaggccgtcgaagggcccgtaggtgcccgccggcagaagcgcgccgtccggcccgaaggtcgggaagacgaacgagaacagaagcgcgatgaggaagatgaccgccgggccgcaggaccaggcgaactggctgatgccgatgttggcggcgcggctcgtggaggaggacatctcggagatgtagctccacgacgacggtacgccggcgcccacggacaggccggaaatgacgatgccggcgcagagcatgggcaagttcaccgcgcacataatgaggaacacgcccgtggcgtacacgagcagattataggtgtagatgaacttgcgcccgaagcggtcggccagaaagccgccgatgagcgcgcccaccgccgcgccgaaggcattcgcgcccacggcgcccaagatggacacccacacgttgtcgaagttgaaggcgatcgcccaggccgccagcgccacacccgaggccacgatgcagccggagtcgaggaagttggtgagcgatacggcgatggtgccttttttctcttgggacagagccatagttttgcagaccctttcttagttgcttagttgtcggtcgccgatgccgcggggaaatccagcatggcctcgttgatcttgacgttgaactcgcggccgatctgccgcagcccctcgtcggtgatggtgttcaggaactcacccgagccgccgttcatggcgcgggcgcgcccgtagatgtcggcggccttctcgatggtgtgcagaagcccgaaggtggcatcgaagtcggtgccggagacgaacaggccgtggctcgcccataccaccgcgtcgaaggtcttcatctgctcggaggtggcccgggcgatatcagcgccgccgggcaccatccacggcaccacgcccacaccggccgggaacacgacggcgcactcggtcatggccttccacagcacgcgagtgaaggtgcgcgcgtccagcggcagcagataggaaagcgcgatgatgttggtggggtgcgcgtggtagatgacgcggcaggcgccgtcggtagccgcagagcgcacggcgtggttcatgacgtgggtcgggaactcggacgtggggcgccccccgtcgtcgagaccccacacgatgcggtaggcatcgccagccgcggacagctccacaatgccgatgttgcgagagggatcggacgccacattgcgcatgtagttgccggtgccggtgacgaggaagtactgaccgcccatagtcggcgcctcaacgccgaggggcgtccaagggcgcggctccttgtcgaagaacttgcgggcggtatccacatcctcgggacgcaggcggtagctgaggttgccgccgttgcgctcgtgccagccctgttcccagccgtcgttgcacaggcgcacgaacccgcgcacgaaccccagctgctccatggccacgccggacaccgccccgcgcgccgtgtcgatgccttgggagagcatctcctgtgcctgatcgaaaaatgccatgattgctccttacatgcgctcgggcaggaccttggcctcgtaggcggccacggccgggtacagcccgccatcgagcgggcagccggcgcggcggcagtactcgtcccacacggcgccgaagggcatcgacttcgcctgctcggccagcatcatcttctcggtgaactggtaggtgtcctgcagctctttcaggcgctcgcccggctgcagcagcgcgtagagcagcgacttttccatggcgcgcgtgcccgtggcccaggcgcccacgcgattgatggaggcgtcgaagaagtcgaggccgatgatgaccttctcccaggcgcccgggatgtgagcgatttccatggccacttccttggtggggtcgtcgaagagcaccacgtggtcggagtcccagcgcaccggacgcgtcacgtgcatcggcaccttgtcgaagaacagcagcagcgccgagagcttgtcggccacgttctcggtgggatggaagtggcccaaatccagcaggtcgtacacgccggggtgcgtggcggcgtaggccaggtagaactcgttggagcccacggtcatcgactccagaccgatgccgaacaccttcgactcgcaggagtcgatgacgcggtcgtacttctcggcgtaaatctcgtcgagcgagtcgcgcaggcgctcgcgcaagccatagcggtcgccgggcacgtccttcaggccgtcggggatccagatgttgcagagcgtctggtcatcgagcgcctcgccgatctgctgggaaattttgcggcaggccttgcagtggcggatccagaaatcgcgcgtcgccttatcgggcgaggacagcgacagctcgttgttcatcatggggtggccaaagatggtggggttgaaatcgatgccgtagccgtgcgccttcgcccacgcgacccacggctcgaagtgcttgtactcgatggcatcgcggtcgacccaggggttctcgtcggtgaagacggcgtaggaggcgtgcaggttgatgcgcttggcaccgggcacgagggccatggcggcctcgaaatcggcggtcagctcttcgaaggtgcgggcgcggccggggtagttgcccgtggtctggatgccgccggagaggcccccttcctggtcgaagccgagcacgtcgtcgccctgccagcagtgcaccgagatgggcttggcggccagcttctccatcaccgcctcggtatcgataccgagggcggcgtactcctcgcgggccaaatcgtacatggtagtcatcggatttcctttctgttcaccagtatctagaagctcttgctgtaaatcgtcggggtcggaatcgcccatcacggttccaccttctgcacgtcgaaggactcggcgatggcggcgcgcacggcgcggagattgggaaacaccccgtcggcgagcatctgcacggccaggttgccgagcgcggtgccttccacggggccggcgtacacgggaatgccgcatacttcggcggtgcggcggttcaagtggccgtcgcggcagccgccgccgacaatgttgatggacgcgtactcgtggccggccagctgcgagaggccttcgacggcctcgcgatagcacagcgccaagctctcgtacacgcaatgcatcagctcgcccaaggtctcgggcacgggctgccccgactcctcgcatgccgcgcaaatttcctcgatcatggaatcgggcgagaggaatctctcgtcgttcacattcacaatggaggccgtcactccagcagcctcggcctcgtcggccgccttgatgaggtcggcgaatcctacctcgtgccccaggccctcgacgcgcatgtactggtgcaggcgccccttgcggatggccttctcgtccaccacgtaggtgatgccgttcagctcgcggcgaatggactggatcatccacagccccatgatattctttaggaagcgatagcggaagtggtagccaccctcgttggtaaagttttcgcggaaggccgcctcggcgcagatggggctgcggttctccacgccgagcaggctccacgtacccgaggagaggaacaccgccggcaaatcgcaggcgggcacggccagataggcgctgcctgtgtcatgggtggccggcagcaccacgcgcgtgtcgtagccgatggcgcgggcgatctcggggcgcacgggccccaagcacgcgccggcgtgggtgacgttgcggaatagccggcgaggaatgtcgaaggcctccatgaccgtctcgtcccatgcgccagtctccgcattcagaaggccggtggtggaggcattggtgtactcgatggccttctcccccgtgagcaggaagttcaagtagtcgggaatcatgaggaacgagtcggccgcctcaagctgctcgggatgctcgcgctgaagcgccagcagctggtagatggtgttgaagggctggcgctgcaggccgcaacggcggtacagctcctcgggagccatgatggcatcggccacctcgtacatgccagccgtacgggagtcgcggtaggccacggcatcgcccaccaggttgtcctcggcatccagcagcacgaagtcgacgccccaggtgtcgatgcccaccgatttcggggcaaagcccgcctccttgcagagggcaaggccccgcaccagctcgctcgaaagcagctccacatcccagcagtcgtggccgttccggcgcacctggcggttgtcgaagcggtgcacctcttccaaacgaatgagcccgtcttccacgaagcccaccaccacgcggcccgacgaggccccgatgtccacggccgcgtagcagtcgcgccgcaacccctgcgcacgatgcgccatgtcgccattcctatcttcgcgcgccagcagggggcaccgccgagggcgatccccgctgaccatgagcgtatttctcaacttttacctgggaaaacgcacaagccattaatgcggcgcacagtgtaccagcaaaggggccctctgcaagggcgcgcgcccaaagaggtggcggcctgtaacaaatcaacaacaatgacttcatgggtcgccattgaaaggggcccggacgaaccgggcccctcagagaaggatatttgctcaggcgcccttaccgcgccgccaatcgtgcagcttcgggcgatccgccccctaaccttccggcacgaaggccgtaaatgcggcggtatcgggctccggactcacctcgccgcgctcgttgatcgaacgcacgagcaggcaataggttcccggcacctcgggcgtgtactcgaaggtccagtgcacccatcgatcgcccgtggaaccagagacgtcgtagtcggtccagttctcgccgtcgtccaacgagaactggactgtaacgatgggcacgccgtagtcctcggcgtaaccctcgaagcgcaccgggcgccctacttccaccgcgagcggcgcaatcatcgcgatcctactcctgcgcgcccgctagcacgccggcgttcgggctgttgggatgctcgtcgccctcgccgggcaccgccggcgcctcgtcctcggccgataccacgatctccaccacatcacgcacgaagtagttcgcgggcgtgcgggtcatccacagctgattgctcccgcccaccgaggcagtgagcgcctcctcgttgatctcatagctgagcacgccgtggcgcccgatcacgtagccgaacggcagcatggtctcggtgccatcggccgacacgaacgtcaccgcattggccccgggctgcacgccggcgcgctccaggatggactcgatcggaatgcccttcacgttcgcggtaacgatagcgcggccgcccgcgggattgccgccgcaggtgcacgtcatcttctgctgcaccgactcgtcgccggcaagatcacccaccgaggcagtgtaggcgtcattcaccgcgcccgacaccgtcagttgccagtcgagcgggttctccgaagcaagcgcgataccagcgccacacaccacgcgcacggccttctggaacatcgtgcggatggtctcgttgggtgtgacggcctcctggtcgtaggagaagacgccctcggctcgggccaccttcaccgcaccggccacggcggcgttctcgcccacctccgcttgcgggtcggcggcagcattcccgtcagcgccatcgcccggcgccaccgccaaggccggcaccgccgacatggacgcgatcatcgtcaaactcgccaaagcgccagccgcggcccggcccttcgatttcaaatctctcatggtctccccctactccaccgtgaacatgaactgggtatcgtactggctcacatgatcggagccgtccggcgccacgctggtggtgcggatattcagcaggtacgtgcccgcctcaggcggcgtgaagtcgagtcgccaataggtccagaacttggaatcgttgttcggcgtgtccatc

SEQ ID NO: 10562 - DNA, 4765 bp, Unknown
  gut microbiota DNA sequence
actccaccttcttgatgggctcgttccatgcgtcggcgaagccctccaaatgcaccggcttggcctcgttgcccgtgagcactacgcccgtggggtagttcagcacgccgctgttgggcttggagtacacctcgcccgtgcagtcatcggcgaactcgcccaggtacacctggttcatggcggcgtcttcgggctgggtcatgaacgtgaggttgctgatgcgcttcacgaaattgccgccggaggtgttgtacacccacaccatgcagggatagccctgggtgttcggcagcacttcgccgtccatcttcgtgacgaggatggcattgttgtccaccacccaatcgatgggcatctgggcgtagtcgtagccatccgagccgatgggactcacgatgttggcactggccttgggcttcgcaaactcgataaccttcgacagcggaatgccctccacctcgctctgcatgatggtggcctggccaacgccgttgatggtgcagtccatcttcatgacctgcttcacggtgccgaactgctcttccatctcgggaagggtcatggtcaccggattgtcgcagtcgccgtcgatggagacggtccagttctcgtagatggacggatccacctgcgtgtcgtccacgagccactcggacggctcgtccttcaccgtcttaaagaagcggttctcggccggagtgatcgtggtctggtcgtagctcgtcgtcacctggacctcttcggcggccacgtcggtgatgccgtggtagaggttgtacttgtaatcgtcccaacgaccgagggtctgcgtctccacgtcgttgtagtggcacgagaagcaggtgccaccctggctcgtgaacatcgcgttcgtcatatgggtgttgtggatggcctcgcccaggtagttcgttccctggtaggtcttggaatggcacgcgatgcagttcgcgaaggtctgctcggtgggatagccgaagaagatcaggcgatggtaggtgggcagactcatgatggcgctctcaagcgtgtggcacgaggtgcagccgcggttctcggcgttcaggtacgtgatgttgaacgcgcgatcgtcggaaggcaccggctgcacggtgaacccattgcggtcggtgtagcgaagcggctcgttggcctcggcgttggcggcgttcttctcgctgttctgatagaagccgggcagggcggtcacgccgtccacaaaacggccctctgtggggaacccgctgatactggccagctgatcgctgtagccgtcacttgtcgccggagccggctcggttgttgtcgtggaatcggccgtcttgtcggccccatcgctcggcgcggcagccggagtgcagccccaggccaaacatcccgctcccaaaacgcacgcgagcaccgccgcgcacgcaatccccttgcgcgagcgccgccccgttctcgttgcttgctctctcatatctcctccttaggttttggaaaataagctcccctgacgcttcgcgcctcctctccgggctttcgaaacttgatggaatcggaatgggcgctgcgccggcacctgtgtgcggccgcagcgcttaatcccgggttggacttcgccgtatcaggccgtcgctgtcggcgatagaggcgcgtcggaagtcgtagtgctcggtgtacattttgtccagcagcgccttctcgtagaaaccgatgtcgcggttgtacagcgcggacgcctcgtcggtagcgcgaaattccggacgcagccgccccccgttgtcgtagtaatgcagataggcttcggcacaatgctcgcgcaaataggcccggcaccgctcgtgcaagtcgtcgttggcgaagaagaagtgccgcacgccgtcgtcgctctgctggagaaagcccagatccatcaggcgcccgaaatcgctgcgggcgctcggataggagatggcgtagcgcttcatgtgaatgtcgtaggtgaactccgcgttactgtgcagcaccgcctcgagcagcacttccttctggcgggcgttcatcgagccgtcggcgtcgatgatggcgcgcagtcgatcgcgccggcggctcatgccctcgagcttggtcatcacccagcgctgctcttccaaaataagctcgacggcgcgctcgaacacgagcgtccaatcgtaggtgccgtcgtattccacggccagatctcccggctcgaacggcagcgccggcgcgtccgcctcggcggcgtagcgcccgcgctcttgggcgcacagggcgctgccggtaccgtagagcaggcgcataacgggaacgtgggccgagaaatgatagcccgaacgatgaaggagcagcaggtagagcagataggcgaacggcgcattgcccacggggaacatccccgatgcgctcacgaagaacagcgccgtcagcgccacaataaggcgatggtcgccgcactggcccttgagggggccggtgcccccatcgatgaacgagcagagcagctcgagcccctcgacccgggccgaagtatcctcgggaaccgcctcgatgccggccaccagcctggcgtagaacatctcaatgaaagcaggggtgactgcttcgtcgcggtactcctctattgacagcagcaccttgccggcattggccgccagaagttcgatgccgcattccggctcgcaggcacgcacgcacactcgccgcagccgcgcgacatcgatgtcgggatgctcgaggccgatggcgtacaccacctcgttggccgccatgttcagttccaggtggccgccttccggatcgtagaagatgcgcccgtaatgggacgcgagcccctcgttgatctggaactcttcgaggagcgcctccaagtgccaggtggggtcgtaccagcagcgagccgaagccgaaagcgggggcagatcatgcccgaggccgcggcgcaagctgttgattgaaaaccagtacagcgccgcatcctcgggagtgacaccgagcgattccgccaaactgtcgtaggtttgcgcccgctgggaggcgatacgcagggcccgatcgagcagcggcgccgagcgaaatgccgacttggattccacgattctcccctcccctttgctctcccattcctcctccgaacgaaactatgttctcagaaagacgcgcccgacttcaagaggttgggcgcgcgctagaaagttttttccaccctttacccctcgccatcccgctaccgcaagagcggttctatgcaagaaaaagtgcggttgagcgagctttttcatcccgaaatggcagcccatgcagaaaagtgcgattgggcgagtccgaaactcgctcaatcgcacttttctgcgcacgaccgttgtatttctttgcaagcgagccggatctcgcacaattccacgaacagagacacgaaaaagcccgctgcggacagcgggctttcgattgcagcattgcgcggcaccgacaaacgatgcgcgactccaaacttagcgcttggagaactgcgggcgcttgcgggccttcttcagaccgtacttcttgcgctccaccatacgggcgtcgcgcgtgaggtagccggccttcttcagctcggcgcggtagtcgccggcctccagcagagcacgggagatgccgtgacgcagggcgccggcctgaccggacacgccgccgccgtcgatgcgagccttcacgtcgaagtggccggtggtgtcggtcaccttgaagggggtcatcgcgtagttgaacagcgcctcgcggccgaagtactcctggccgtcgcgaccgttgatggtcaccttgccagtgccgggaacgagacggacgcgcgccaccgcgttcttgcggcggccggtgccgtagtacaaagcctcatctgccatgattaaccctccagatcgatcttgcggggctgctgagcggcatggggatgctcagcgccgacgtacaccttcagtttcttgcccatcgcacggcccagcgtgttcttcggcagcatgcccttgacggcatgctcgatgacgcgctcggggtgcttggtcatggcctcggtgaacgtctcctgcttgagcccacccgggaacccgctgtgacgatagtaggtcttggtggcagccttggtaccggtgaccttgatcttgtcagcattgatgatgatgacaaagtcgcccgtgtccacatggggggtgtactgcggcttgtgcttgcccttcagaatctgagcagccttggtggccacacgaccgaggacctggtcctcagcgtcgatgatgacccactcgcgctcaacctcaccgggctttgcatgatacgtcttcactgttttcctccaatagattgcaggttctgtcgggcggctgaagcctcctttcccgcgtcggcgtggcagccgcgatagcggggacggaaccgcacctccagagtgtttgttttcaaaagtgcacgattctcagacgccggtttcctacgccgacacgcggtgcttcgggcctggacaaccctcggcggttgcgtttccttgaactcatgcgtttacggggcttttgaaagcgaacttttgcattctcgcccgtacgcgcgcgaatgtcaacgaaaccgctccgagaatgcgaagaatcgccaaaactccacccccgaacggcaggacgggcgcacttcaccacagaaggggaccatgcatagaaggacgatccctctgcagtagggaaggacggccgccacggaacgctccgtcgacgaaccagtcgaaaaatgcacgaggccgccacgttgcgctccgtcg

SEQ ID NO: 10563 - DNA, 63756 bp, Unknown
  gut microbiota DNA sequence
gcggacgaggcgcattccaggaagacgcttgacaaaccccaggtcagagcatcgcgcgtgcaggagcaccttcacagctggcaacctcgcacccctccagacgctcataaccgtcgatctcgtgcaaaaaggcccctcttcggcaaccaactccgaagagaccggcacggatctccctgaggtagcgcgagtaaatcgccatgggggctatcttgcgaccaaggaaccgatatgactaataagctagtcaaatagtcatttctaaggtaaaattccctcaaaaccttgtgggactttagaagggagctcccgtggcagcaagcattgctttggcggaagcgaaggcgaacctctcctccgtcgttcgacgcgtggacgaaacaggagccgagttcgttgtcaccgtgagaaaccgaccatgcgcgatgatcgtgcctatccctaagccagcaccgcgcaagctgaaggctgctggcgcgctcgcgggaaagagaccgaaggcgtcgcgcgccgaggaaaaggccgcttaccaaaatgcgctggaggcgaagtatgtcgaccttccttgatacgaactgcctgcttcgctatcttcttgctgatatcaaagatcaattcgagacggtatgccgacatgtggaaaacggcgcgtgcacctcacccgaattcgtagccgaatgtgtctatgcactcggcggaacggtttacggcttcgaccgaaccgacgtggccaacaccatgacagcgctcctcgacgacatcgcctgcgaacacgaggcggccgtacgctacgccctcgagctctatcggaaccacacgctcgacttcgccgactgtatgctggccgcccgcttcgtcgtggaaggcacccccgtgctcaccttcgacaaaaagctcaaccgattgctggaggaactcgcgtagccctctctgcgcctgcgccgttgcgaggggaattgtttccgttggcttacacgcgggcggttgcgctcgcaggcgcgcaggcgatggcgcacaatacggaatgctttgtgaaatcccggggtctaaggaagcctgtccgttatggaaactctgtcgccgttcgcattcgtcacgttggtcacgcttatctccggcgccgggggaacggggctcggcggcctcattggcgcgctgtttaagagcgagtcgaaccgcaccatcagcctgcttttggccttcgccggcggcgtcatgaccgccatggtgtgcttcgatcttctggccgaggccgaggaggccgccggccagatcgccgagcacggcgtgctgctcgtcatcctcgccgtggccctgggcgtggccgtggtgtacctgctgaaccacctcatcgaccgcaagacccgcaaagaggtctcgcacaccgccgatgcgcaccaccccgaaacccacgacgacatcgacgagctggtgcacgccgaccacctgaacatgcacaagcgccacaacgactcgaagctgtcgctgttcgtggcgggcgtcgtcatggcctgcgccatcgccctgcacaacattcccgagggcatgaccatcggcgccagcttcgccgtgtccgacaacctcatgtggggcacgggcatgatcatggccgtgctcatcggcctgcacaacatccccgagggcatggccgtggccgtgccgctcatctccggcggcaccgggcgcgcgcgtgcaactctcatcacggcggcctgcgggctgcctacgctactcggcgcgtggctcggcttctggctcggcgacatcgggcctttgggcctcacgctgtcgctcgggttcgcctcgggcgctatgctgtacgtggtcttcggcgagatcctgcccgaggcctacctcatctaccggagcaagctccccgccttcgccgtcatggtaggcctggccctgggcatgttcatgatcttcttttagaaggccgagcgaaaggcgcatcgtcggctggcggttggcatcgtaaacgccgacgaaagaagattgtttcttgactctgcccccctccccctgtaggatgcttggtacaggcagcaatgcgctgtatacccgggctcccgaactaaacgtttaagcggcattttctgtcgtcggccccgggcgggataccgccttcgggcggtattttcgtatcaggaggcaaggagcttcatgagcatatttgtatacggagacgagtcaggcgtattcgatgccgcccatcacgatgtgttcgtcttcggaggcctcgtctttctcaacaaggaagctcgcgacgccgaatatcgccggttcattgcagctgaaagaaaacttgcaccgctctacggtgccacagatcgcaacttcgaactcaaggcatgccgcttgaagaacaagcataaggcgggtcttttccgttccaccaaccattgcatacgttacgcgtttgtagttgatcagcgcaacgtcaatgagaatatcttctccagcaagaagtcgaagcagcgctaccttgactacgtttacaaagtagggctaaagcgggtattcggacggctcatccaggcgggcaagctaaaaccctcttccgtgtccggcctcttcattcgattcgacgagcacaccacagcaaccgatggccggtacgagcttcgagaggccatcgagcaggagttcaagttcgggacgcacaactttaaatacaacactttccacccccctcttttcccggggatgcagggaaccgtgcatctggaattcagggactcaaagaacgacgcactcattcgcgcctcagacatcatcgccaatcaaatgtggtaccacgagataagcggccaatttgaaaagatggaaggaaaggccatcgtcgtgcgttttccctagcttgaacactcaaccgagacaatgcgcccccgttggcaaacagaaatcgttcgacatatgctcgagaccttacttgaaaatccatcttcccagcggtcagagcagcaacacaactgctgtcttctagcgcagcgaagagcattagtttgaattgcgaaccgcacgatttcgcgctctcccccgagttgggctgacgcgccgcgctacctcatctaccggagcaaactccccgccttcgccgtcatggtgggcctggccctgggcatgttcatgatcttcttttagaaagccgggcgaaccttgccgatgcccggatgatcgaggaattcaacgtaggcaagccagatctccccgggcttcgggtcatgcgagggcatcgtagaccccgtcgtcctcttcgtcgtcccaatcggcaggcaaaatggtccggcgcgtttccggatcgactcggacaacaccctgcttcgcccagtcgatactcggaatatgatcgccatagccactctctatgggcgccaccagcacccacggtttcgaattcttgaacacggtgacgggtcgcccggtttcgcgcactgtcgcagcgattttcgagaaattggcccgcgtctcagcgacggtcgcagtcatttcggccatgatgccccctttcaagatgtttgacgatctcaattatagccattctcatgtacaaatatatgtacatgagatgacatttctctcatggagatgcaccgctacgccgagatcagcggaaagaaggtcatatcgccagaataaaggcgatgaccgccgtgccgatggctgcggtacggcgcttcgcccttagctggtaaatgaagagaatgagaaggtagccgaagacgatccctttcgtaatcacatcagcaacgacgcggggcataccccagaaaaacgtcgccagcgcacagagcacaataacgacaaggaggacaagggggccgacgacccacgggttccgcaggctccagaactcgttggtgctctcgtgctcgatccaccatagggctgtcctacgttcacgcttatcgtcgatcattacttgccctccttttagtcgccactattgaaagagtataaagaaaactgcataggtggccgcaaggccccaaagttcgagcgccgtgcaaaagtagcgcctcgccagaattgtgcgaacaacagcgaagcactcgaacgccatcgtggccgcgccccacccaacacgtcggatgtcttccggtaggccgaagacgggcaggacggcaatcagcaccataacgaacgcccagacggcggttactaccttatccgcccgagtccacaagctgggcctatttgcgctttcgctcatattgaccacctatctggcgcttctctaacttgatgttcccgctcatttaatcgaggtcaaattgagaggttaaagcagcattccgacaatagcacagattgcacgcacgcgacgacccgtcttcaacacccaagaaaacagcggtctcagaagagcccgagccagagagccatcggcccagccacccacaacagcaaagcaatcataatggaaatgcagcaacatatatacatgcaatgaggaccgcagctgccaacgccgcgataacccatgggccgcgcattgaccattcgtctgcccgcgacacgacaacttcaaaaaagctgcaacctcgcttgacacttttttgtttcatgcggccgccccatcaatcacaagccccgcgtccccatggagtgccgagccaatcagcgcagtcacaacactccatgaggcaccgtccaaagaccagaggctcaacatttgaaatcaagcacgttgaggtccgatggcccgcttaccctacgccgcattttcgcaatgcaggctagaaaaggcagttgaagagcctgaataccgaagcggccgacccaaccagagccccgccaggccccgtccataccatgctagccgccaatcccgcgtttgtgattagtagctcgttgtagcattttcgttctttcgcgttaagcttcacagtacctggaacaggacgattgttcttgaagccgtgagcatcgcaccaggccttagaaaacctatctgtgcattggccgcgttcgaggggcatgatgccgggatcctggtagttgtcggggacgtagatgtcgcctgatccgccgggatttgcgggttcaccaccgatgtcggcgaaggccatcgcagcaggcgacaaagtcagggccgcgcaaagggccaaagaggtcagtgttgcacttactttcttcattgttgtttctttcattgtccgatgataccagcaattgtccactcctttctcccttgagtgctggtgctcactggttgtaagaggcatattcttggagcaacgccagagaatcttcttccccttgcgctgagccaagaacttccccctgatcattcaaaataaagaccgtcgggatgtgctctaacccgtaagcctcatagacgcttttatcctgatcgaggtagatagggaaatcccccttatgcccttcaacatcgtcaaggctttcgtcttccgcaacggtaaataagtttttcttaatcgcatcggcgctatctaactgatcgattctctcgatcagcgactcacaatgggggcaccatgagccccaaaaaagcagcacgttctcctcgtctttttgaagcttatcaaaataacgatcttcgccacccaagctaaaatccgtcgccgtcgtcagcgctgaatagttctgagtgtacggttcatggctctctgcaacacaacctgtcactgagcccacaagcaccccaagtaaaagcaccgcgacgacaaatgaggcgttttttcgaagccattttttgcacataggaaacacctcctctaagagctgattctggcctgtcatagtaaacgtaagctgatcagcaaaattactatataacaattatttttgtaacacaaggtcaatagttacttttttttaataatttctaagtagcagtatcgagcgaactgcccaagtaacaaagcagcaaaaagacattccaggtattcgaattgttttagatttcccctagactatcgttgatgcatggtctactatgtttattgtcgtacaataatttttacgagaggagtcctcatgctgttctttagtgacagcacattcgccgccgcttgcctaggcataggccctacaggtcattgcgttcaaattggaattgccacgcccgctccagacgattgccccgagcaatagcagcaagacaggcgttggagcccaacagtggataagcaattagccgcaatcaagacaacgcggagcaagctcgtttcaacaagtcgtggactcgccactctcttcttgatcattttcgttttgtactgcgccgcccatgtcgcggtttttctttatatggccctattacccaatgggttttcctatctcggcccttcaacgcttgcgggcaccttgcctttcatcattccttctatatcaggcggtttcaccattttcttgctctggcgcattttccgtgaaatcgggcgcaatgcctcccctttcacaccattgcgggttcgacaaatcagagcgttaggtttcctctttttggctacggcgatttgcggcttcttcatcacccccggcacagatgttggcgccatcaatggggatgcccatatgctcatcgaaagcgatgcgtctgcgagcgattcgattcacgttgatgcaaccagcttcatgatctccatagtgtgtttcgcgctctcatttatttttagctatggtgccactcttgagcaggaaaccgacgacctagtgtaaaatcacggccatgaaatacgcaatccagctcggtaagctcatgaaggaacgcggtgtgcgcggcaccgacctcgttgagcttaccggacatactccggccaatatttcgcgcttgcgacaggggaagatccgttcggtgcggttctccaccttgttcgctatctgcgatcgcttggactgcgcccccggcgacatcctcattcgcatcaccgatgaggaggccgaacatcccgagaagggcgtcttcgtgatcaatttagaagacgaagccgacgactagcgcttccgctccccacccctcaccccaaggcttaacaaaggcgaaacaccggggtcggtttcgcgaaacattgctctcctatgctgacgatacagcattccgcacaatgcacaaggagaacgctatgtacgatttcgaccgaccgcgcaccgcgcgccccgacgccgcaggcaccgggaccgtcgccggctccggccgccttgcgccctgcgaccggcacccgcgcgcgccccgcgaaggcgacgtgcgcattccggccgggtgcgccatcgcggccatcatggaccgaagcggcgcgcgccacgacgggagcgacatcctgcgctccatcgcgctcatgcacgaccgctccaacggcctgggcggcggcttcgcggcctacggcatctacccggagtacgaggagctctacgccttccacatcatgtacgagtccgatgaggcccggcgcgagaccgaggcctacctggacacctacttcatgagcgagaagcaggagcgcatccccaccgagcccgtcgcctccatcaagaacccgccggacatctggcgctacttcgccgccccgcaccccatgcgcctggcggccagcggcctggacgaggccgagtacaccatggcccacgtcttccacatcaacgggaagatcgacggggccttcgtcgcctcgtcgggcaagaacatgggcgccttcaagggcgtgggctaccccgaggacatcggcgcgttctaccgcatctgcgactacgacgcctgggcctggacggcccacgggcgcttccccaccaacacccccggctggtggggcggcgcgcacccgttcacgctgctgaactggtcggtggtgcacaacggcgagatttccagctacgacgcgaaccgccgctacgtggagcagttcggctacgactgcgagctgcagaccgacaccgaggtcatcacctacctgttcgatctgctgagccgccgccacgggctcacgccggagctggccgcccacatcatgaccgcgccggcctgggacgagatcgacgccatggaacccgccgacgccgccttcgaaaccgccctgcgtaccacttacgcgagcgctctcgtgaacgggcccttctcggtgatcttgggctcgagcgaggggttgctcgccatcaacgaccggctgaagctgcgggcgctcatggccgccgagaagggctccatggtgtacatggccagcgagcaggcggccatcgagctggtgtgccccgacgcggagaacatgcgcgccatcgggggcggcgagccctttgtggtgcagctggattccgtggtcgccgccaaggccgccgccgatgccgacgccgagaacgatccgcacaacgcgccgctggcccacgaagtcggcgtgctgccccgccggaaggaggcttaaatcatgcgcgacttccgcaacccccgctacaaagtactgcgcgaccgggaagaatgcatcgaatgcgacctgtgcgtgcgccaatgcgccaacgaggtgcactaccgcgacgagaaaactggcgccctgcgcgccgattccatgaagtgcgtgaactgccagcgctgcacgctcctgtgccccactcgggcccttgccatcacccgctggccccaggtggatgctggaagcgccgtgtggaccgaaggcgccatggacgacatcaccgcccaggcgcagaccggaggggtgctcctcgcctccatgggcaatccgaagagctaccacatctactgggagcatctgctgctgaatgcgagccaggtgaccaacccctccattgatcctctgcgcgagcccatggaaacccgcgtggtgctgggcagccgcccgagcaagctgcgcgtgaacgagtgcacccgcaccgtcgtctctcccctcccgccccagctgtcgctagatgtgcccatcatgttctcggccatgagcttcggctcggtgtcgcttaacactcagaaggcgctcgcgatggccgcgcgcgagctgggcacctacttcaactgcggcgagggcggcctgcaccgcgatctggaaccctacgccgaccgcgccatcgtgcaggtggccagcggacgcttcggcgtggacccgcactacctgaacgccggcgccgccatcgagatcaagatcggccaaggcgccaagcccggcatcggggggcatctgcccggcgagaagatcaacgaggaggtgtcgcgcacccgcatgattcccgagggcaccgacgccatctcgccggcgccgcaccacgatatctactccatcgaggacttgcgccagctcatcttctcgctgaaggaggccaccggatataccaagcccgtggctgtgaaggtggccgccgtgcacaacgtggccgccatcgcctccggcatggcccgggccggcgccgacatcatcgtgctggacggcttccgcggcggcacgggcgcggcgcccaagcgcattcgcgacaacgtgggcatccccatcgagctggccctggcggccgtggacgagcggctgcgccaggagggcatccgctccacagtgagcctcgtggcctcgggcaccctgcgcaacgccgccgacgtggtgcgggccgtggccctcggcgccgacgccgtctccatcgggtcggcggcgctcatcgccatgggctgccaccagtgcggcgactgcgcaagcggccgctgcaactggggtatcgccacccagcgggccgacctggtggcccgcctgaaccccgaggccgccgccgagcgcgtggtgaacctcgtgtccggctggaaccgcgagattcaggagatgatgggcggcatgggcatcaacgccatcgactccctgcgcggcaaccggctcatgctacgcggcgtgggcctgaacgagaaggaactggaaatcctcggcgtaaagtacgcgggagagtgatcgcatggctgaaaccatcatcgtggaattgggaacgaagcacttccaagaggccaatgccgccgtacgcgcggcgctcgccgaggccgacaccgtctgcatcgtggaggcctacgcccagcgctacctgggctgcaccctgcccgcgggcaagcgcctggaaattcacggaacccccggcaacgacttggcctgctacatggacggcggcgaggtggaggtattcggaagcgcccaggaccaaaccgccaacaccatgaacgccggctccgtggtggtccacgggcgcgtgggcgacgcggccggctacgccatgcgcggcggcgagctcatcgtgcgcgacggctgcggctggcgcggcggcatcaacatgaagcagtacggcgaaaagcgcccggtcatcgtcatcggcggggatgcgggcgacttcctcggcgagtacatggccggcggcatcatcgtgctcatgggccgcgccggggatcatttggcctccggaatgcacggcggggtcatctaccttcgacgcaccaatgcgccggccgtggtgcccgacgggctggatctaggggagctgaccgacgaggacacaacgaccctcggcgcgctgcttgcccgctacgacgcctgcttcggcaccgagccccacgagcaggcgagcgtggatgagttcgtcgcgctgcgccccgcctccagccgcccctatgcggccatgtacgcgagctagcggccgttcggcctcacgcccacgcagaaggagccccggcggtgcaaccggggctccttctgttagttccaggggtcttccgagaacaagggctcgcgctcggcggggcgatcggaatagggatcgtagccgtcgtcgtcctcgttctccgcgcggacgaaggggtcgtcgggggccgcatcggcagcccgctgcttcgcgatctggctcggcagcggcttcactacgatgcgagcatgcgggtcctgccgcggatcaatgggcatgacggttattccttctcgccggcacgggtgatgtcgtagggggtcgtctggtacacatagtagttcagccagttggtatagagcaactgggcgcaggagaaccacgtggaaaccggctcgcgcgccgggtcgtcgtcagggaagtagtgggctggcacggccatggccatgcccttggcgatgtcgcggtcgtattccgccttcaacgtttcacggtcgtattccgggtggccgaacacgaagaagttctgcgagtcggtggacttcgccacgtacaccccggcctcgtcggacacggcgatcagctccagctcgggatgcgcctcgatgtcggcggcccgtacctcggtgaagcgcgagtggggcgcgaagaactcgtcgtcgaacccacgcacgagcggcgaggtgcgcttgaccaccgcgtggggaaacacgccgaacatcttctcgggcagctcgtgtttgggcacgccgtagtggtagtagatgccggcctgggcaccccagcagatgtgcagcgtggaatgcacgtgggtcttcgaccactccatgatctcgcagagctcaggccagtagtccaccgcctcgaattccagccgctccactggcgcgccggtgatgataagaccgtcgaagtgctcgtcgcgcaccgcgtcgaaggtggtgtagaaggcttccaagtgctcggcggccgtgttcttcgagtcgtgactcgccgtctgcagaagctccacctccacctggatgggggtgttcgagagcttgcgcagaatctgcgtctccgtggtgatcttcgtgggcatgaggttcaaaagcaacacgcgcagaggacgaatgtcctggtgcatggcgcggtgttccgtcatgacgaagatgttctcctcttccagcgccgccgtggccggcagcgcatcgggaatgcgaatgggcatggtgcctcctattccacggcggccagggcctggtcgatgtcggcaatgagatcggcagcgtcctcgatgccgcaggacaggcggatgaggtcggcgctgatgccggccgcctcaagctcggcgtcgttcatctggcgatgggtggcgttggccgggtgcagcacgcaggtgcgggcgtcggccacgtgggtggcgatctgcgccagcttcaggttcttcatgaaggtctcggccgccgcgcgcccgccggccacgccgaagctcaccacgccgcaggatccgtccggcaggtacttcgccgccagggccgcctcggcgtcgcccgaaagcgacggatggcgcacccaagccaccttcgggtggctcgccaggtgctcggccaccgcgcgcccgttggcggcgtgccgggccatgcgcaggtgcaggctctccagccccaggttgatgaggaaggcgttctgcggcgactggatggggcccaaatcgcgcatgagctgggccgtcgccttggtgatgtaggcgccctccagcccgaaccgctccgtgtacaccacgccgtggtagctctcatcgggcgtcgtgagccccgggaacttgtcggcgtgggcgttccaattaaagcggcccgaatccacgatgacgcctccgacggaagcgccgtggccgtccatgtacttggtagtggagtgggtcacgatatcggcgccccactcgatgggacggcacagcaccggcgtggggaaggtgttgtccacgatgagcggcacaccgtgagcgtgggccgccgccgcgaagcgctcgatgtcgagcaccgccagggccgggttcgcgatggtctcgccgaagacgcacttcgtgttggggcggaaggcggcttccagttcctcgtcggtgcagtgcgggtccacgaacgtgcattccagccccatgcggcccatggtgtgggcgagcaggttgtaggtgccaccgtagatggccgaggaggccaccacgtgatcgccggcgcccgcgatgttgaacaccgcgaagaagttcgccgcctggcccgaggaggtgagcatggccgcagctccgccctccagctccgcgatcttcgccgccacggcatcgttggtggggttcgccaggcgcgtgtagaagtagccggactcctccagatcgaacaggcgccccatatgctcgctcgtgtcgtacttccacgtggtgttctggtagatgggcacctggcgcggctcgccgtcgccgggccgccacccgccttgcacgcaggttgttccaatccgctcgctcattcagggctcctttgggtctcgcattttttcgctcgcccattataggggcacccgagccaccgccgttataggaagtccccagcgaacgtcatcggaatcaccgaaatcgaccgaatgtcgagtctgcaaaagcaaagggccccgaggacaatcctcggggcccaatctctatcggcacgctcccgcaatgcgcccgtttgcaagggggtttggggatgagcgcactgcgagggcagcttttagaagaacatgaacacggacgcgccggccgagtagaacaccatgcgtaggcacacagcgcccacaatcgcacagacgaggccgattgtcgcaagagccgccgtcgaggcattcttacgacgtccgacaagagcgcacacgagaggcactacgcagcccacggcgatgacgccgatccagaacagcagggatgcctcgccggtcaagatattggcagcctcaaccggattggcgataggctgattggggtgagtcggatcccaatacagaccaacttcggtaaaggacgccgcacttgccatgaccgccacgccccagataagggaaaacacggcattggcggcggctccagcgatggaagaaaccccgagcaccttcgcggtgctaatctcgtcgctctcggtctcttcttcggatttgcagcacttgccgagcaagatcaccgtcagcggaccgagcagagcggcattgcccaggtaggcgagccacaaaagcggcgaatcccatgccggccgggctgccatgttgtaggaatggctcatgacaaccaccagcaccaccgaaatcaccagtgcgcacacggccagccacttcggaacggtgccctcgggcttacgcagatatacgaagtacagcaccatgaccaccgccatcaccacaatggcgacaagctcctgggtaatgcccgaggtggggttgccgaaaccgttgaatatgcgatcccagtgctccagatggaagaacaccgcgacgccgcccacgatcagaagcaccaccgaggtgatgagcgccggcatttgcacgcggcgccccgtgccggcgagggaaaggacggcgctcgcgccgaagacgccggccgaccaggccatgaacaatgtgaacagaataaggggccattgcatttccatggtctactcctttccctgccacgtgtggtcgcgcaggatatagaggaacgacggtttgttccccacatcggtgagcgtgtgcacgtcggccccctcatcgaagggctcgcagaagctgccgatagtttcgccacgcgggccgcggaagctcttgatgccctcgtccaaatctccgaaccacttggccatgcccacgcagttggtgacgcattgcggcagctccccctgggcaatctgctgctcgcacagggtgcacttctctaccacgcgctcttcctcgttcaggtagcgaacgccgtaggggcagctcatggcgcagaactggcaaccgatgcactttcccttgtcaatctgcaccgtgccgtcaggcagcttatgtgaggcgcccgtgggacacaccttcacgcattccggctcctcgcagtgctggcactgcaccggcaggaagtaaaagtcgtggctgggcacctcgccttcgcccggctcgttggggccgatgcgcagcaccttgttccagaaactgccgatgggcacgttgttggtcattttgcaggcaccgttgcaggccatgcagcccacgcagcggttgcagtcgatggcgagtgcgtagcgcgccattactgatccctcccctcgtagacgggcgcccaatccttcaagcgcgcgtcgctcgcatcgtgaatgatctccgtgccgtcctcggtacaagggcacgggttgccgaacggactgttgtcggctgtcgccttgtacaccttcaccggatagccgcgaacaatggccgaaccgcaatgggggtcgtcaatatcgttgttgaccagctggttgaccgccgaatagcgccaaccgtgctcgggggcaggcatttccggataccaccaggtgtgctcgcagttgatgacgccccgcggaatgccgtagtacaaatcggccgtctcgcggatcttcccgtgggggctttcgatccacacccagtcgccctgttcgatgccccactcggcggcatcctccgggttgatctccacgcgcggtaccggccaaacctcgcggcaccacggcagctgccgatgctccgagtggaagtacaccggaatgcggcggccggtcaggcactgcaccgggtactcgtcccacaactcgggattgcggtcacgagaatcggggttggggcggtaatcgggaagggcatcctcggcgccgtggaaggtctccatgatggtgcaccagatctcctgcttcatcgtgggggtgttgaagccgggaatgacgttggaggcagtgggctcgtcagtgtaggccttcttcatgaagcccgtttggaagcggtagtaggtgccccaatcgtcgggacggatcttcttcacgtcccaccaaccgttctcctggaactcgttgacgaaggcctcccagctcggcgacacctcgcgcacgacgtagtcgagcttctcctccaaggtgggataggggttgttctcgtcccagccccaaggcaagccaacgcgccggtacagctcctcgacgatctcggggtcgtagcgtgcttccgccaaaggctccacacagggcacgcaggcgcccaaggcaccgccagacccctgactctgacgcgggcaggcgatctcgagccagtgtgtgcacggcaggatgatgtcggccatctcgctagtggggtggtgccacaggtcgatgtcgaacatgaaatcaagctgttgcagggtttcccacgccatggtggtgttgcccatgttcatgaaatcgccggactggcagacggcgcccttcaccggatagggctcgccggtaacaccggcctcccagatgctgttggcgttggcccacagcgcccaccactcgaacagagggtgcttgtcgcggccgagctgcttctccatgatctccggatggttgagcggcgtatcgatggtcttggaataagactgatccgagaagttgcccatgtagttcacgtccagcttcgtggcgccgcgctggccgcccgggccgtcggtgttgccggtaatggccgtgagcaactcgatggcgcgacagttcatgatggagttgccatgatgctcgacagcgagctggtacatgatgccgccgttgccccagcgcggatccttgcgggtgccgtagaccaaggccgcctcggtcaccttctcggccggcacgccggtgatctcggcggatttgtccggcgcgtactcggcgcagcgctcggcgaacttctgccacacgggcaccgccgtatgcttggaaccgtcggcgaaggtcacttcgaaggaaccctcagtcgccggatcgatggcctcgaaatcctgcagctcgggcatccagcactgagcatggccctcgcgcacgttggcctcgccccattgaccggcaaaggtgcgctccgaccaattgtcagcgttgcccgtaccgtcgtagcgcgggtaaggcttctcgccctcccagataccgcactccggatcggctgccggatcgtagtcggggttggccttcgcctgatcggccgaggcattgaaccacttcagggagttcgacgccttgtcccataccatatacttccaaggactgccgtcttcttgcagatcggcctgggtgagcaacttggtcttcaccatggtgggcccatggaagatatgggggaccggcggtccggagggttccttgtcatccaccacgaggaagcaggcgttggtccagcgtttcacgaacttccaatcgaccaggtcgttctcgatgatgacgtgacacatggccagcgcgagcgccgtatcggtgcccccctttaaagccaagtggatgtcagactccttgcccaagttggtcgtgcgcgggtctaccgaaatgaacgtatcggcctgcatggcctcatcgatgaccgaccgccccgcctcatcgtagttggagccttccggcgtggaggcccaaatggtgaacaccggcggccgctcgaccgtcgccgaccagctgtggttgtactccgaggtgagcgccgacgcgaagtggcgcgggcctttgcacacctgccaggccaccgaggtgttcggcgtcatgaaccatggaccgtagccggcatagggggacatgcaccagatacgccccgtgccgcccatggtgaacagcgcctcgccgccgtacttgtccttcacctgctgaatgccctccacgatggcatcgagcgcctcatcccagccgatgcggacccaaccgggatcctcgcctttgggattggtgcgcttcatagggtagcgcagacggtctggatggtagcacgcctgcagcgaagacaccgacttgttgcagcagctgcccatggtatggggagcgctctcgtcgccctcgatcttcacggctcggccgttttccaccgtcacccacacgccgcactccattttgccgcaaccgcggcagcaggtgcggatgcgcttcacctcgccggcgctgtcgacggccgtgtacggggcagccgccaatgcgctctcggcacccgccgacaagccgacggcggccgcagcgacagccgacgtcttcaggaaagtgcgtcgggacagcgttaatgagctcatcttttcctccttctcctcttctctcttaatgcagatgcgcggaatccgtccgcgcccgggtgcgacaccgcgaaaagctgggtagacctcccgcaatgccgcgaggatagcgcccgtttgctaggctgcgcagccagcttatcgccgccgaggcaacaacggtgctgcactctcgcgccgcttcgcgcaatgtgcgagccgctgttgcgcgagcatggatctgggcgcatcccgttctttggtgatgccatacttgcatcaccaaatcggaggccgcatactaggggcactgccaccgtgagatactgggcacgagaagaaaagaggggctatggaaatcgattacttgcgagaattcaccgtgcttgcgcgccagctgaactatcgcgaggcggcagccgagcttcacctgtctcagtcgaccctcagcaggcacatcaccgcccttgaggccctttacggcgttccgctgttccagcgcgatcgccacgctgtgcacctcacagacgctggcgtctttcttctcgattacgccaaaggcatctgggatcagtactcgctttcccgtgaacatatgcaacggctcttcgctggagaacatctgcttcgtatcagcggcgtcatcgggcacccttcgctctatccttgcatacgggatgcggaatcgctgctgcacgatatcgatccgactgcgacgctgcgcatcgagcgaaacgcaagtgctgtgccaggggatcaaatcgatgagctggacaacgatggggcggactgcgcgctcctgttttcggctgtcgacgaccttgaaggccacgacgatttggcctgccttccgctggcgacggtgcccatggcccttatcgtgcgccgagatcatcctcttgccagcgcgccctccattgatgccaccatgctggaaggcggcacgttcgtccaattgactggtcctgatttctccgcccattggcgtgttttcgggaagctgctcgacagagcgggcatcggctatacgacgatgccctatccggccaatagcgagtacgacgccgttcgagccgctgacgtcatgggacggcatctgtatcttacccagcgctatgccattcttcccgccatggcccagaatcccgatctagtggccatcccccttgccgacgagcggcttatgccctctctcgatctgatttatcgcctcgggcacaaagaagggcttgcgcgcaatgccgcctcatgcctcgcggaggccttccgccgcttcacggagacgcattaacgcccattcacccgttccgtagatttcttctttagttgaaaatgcaccattgttctaagaacatttgtttgctacaatatgactacggagatgagagcggttgcatttattgttactaattgttacaataaattgcgccatgcagaaggtcgagagacatgcccatgacagctagagaagcgatacggctcaccaagaaaatgggcggacgcttcgtcaggcacggagcgagacatgacattttcgcgaatgcggctggcgaagagttccctatcccccgccaccccggagatctttcgccgggggtcgagcgagccatcaaagaaaagctagggcttctctaatacttcacccaatagagaggaagcgacctatgaagtttctctacgaagccatcctcaccccgtggagcggcgggtgggaagctgagtttcccgacctgggtatctgcacccagggggacactctgttcgatgcggctttcatggcgcaagatctgctgaccctctggatctcccaagcgcttcgtgaaggacggcccttgccggagccgcggatggaccatcccgcccccgcaaacggcaaggccatcgccgttgccgtggaatgcgatgccgacacgccttccctcaccaccatgaccgtccaagaagcggcggatatcctcgatgtcagcacctcgcgcatacacgccatgattcgcgacggcattctgagaaccgagaaagttggcagcgcccgccttgtgtcagccgacgatgtcatagactatttcaatagcccccgaactgctggccgcccaaagaaggtcgcgaccgcctgatttcgggagatgtgtctagcgggcctccaccttgtcgaggagctcctgtcggttgttgaccagggacttctcgtagatgtggcgcacgtgggtcttcacggtgcccgtggtcacgaacagctcgttggcgatatagggaagggtgcggccgcgcactagcagcccgaggatctccgcctcgcgggccgtcagccccacggcccgggcaaaagcggcagcaggatcctcttcttgcgcttcgtccagcacgctagagcccttaccctccgcaagagcaagttcggtggagcaggaagacttccccgtccgaccctgttctcttcttggcgcctcttccgcctcttccacctcttccatcttttccgcatccccctctgcctcctcgccctcgtccgcgcctacctgcgcggctcgggccactaccataaagaacagcgcgagcacaccggcgccgcatacggcagacagtagcaagggcgtctctcccgccatctgaaacagcagcttgccgacgaggttccccgcgagcaccacggcgctgatcagcgcttggcccacaccgaaggccaccaagggagacaagccctgaagacgggtgctgcgcgtcaccaccacatagacgagcggttggaagaacagcgtgcagccctgaacgagcgcccctccaaccgacaccgccgccgcaccgagcaccagaatagccacaagacccacgacgctgaaggtgacggtgatgcgatacagctgcgctacggagaaggccgtccgctcagccgtcaggggcacgagcgccatggtggcgatgcaggcgcaaagagcgatgccacccgggtaaaggctgtcggccccctcgtaggaagtgcccatgatgaccgaggccatcacgttgcccacaagggccgccacggcaatcacccccagcgagcgccacggaagcgcatgtagctcgcgcgagccggccgtcacctcaccgggagccttcccggaggaacccggcgaacccgctatgtcggtagagagagcagaggaggggaacacctcgggagcaagccccgaacgtgccgaggcatcccagaaccagaggccccaggaaactaggggcagaaagacaacaacgacctgggccgccacgacaaagggcgttgcgacgtaaagcaagagaattgcgaaatagatcccataggccacgaggaacgagaccatgacgactgccgacacatcccttgactccaaggagtagcgggcgccccaggcgcagccgagcagcgttcctgcaaccccgcatatcgccccgcagccgacgaggggccatggcgcgtcgatcgccaccgtcagcggaagcagcgcgctcgccagcgcgagcagcgaggcgcacaccagcagcacgccgcgccccaccgcaacggagcgcttccgcaaagcgaggacgatggccacagcggcagccaccaccgcgccttgggagacgaagaaaccgacttcgatgccgacgccgccgaccggtcgctcggcgggaatgagcacggggctcagatacgccagaaacccccaagcccacaggcaggccgagccgaacaccgcccggccccagcccacgcggcgggcgccccgcaccgcctcggcaccttctcgttcatttagcacagccccagccaccacacgctcctctcttgaactggagtaagtatcgcacagatcagtgcggccatcacgaacaaccacaggagacgacatggctttgaactgcgttttctcaaatatctaccgtttcggtagatggggttagcgcacctggcgagcaaagatagggccaccgcgttgaggctccggcaaagggccggcacccgacgccgagagacacgatggagggaacatcatgaccgaatgcacccaacccagcaccccgtccgccccgtgccccacgggcagctcgaaccccgccacggcgccttccgtgagccggcgcggcttcctctccggcgcggccgtcgccgccggggccgccgccctcgcaggccttgcgggttgcgcgcccaagacccaggccgaagtcgcgggcgagaccatcgccgccgacgatgcggcgaccggcggcgccatgcagaccaccgatcccgccaaggccgtctggccggtggtagaggaagtggaagtgggctcggccggcgagggagtggtcgccttcgtggcagagcccatcgccgccgatgagatcgtcgccacccacgacgtggacgtcgtcgtctgcggcctgggaccggccggcgacgccgccgccctggcctgcgccgagcagggcctgaaaaccgtggccgtggagaagcagaaccgcggcaactacaactcggccaccatcggcggcaccaattccgagctgcacaagttctggggcatggagtacgacaccaccgagtggatgtcagacgccatgatcggctgctcgttccaggcggacatgacgctgtaccagcactacctcgagaagaacggcgaagccgtgaactggtacatcagccacttcgacaaccaagacttcaacgactaccccctcaccttcgccgccggcgacttccccgacttccgcgagcagtacgaccccacggcgctcagccgctcgtggaacacgtcgctaaatctcccctaccctcccggtgagctggccgatatcctcgccggcatcctcactgaggccggcgtcgagatccgctacgagaccccggcctgccagttggtgaccgacgaggcaggctccgtgaccggcgtcatcgtgaagagcgccgacggctatgagcagtacaactgcgccaagggcgtcgtgctcgccaccggcggctacgagttcaaccagcagatgctgaaggagcgctgccgcccccgcggcgtaccgggccgctggctcaccggcgccttcggcaacaccggcgacggccttcaaatgggagtggccgtcggcgctgccgaagatgagttccctcagtccatcatgctcgatcccgagcagctcatgcccttcgtgcgcgtgaacaagctcggcaagaggttcaccccggagtacgacccttacggccagctggccatggccatccagtaccagcccggcacctacgatttctacatcgtcgacagtgccctggacaccaagatcgacaagatttggacgccgagctcttcctgctacgggcccaaggagcagtggatagctgctgcccagagcgagaacgccttcaaggccgacaccctggaagagctggccgagctcatggaagtgcccgccgacaccttcgtggagactatcaaccactggaacgagatgtgcgccgccggcgccgacaccgacttcgacatgcccggctccatgatgatgaccatcgatcagccgccgttctacgccaccaaggagttcgccgacggcctgtgcaccacgggcggtctcatcgtcgacaccgagtgccgcgtgctcgacaaggatcgccagcccatcgagggcctgttcgcggcaggcatcgtgtccggcggcatgttctacaacacctacccgcacaatttgaactgcctctctcacacgcgcaactgcctgatgggctacaccatcggccaggtgctcggcgacaagcagtagtcgcgcacgtcacctactccggcggggcgtcttcccctccctacgtcccgcatgcgaaacgggcggccgccaagcgcgcgccgcccgtttcgttgtctccgacatcaaggacaagagccgtcagctgccgcctcttctatccgcgcaccgcgtccgagggcacgatggtcatcgattggaagcgatcggccatgtaggcgtcgccgaactcgcgatcgtagaactgctggatgggcgtgtcgatgggatcgtgggacaggcgcatataccagcagtcaagggcctgcagggtcatgacggcgtccaccaacatgaagcaggcggccacagtggtaagcatatagcgccagttccacgggatgaaattcacgagccgcagcatgaacggcaacagcagctttatccacaccacgccgagcagcccccagcaggccatgaacggcaggcacgtgcggccgccgaacagtgatccgggcatgttggagtaatcccaggccaccgcgccgaacgcgtactgcatgaacaggctcacgaacgcctcgaaggcaccaccgatgaccgccgccaccagaaagatgacgagccaattgcttttgtggaagcggttgaggaagatggtcatgagcaccgcgccgcaaccgtagatgggcgagaacgggccgaacagcagccccgcgcggtcttgccattggcctggcaccacgaacagaaagtggacgatctcttccatgagcagccccagcacactggccacgacgaagatccagaacaggttgaagaagttcagcgtgatgtagcccttgcccgacgggtcgcggccgagcgtgccggcctccccttccgcgtgctcctcggcttcgcgagccttgcggtgagcgcggcgttcttcgagcagcgaggggtcaaggtagctttgcagcgccaccgtgaccgcgaaaccgacgccgtagggaataagctcgtagccaataccggccagcatgatggagcacaaagccccggccagaaggagcacgtacagcccgtaggagagcagcgccgcccagcgtcgctggttgcggatgaggcgcacgccgaacacaatgagcgtgacggcgagggccaccagcacagccagattcacgaaggtaaccacgatggtggagatgccctccccgcgcatagctccagcgtcgaacatggtcacagcctgatacatggtcttcgcgatgaccggcagcgcgacgcccgagccgataatgagcagcacgccgaacacgcgcagcaccaccggcagacgcttcttgtcggcggggctggtgaattcggcagcgatagtggccgcggtctcatcaagggcgtgctttttctcggctagagcctccttagcgtcatcgacaatgacgctcgggtgctccacggcacgcacgacatcgcgggcctcgtcggcggcgtgggcgagcttttcctcggccgcatgcacgatgcgctcggggtggcacgcgtcgtctaaggcctcgcggatctcttctttgtcgcgagcaacgtcggccaccagctcggcatgatcgttgtgcagctgatcgtgccattcacgatgagtttcagccacgtcggccttctcgaattccacggccttctcaaggtcgtcccgcagatcggcctcggccttgcgcgcggcctcttccagatgctctacatggcgtttttcgtctcccatggccggcctccttttccctgaacgcatgtctcggcatccagtgtaaaggggcgccccgtgaaaccatgaccaactgacgcaacgtctgccaacccgataagccctcgttatgcagcggttacgggaaacaagcggccggaggcctatccccagcaggcgatgaacatcgcaatgcccacgaacacgacggctagccccataacggccataatgtcgctcaacttgtgcacgtcagcctcctcgcgctcattctgctccgaccctctatctactagacgtttgagaagcccgttttgttgcacgccccacccaccttccacaaaagcagcacgaaccagagagcgcctcaaccgcgaaagagggctacaaagaaacgcgcaggacaagaacgtcgagcaggcgcctcgccaatctagcgcccgaggatcccgtcggtgtaggcgttgcgcgggtgcacttgggcggcatcgcgagcgttcgccagcttcagggcgataacgcgccacgggctgcaatcgagatacgcaacttccatggccgaaagatcggcattatcgacgccgtcctgctcggcgaagctgttacggtaaatgacgaaggcgtagcggattacgcgcgtctcacccggcatcagcgtgtcatacccgccggcaaggcccactatgaagtcatcgccaccaagaggatacagcgctgcttgagcatccaaaacggccgcgatcgcctcagcggcgctgctggcagcaaccgcactggcctcctttttcctaagtcgttactggcgcgaagccgccatgaagcgcgaagcagagcgtttgcaactggcgaaaagcggctacgctgactcacagctggccgacccggaggtgccgcaagagcctgatatcgaagccctctgcgccaagaccgcccgcacctacgacctcacccgccgcgaagaggatgtgctgcgcctcctcgttgaagggcgcacggcaccgcaaatcgccgaggagctcgtcgtctcgcccaacaccgtgaaaacccacgtgcgcaacctctatcgaaagctcggcatcaaccgccgcgccgacctcgcctgccgcctcgggagctaaaagcgatccttgctagaaatagcacgcgccgccgcagcttgcccttaatccccgtagggaataactcccgtgaagggataggcaccgtcggtggctatgaggaggtagttgtcggcgccgccgaactcgtcgtcggaggcgtcgatgacgtacacgttggcgaagtgaccgcgcaggcgctccacctgggagaagaggcggtacatggcgtcgccagtgtattccacgacacagttagccatgagtaggccgcccggcgtcaagtgcgcgcgggcgcaagcaatgccctcgtcgctggcgaagaacggcaccgcctcgcgcccgacgaaaacgtcgttgatgatggcatcgtaggggacgccgtccgaccgccgcaggaacgcctcgccgtcttccacgaagatgcgcagatcgtcggcgcggccctcggcggccagctgcatctccagacgatcaaggaagaaacgctcccgggcgatttgcaccacagccggatcgatttccaccacgtccagcgcaacgcccggatgctccaacagcagctgcttgggataggcgaacccagcgccgccgagcatgagcacgcggtttacgaccagcggatccggcgcctcgggaagcgccgcctcgaagaggtggtcgaaggatcgcaggtacgcaaaggggcacgtcgcccaacgctcgtccagataggtcgccgactgcagcaccccgcccacgttcaacatgcgcacaagcgacccgtcctccgccggcatcgcatacaccgccgcctccccgaaccgagaaggaaacacctcgcgcttccccgcgcgcccggcaaccctgtcccaccaatccgccagcaccatcgcccctttccgagcctgcaactgcgaccacggccgaaccttatcgcactctgtgccacagtatcgcacagaaaccgccgtgttagtttcagttgcttgcctgatcgggcggcaatcgctatggttgaaaggagaatgagatcatcggcgacaaggagggccttgtgctgggcgccgccctctttgccataccggagttctcgggttccatagcgatccaagaagcggcgatcaaccgtactatcatagaatatgagctcaacggccaggcaagccagttcgtcatcgacctagacgcctacgaccccacgacagccatcggctgcaccggctcccccgccatagccgccgcgccgacgagcgcccatttgagggcgcgcaccaagcgatcgagccgttgcgactcactggtaatgcgctcatcaagaagagaggtctcccacgcaagttcgttcggctccttctccgccatcgtactctcccccagcagttcagcggcgctcgctccgagggcgcgggccagggccacaagcgaatcggcgtcgggaaccgaggtgccacgctcccacttcgagacggtctggcgcaccacgtggatgcgctcggccaactcgtcctgactcaatccctgctcagtgcgcagcttcttgatggtgtccttcagcatggcgccagcccttctcggaaacgttctcaccgcttcaccgtaacaagaaagctccgcatgcgcaagcaacgatgcttaacaaaggatcgctgaactggtacttcatagaccggcgtgccggaggaaccatcctccggcacggagttcgccgcaagccaagaaagcaagctggttctacaaagccgcggtggcaatgcagccggcgaggacgaagacggcgacggcgagcagggcgacagcgcagagcgtggtgatcatgatggactcctttcgctcgggcgggacacgggctgggcgatgtgctcccaattgagcctttcggcggttccgcatcccccaatttcgatggttccatcatggcagcatccacttacgctgccgttgcgcgtatcttacggttttgccgtttaagcgccggccttggcgagaaagatgtcggggtcgagatcctcccatgaggcgatgaggaagtcggcgcgctcgaagagctggtcgcgggtgccggagatgtcgttgtcgtagatggcgccagtgcggtagccggccgcgcgcagggtgtccagggcgtaggcggcatcttcgaaagcccaggtgtgggcgcgatcagtgccgaggaagctgcgggcgtggtcgtaaacagccggttcgcgtttgctcgtctgcaggtcgtccacagacacgacggtcttcatgtagggggcgaacccacagcgttccacgcacgtggccagcatgtcggccggcgtggacgaggctaccgccatgggcacgccgcgctcgtgcagggcctgcacgaaggccagcgcgcccggacgagcctccacttcgttggcgtagaaggcgcgcatgcggtcgaagatcatctcgagcaccgcctcgttgctctcgccgagaccgcattgctcatgtaaataggcgctggcctcgggcagcgacatggtggtgatggcttcggcgtcggcctcggtcagcgtgatgccggcctcggccgccagcgtgcgatccacctcatgccacgctcccatggaatccaccagcgtcccatcgcaatcgaaaatgatgccgatcacttattcctccacgcggatgacggaaggcgtgtccagcaccacgttgtccagggccagggcctcttccagagcctcgcggatgtcgcgctcgcggcagcggtgggtgaccactacctggtcgacgcgctcggcgccggagcggccgcgctgcacgatggacttcaccgagatgttgtggcgcgcgaacacacctgccatggtttccagaacgcccggacggtcggtcaccgagaaacgcaggtaatagcgcatgaccagctcgtccatgggcaggatgggcaggtcgtcggtgcaggtgcagcccacaatgggagccacgccctgctgaatgtggcgcgcaacttccagcacgtcgcccatgacggcgctagccgcggcacccgcgccggcgccctcgccgaagaacatggtctcgcccacaaagtcgcccaccacgtaaatggcgttgaacacgccgttcacggtggccagctggtggttcgtcgggatcatggtgggatgcacgcgtacatcgaccccatcctcgcggcgatgggcgatggccagaagcttgatgacgtagcccatgtcgcgagcagcctcgatatccaccggcgagatgttcgtgatgccgtcggtgaacacgtcatccaaggtcacgcgcgagttgaaggcgatggaggccaagatggcgatcttagccgccgcatcgaaaccgcccacgtctgccgtggggtcggcctcggcgaagcccttctgctgcgcctcgtgcagagcgtcctcgtaggacaggccgttgtcggccatgcgggtgagcatgtagttggtggtgccgttcacaatgcccatgaccgaggtgatctcgttggcgatgagcgagtgcttcagcggatcgatgatgggaatgccgccgcccacggacgcctcgaaggccagctccttgccggcagcttcggcagcttccatgacctccttgccatgggtggccatgagcgccttgttggccgtgaccacgttcttgccggcggcgagcgcgcccgtcacgaccgtgcgggcgatggtggtgccgccgatgagctccaccacgatatcgatctcgggatcgttgatgatgttgttgaagttgtcggtgaacaggtggccgaccccgtgggcctcggcctcggccggcgacagcgagcacacgcgcgccagttcgatatccacgccgaagtggcgcaggaagtcgtccttgtgcttctggatgatgtcgatgcacccgccgcccacggtgccggtgcccaccaagccgattttcactgccatgttacgtcctctcccgagcgcgaaagttctctatgatcggacgattatacaagcaccgcgaaagaagtcgtgcatcagagcggggagagggcggtttcccagacctctgcgcgctccaccatcagcttctacgcgaagatctctttctcaaccaccagctcattcttgatatgccccacgagcttctgcagcgcgtcgatgcagttggggcggatgtcggcgccgatgagcacgtacatgagcgaatcgcccacctcgcagcgcccctcgttcagccaggtgcgcacatagtagacgccgggccacgtaagagcttcggcctcggcggccgccagcccttcggcatcgtaagagaactccacggccaccacctcgccgaggccttccacgccctcgcgcacctgggccttcggagtgatacgcaccacgccgttgtgggtgaggaacatgccgcactgggccgccgccggatcggccttggcctcgcgcagccactgatcaacggaaggttcagtcttcgccatctcgcgtcctttcgttcggagctttccaaagtagagcatttcgctcgacattatctgtcgccgagaatataccacaggagctggaacctcggccgcacgccgccattccctcccaattatcacacggaaggccgccgattttaagcgcttgaagcagagccttgttaccataggcgccagaccatgagagacctgcgctgcggcaacgcggcgctgcaacacgccgagaaaggacacggccatgagcttgcccgcctcagacctgacgaagaagcccgatatgcgcaccaccatggagctgggcgccgtgctgcccgagaccgccgaggtgcgcgacgaccacctgttcatcggcggcgtcgacatggtggagctggcccgcaaggagggcaccgcgctctacgtgttcgacgaggccgacctgcgccaccgcatggaggcctaccgcgaggccttccgcagccgctacgagaactccgacatcatttacgcgtcgaaggcgttcctgaacaaggaagtggtgcgcatcgccgaggccgaggggctgtgcctggatgtgtctggcggcggcgagctggcctgcgcccgctcggtagacttccccatggagcgcgtgttcgtccacggcaacaacaagacgccccgcgagctggaagaggccatctccgccggcgtggggcgcatcgtgcttgattcccgcatcgagctggcccgcgtgaacgagatcgccgggcgcctcggcgtggtgcaggacgtgtacatgcgcatcacccccggcgtggaggccgacacccacgagtacatccgcaccggttgcgaggactcgaagttcggcttcaccatgcgcgaggacttcgccttcaagtgcgtcggcgacgtgctggccgccgagaacgtgcgcctggtgggcctgcactgccacatcggctcgcagattttcgcgctgcactccttccgcgaggcggcggcggtcatggtggagttcatggcccgcatccgcgacacctacggccacgagatcaccgagctggacttgggcggcggcttgggcatcgcgtatttggccgagcatcagccctcttccatcgacgacttcgccgaggtcacctgctcggcggtgcgcgatttgtgcgcgctgcacaacctgccgttgccgcgccttctggtggagccgggccgctcgctggtggccccggccggcgtcacgctgtacaccgtgggcatcttgaagacgctgccgggcatccgcaagtacgtggccatcgacggcggcatgtccgacaatatccgcacggcgctctaccacgccgactacgagcccaccatcgccaacaaagccgggcaaccccgcgaggaaatcgtcacgctgtgcggcaagcactgcgagagcggcgacgccgtggtcatcgacatgcccctgcagaaggccgacctcggcgacatcgtgtgcgtgttcggcaccggcgcctacaacatgaccatggccagcaactacaacggacagccccgcccggccgtggtgttcgtgcgcgacggcgcatcgcgcgtggtcactcgccgcgagacctacgaggacctctaccagcgcgacctgtagggcaccggcttcttgtcggttttattgcggcgggttggcggaaccgtaataaggaacggttcacaccctggcaacgaaaccagcttgctaaggtgaaggcaatcgcggaaagcggcacccaccctcatgcccatttccgctcgtcccttgaggctctggggctcgtcgttggcgcgaggccttgcgccgcacgttcaggatcgaggccaagccctatgaatgccatttacctgcgcagcagcgtccgtcagtacaccgacgagccggtggacatccgagatatcgagaagctgatgcgtgccgccatggccgccccctccgccgtgaaccagcagccctgggaattctacatcgcgcgggacgagaccacgcgtctggctctggccgcttcaagcccctacggcacgccggccaaactcgccccctgcgtcattgtggcgtgccagcgcaccgagggcctgcgcgcgccgcaagacgcctcctacgacatgagcgcttccgtggagaacatcctcatcgaggccgccaacctgggcctgggcgccgtgtggctcggcatcgcgccggagaaggatcgcatggccgccgttgatgtagccctgggaagcccgggcggcgttacgcccttcgcgctcatcgccgtgggccatcccgagcacaaaccggagcccaaaggccccacgcgctacgacgagacgcgcgtgcactggatttagcatcactcggccttggccttacgctgggcatcgcgacgggcgctgttacgctcggcagtaacgtcgctgaaggcgcgggtgaggccgcgcagggcattcaacatgatcgtgcggtcctccgcaggcgctcccatcacgccgtcgcgcaaaatcgcccactcgcggccgccctcgaagagttgggaggcatcggtgatgccggcggccttcaaagcagcgaacagcgcgttcaccatggcctcgcgctcgctgctgtccagagaggcgagccagcgatccagcgcctcagcgcgacgctgcgtgcgctcgggaagctcggggagcgtggcaaaggccttcaacgctccgctcacgtttcgcgcagtctctgcatcccgcacctcgcccgtatcgcgcgcaccttccgcattgcttcgacccgcctcgccgtccgcgccttctacgacccaccggaacaccgaatgctgctcgaagccgcgcccggtggcctgcaccacctccacgggcatgaaggattccatgaggatgcccaccatggaatcggccggcacctgcttggtcatgcggcccgcaagcggctcgtagtcagccgccgcgaacaaaccggctttgaacccggggccatcgtggttgtacaggcgcgcgatgcggccttgcacctccggcaccgccgtgagcgccgcgtactcggccaggttgccgcccttggaatgtccacccaccaggagcgtctcgggaagacgcggatcggcggccactgccgccagatagcgggccgccagcacctgggcctcgaccggcgcccgataggccatgttgaagtcctcgcgccaccccgtgagcgtcgtatcggtgccgcgaaagcccacgtaagcgaagtgcccggggcacacgtaggtcgtggcggcgaactgcaagtcgcgcgcctcatcgaacgcagctgcgtgatcgtagatgagcagatcgcggaaacgcgggctggcagccatccagaacagctgctgcttcatctgcgccgcgtgcatgccggagaacatcgtagggaacagctcggcccgcataaggtcggcgaaccgcacgggatccagcggcgccgtcgcgtcctgggtcatttcggctcggtcccgcctcgccgccggagaaagctccgcgaccttctccatactcgccgctttcgtccccgcagtgccaagaccctgggggccgaccagcggatcgtcggctcgaacgtccgcgccctccttcgcggcccgcaggcctgcgcgttcacctgcacgttcgcccacacgcccccgcagacggccgagcagaccgcgcagctcgcccaaagccccatgacccgcacgcaccttcggggacgcagcctctcccgaaacctgcgcacggtacacctggggcatgatgccttcgccccgtgccatgcagaactgcgcgagcaacgccgaatccacggcattgaaaggcacttcatcgaaagtagccagctggatttgcagatatgtgagcacatcgttcatgactgcattatgggataccgccgcgccgcgcacggccgcctcccccaccagacacggagccgttgccaaagcagcctcgcgccaccatgacctttccacttatcttccgctacaatgacgctgcaatttcattcaaaacgctcgggagtccaatgcaaaagcatctggaatcctgcaccaggaaggttcccatgaccaccgacaccccctccgcttccccagtccgcacctcgggcaacaacgccgacgcccctacttcggtcgccgcgccccgcgagcacttcgccagccgcctcggcttcatcctcatctcggccggctgcgccatcggcctgggcaacgtgtggcgcttcccctacatcgccggcgagtacggcggcgcggccttcatcctgatgtatctcatcttcctcgtcattttgggtctgcccgtcatggtcgtggagttcgccgtcggccgcgcctcccagcgttcggccgcccaagccttcgacatcctgcagccctcgcggcgctggcactggttctcctggtgggcctacatcggttgcatgctgctcatgatgttctacaccacggtctgtggctggatgctcgcctacatggcgaaaatggccacgggcaccttcgacggccttgcccccgacggcgtcgccggcgtcttcggcaccatgctcgccaacccctccgagatggtaggctggatgctcgccgtcgtcgtcatcggcttcttcgtgtgcagcttgggcctgcaaaagggtgtcgagcgtatcacgaaagtgatgatgatcgccctgctcggcgtcatggcgctgctcgtggtgcgctccgtcacgctgcccggcgccgccgaaggtctggaattctacctggttcccgacttcggcaagatgttcgccggcggcctgtccggcttcggggacgccgtgtacgccgccatgggccaggcgttctttacgctgtcgctcggcatctcggccatggaggtcttcggcagccgtatcggcaagcagaactcgctcacgggcgaggccctgcgcatctgcggcctggacaccgccgtggccatcctcgcgggcctcatcatcttccccgcctgcttcgctttcgccgtcgcccccgaccagggcccctcgctcgtgttcgtcaccctgcccaacgtgttcaatcagatgcctttggggcagctgtggggcacgctgttcttcgtgttcatgagcttcgcggcgctctccaccatcatcgccgtcttcgagaacctcatcaccttcaccatggagaaatgggatctcgaccgcaagcgcgccttggcccgcaccgccgtgctcgtcaccgtgctgagcctgccctgtgccctgggtttcaacgtgcttgccggcatcactattctgggcatcggcgacattcaatccatcgaggacttcatcgtgtcgaacaacctgctgcccttgggcagtctgctgtacgtggtgttctgcgtgtcgcgcaaaggctggggctgggacaacttccttgccgaggccgatgcgggcacgggcatgaagttcccgcgctgggcccgcggctggctcaccttcgggctgctcgcgctcattatcatcatcttcatcatgggctacgtgcccaagatcatgatgtgggcgggtttggcgtagcagcttggcatagcggcgtgacgtagttcggggaattccctaagcatcgccgatttcacctcgacgttggcgaacccttccgctatactgcactggtgcccctgagcccgagtggtggaacggcagacacgacggtctcaaaaaccgttgccgaaaggtgtgcgggttcaaatcccgcctcgggcaccatcgaaaaccaacggccccgtcccacggggccgttttgcatgcttgagtcgaagacctactccgtcgggtgatagtagatgtacatatcctcgtagacgtcgtctttgttgcggaagccgccgggaatcatgccgatgcgcgcgaacccgaggctctcgtagagcgctcgggcccgttcgttgctggcaaccacggcgttgaactgcaggccgcggaagccgcatgcggccgcttggcgcagacagtcctccacgagcaggcgcccaatgccctcgccgcggctggcccccgccacagcgaagctcgcgttggcgacgtggccgcagcgcccgatattgttgggatgcagaatgtacagcccgcggatgcgcccacccaccgtagccacggccgtatgggactgctcggcaaagaaaatccgcgcctcttccaacgtcatcggctcggtctgcgggaaggcattgcccgcttctacgacctcgttccagatctccgccatcgccggcagatcgtcctcccggtaaggccgggtaaccttcaaggctaatggatccagtgtgctcatagtggctttctttccatggtattctcaagaagcgatctctgcagggagcaatttccgtaggggctgaccttggtcagccccccgcaagcggcacaatgccgcacgacaaaaaaggggcgaccgaggtcgcccctacggaatcgaacgcaaggttggcggacgctctgggcgcgaagccgccaacaagctccgaggccggactagatgtcggccagggtgaagtccttctcgccgttgaacacggccagggcgtcggcgacggcccagtcggccaaggtgatggcggagatggccttggtcaggcgcaccgcctcgtccagggagcgctgatgaatgttgcgacccgtggcgttaccgtcggcaccgcccacgtgaatctggtcatacagctgggtgaggaaggtctcggcatccacggtggagccacccgcgcacacgaggcccgtgcggccggcggcggtggaggccaccttcagggcctcggccggagtgcagccgtcctcgggcttcggcgggttcaccttcacgaagtcggcgccaaggcagagagccacgccggcggcaccggcgatgaggtcgggatccttctcggcagtcacggccttgccgcgagggtagatccacagcacgacgatgaggccgttggcatgggcctgggcgatgagctcgcccgcctcggccatcatggtggcctcgtactcggagccgaggtagatcgtgtagccgaggcccacgatgttcacgccggcctccttcatggccagcacggcgtccaaatcgtacagctgcggggagtagggatcctcctgcttggtgccgacgaggttggtcttggagttcatcttgatgaggtagttgatctccgggtagtcagccgcgtactgggccaccagcccgcgctggccggcgagcacgccgcacacgccctcggagccgatcttgaacagatgctccggatcgagatcggcgatgtcgatgccctcgccgtagaagtccttgttcaggtgctcgatcttctgatcgcaggcgaacagcatgagacggccggtctcgcgcgtggccttcaggtagttggtgatgtactcgtcacgggcctcgggcatgacgtcggcgggaacgcgcacctcttcccgggtgatcttcggcatgggtttcctcctagagagtcgttagagtcgttgcaataacgcgcctattgtacagaaacaaagcctgaccgcgccttctttcacaaagaaagtaggcgcagaacctctcgttgcgcccaagcgctggcacggaggcggcgcggcgcggattacttctcggagccgttcgactttttggtcacgcgtccgtatacgacaagcgccacgatggccacagcggcggtcacggcgaagatgatgaccgattccacgatattgcccgacacaagccccgctgccgcgtaggtggaaagcacgatgccgggaatgcgggcgaagttcgagatgagcacgaagttcttcatggacatgtgcgtgagcggcgtgatgtaggtgaacacgtccttgggcagccccggaatgaggaacaggatgaacacgatgacgttgaacttgtcggaggtctcccaatcgcggaacttgcccatgtacttctcgggcaccatggcctggacgaacggggcgcccaacttgtgcaccagcacgaagatgaacgagctcgagataatgcagccgagccagatgatgagcgcgcccacccaaggcccgtaaatcatgccggcggccacctggactacctcgccagggatgaaggccacgacgatctgaaggaactggatggccagcagaatgaggaagccccaggggccggcgttgcggatgtcggaggtgacgcggtcgacaccgccgggctcgaacagctcgtggatcatgggccagatgagcacgaccaccacgatcatgatgacgaagaacgcgatgagccccacgaacttgaagatgtccgccgcaggcatcggatgcccggcgaccgacttctcctcgtgggccttcgcctcgagcttctcaagccgttcggaatggtggtggttgttcgggtgcttttccatggcttccagtctaatgcagccgccccacgacgggggcggctttcaggaactctttaccttagtgacgaaatcgtaagccgcaggcccgcggcgcgcaggtcggcgcctcggcgcccaaaacgtcggcgcccagcgcccgcccacagcgcgcggcctagtcgtcttccttgcgagccttgtcgtactcctccttgaaggcggagaacatgccgctggcgcgcttgatctggcggcccgtggcgtaggcccccttgttcacagctttgcccgcagccttggtggcagtggacacggccggcttcacggcctccacggtctcgcgggcgcggtcggccaccacggccgtggcctcgccggctttcgcggccaggccaccctcgacggaaagctcggccacctcgtcggacacgaggatggcgcctaaaatcggctcctccccctcgtcctgcccgttcacggaaagcgccgtgccgattccacgcttgaagccgcggatgaggtgcccggggatctcgcgaacaccgagcagcgcgttggccgtggccccctgggtcaccgtgagcgagcgcacctcgccggtcttcgggtcgaaagacacgtcgcccaccgtgccgtacacggtgccgtcctcgcccatgacgggcagccccgcccacagcacgcagtcatcgtagttcacgcccatggccttgcaggcgcccttgcccgtagcctcgggggcctgagacaccacgatacggccgtccaccacgtcgtagccgttgtaggccacaaacacgtccttgcggcggaacatccacagcaagtcggggcgtttcacgatgaagccgacaaagcggcgctgggtggggtggaacacgcagtggcgcaccttcccgagccgctttaccgcctcaggtttcttcggcgtgctcttgtcgagaagcacgcgctttccaacgatctcgcccgtggtgccgtatcgcttggccatgatttacttctcgtccttcttgccctcggcagccttcgccacctcgccggcggcttccttcacctcggcggccgtctccttggcgccttcctccgccgtgacggcggcgtcctttgcggcttccttggccgtctcggcgacgtccttgacggtctcggcggcatcggcgtcggcgtcggcgttcttggccacctgatcggcaatgcgctgacgggcggcttcgatcttgtcgcgcagctcgtcgcccttctcgttgatcgtcggggagatgttgctagcggcctcctggatagtggcggccacatcggccccgcgagcggcggcctcagaggcgatctcctggccacgggccgtcacgttgttcacgacctcggcacccttggtggccgcttcctggtagatgtgctgggccccggcggcggcggaatcgccccactgctgggcgttgcccgcgaactcgccggctttgtcagccaccatggcgcgcgtctcagcgccagaacggggcgcggccagcagagctgcaacggcgccaacgacgccaccgatgaggaacattccaaatttgttggccataactgcctcctttatcgacagagtatcaggttcgcccattataggcggagagccccgcgcgggggctctcgctgctcattgctcaccttacggtaaacaagttgtaattcgtcatagatgaggaaatctctcagagaaaacctcagtccgtgcgtccctagaaacaggcaccgcgggcgtaggcctcgttcacgagcgtgtcgagcaccgcgggcagcgacaggccggccgcagcgcaggccatggggaacagggagcgctcggtcatgcccggggacacatctacctcgaagcagcgggccgcgccgccgtcccagatgaggtcgacgcgcccgagatcgcgcacgctgtaggcgcggtagacttccagcgccgcccgctcgatttccgcgcggatggcctgggcatcggccgcgttgggagaaagcgactcgtcgcgcacggggcagaagaattccacagcgtcgtcggccatacgggccgccgcgtcgtaaaagccctcgcgagccacaatctctaccggcggcagcgcgtgggcgtcccagccggtgccgaggatggacacggaaagctccacgccatcgacccactgctcgatgttcacggcctcgtcgtaggacagcgcatcgagcaccgcctcgcccaactcctcctggcttttcaccttgtgcacgcccagggcgcttccgccgtgggccggcttcacgcagaccggatacccgccgatcacacggtcggccaccatatcgagcgccgtggccgcacccatgcccttgaaagcatcgcgcgccaggtagacgccctggggccaggacgcgcagccctcctcgccggtcaggtcgcgatacttcgccagtgacgagtgcagggcgtccttgttccaagcgcgatggcagacgctcgccggcgagcccacgaacgggatgccgaggaactccagcaggctttggatggtgccgtcctcgccgtgcttgccgtgcagggcgttgtacaccacatcgggccgctcgctgcgcagcgtgggaaccagatcggcgttggtgtccaggggcaccaccttgtggccggcctcttccagcgcctcgcacaccaccttgccggaggccagcgatacctcgcgctcgaaggacttgcctcccatgagcactgcaactttcatacacgtctccttcgttgttggaactcctcgggggcggcctttattctgccgcggcttcctgcgcctcggtcaccttctcctcggcgatctcgatctgctcggcatcgccttcgcgggcctgcatgaccgcttcctcgttctgctcggaatcgacgatgacgtccttccaagaagtggcattctcgtccatggctgcatcctttctgtcgtagccgggcagcgcgccggcctcaatgaacacgcggtagagttcgaggcgctcctcgatcaccttcgccaggcgtcggatggcctcggtgatggattcgggcgtctcgaagctgaagttcacgcgcatggagttgcgcccggttttgccatcggggaagaacgaattccccggcacataggttacgcccgactccagcgcttcggcaagcatcgaatcggtatccatatagtccggcagcgtaatccagaggaacatgccgccggccggatgcgtccaggtggcctcgggcgggaagaactcgtcgagggccgccagcatagcgtcgcggcgctccttgtacagcgcgatgaacttctgcagcgtgcgctgccaggcgacatcggcaaagtagtgctgcacgaccagctggtcgaaggcgctgccgcacaaatcggcaccctgcttcaccaggttgatgcgggcgagcacggcctcgggcgcggcaatccagcccgtgcgcagccccggccccagcatcttcgaaatcgtgcccaggtaaatgaccgaatcgtccatggccttcaggggcacctggtggccgccgtcgtagcggagacggccgtaagggtcgtcttccaccaccatgaagttgtactcacgggccagctcgagcaggcggcgccggcgctcggccgtcatcgtgacgccgccggggttctggaaattcgggatggtgtagcagaacttcaggcgcgggttgtccttgccgatacgcttgagctcctcttccagaagatccatgcgcatgccgtcctcgtcgaaggggatcgcgcgcacatcgggctcgaaggcggagaaggcctgaagagctcccagataggtggggccctcggtaatgatgatgtcgtcggggtcgatgaaagcctcggcgatgagcgttagggcctgctgggcgcccgtggtgacgagcacctggtcggccttcacgcggatgcccagatcgcgcatcatgtcggcgagcacggcgcgcagcccggcgagcccgtcggtggggccgtactgcagcgataccgcgcgggcctcggggctttcaatggcggccagcgtggcgcggcgaatgtcctcctcgggcagaagcgacacagcgggcatgccgcccgacagcgagattacatcgtcgcgcgtagcagcggcgaacaggttgcgcacggccgacgggcgcatcttgcgcacgcgtcgggcgatcttgtcgccggtggtgtcgaaggtgatgtgagctgacgacatcttattcaaccgtcccttccagaagcgccaaggcgtccttcagggcgcccaatgcgatgaggtcatcggtaaagtttactgtaacacgggccaaaccgtcccgcttcgaaagccattccgtcgtacctacaaacgtggcatcggaggcgcaagcggggttcgcagcctgcaaatcgatgaccagatgctccagcgcgtgaggcagcgacgtgcgggcgagcacctcggcaaagggggcgtcctcgtcattcaagcaggtgtggaaggcgagggaggggcgcgcggcaagcagccgatcggcgccgcacgtgcccaaagaggcatccgcgccctcgggcacgcgcacgagcagggccatgcgatcgcgctcgaaggcaatgcgctcgacggcgagcctaggcacggtcgtcagctttgtccgaggtgtcgggggccgacgtggcatcggccttgccgggctctgcaccgccgtcgtcgttgccggatttcgagccatcaccggtgtcggccttggcgtcttcgccagccggggcctcgggcgtgtcagccgcctcgggaagcgacggcgtccccgtgggcgtgcgggaaagcagcgtgacgccccgggccgcctcctccggagccagcacgcgcccctgggcgccctcggccagcgcgcgcagcgtccaggcgatatcgtcgcccaaggtgtcggcgccggagaagtcgccgtccaccagggccagctggttgcgatcgagcgagaaccggtagcggccgccgcccttcaagttgccgaaggatagctcgaaggttttgtcctggtcgttcagcgcataacggtaggacacatcatcggtcagctggatgcgatcatcggtgatggtgatgggcgtagccgtgccggccaaataccaggtgcccgcgaaatcggccgcatcgtcctcggagaaccagtggagccacgcgaatccgcccgccgccgcaccgacaagcaaaacgacaacgacaactacggacaccaccgccacccgcaccggatggcggcgtttgcgagaaggcgcagtgttcgaacggcctcccctccccctccgcacttcgcggccgccatcgccttcaccggacgacgccgcgcgacgagacgacggcttctgcgccgtcgccgtggcggctgtcgtcgcagcggagcggagacgaccctcggcaggcggccggccgccggaaccggtcggcgcggccgccgccggcgactgctcttccatggctctttagacctcttccggcccgatcaccgtcttgccgcccatatagggaacgagcacctcgggcaccgtgatggtaccgtcgggattctggtagttctcgatgacggcggccatggtgcggcccacggccaggcccgacccgttcagggtgtacacgaagcggctgcccttgaagttggccgggtcgcggtacttgatgttggcgcgacgggcctggaaatcggtgcagcagctgcaggaggagatctccttgtaggcgccgtagctgggcagccacacttccacgtcgtaggtcttcgcggaggagaacccgatgtcgccggtgcacaggctgatgacgcgatagggcagcttcagctgctgcaggatgttctcggcgtcttccaccatggattccagctcgtcgaaaccggtctcgggtgtggcgaacttcaccatctccaccttggagaactggtgcacgcgaatgatgccgcgggtatcgcgaccggcgctgcccgcctcctcgcggaagcacggggtgaaggcgcagtagtgcagcggcaacgaatcggcgtcgagcacttccccggcgtgcagattcgtcagctgcacctcggccgtggggatgaggtagaggccctcggtggtgtggaagaggtcctcctcgaacttcggcaactggcccgtgcccgtgagcgtggcggcgttagcgagcgccggcacccaccactccttgtagccgcgggaggtgtgctgatccaacatgaaggcgatgagcgcgcgctcgagacgggcgccggcgccgccgagcacgtagaagcggctctcgaccagcttcacgccgcgctcgaaatcgatgatgttcagggccggccccaaatcccaatgggcctgcggttcgaagccctcggcggcgaaatcgcggggcgtgccccagcggcgcacctcgggattgtcgttctcgtcctcgcccaccggcgtggtgacgtccaccatgttcggaatggagagcatgagcgcgtccatggcggcctcggcctcggcgcgggcatcgcccagggcggtgagcttctcgttgatctggcggacggtctccttggtggcgttggcctcgtcggtcttgccctggcccatgagcgcgccgatctccttcgaaagcttgttgcgctcggcctgcagggcctcctcctcggcgatgacctcgcggcgctgcacatcaagggcggtgaactgctccgggtcgaaggaggcgtggcggttcttcatcgtctcggcaacctcgtcgaggtgctcgcgtacgtacttgatgtccaacatggggcggctcactttcacaatgatcggttgccttaggcgccggcagtccggcggttttcaatgcggcccagtatagcaccgcccgctgacgcgggcgggaagtcttcgggtgcggcgggcgcaggcgggcagaagtcaggctgagggttttcgcgcggccggggcgaagctattcgctttcgtcctcgtcgtcatcgaagagcgaccagtcgtcttcggtcttctcgtggttcttgaactgcttgcgcgtcttgcgctccagaatgaaacacacgatgatgctgatcacaagaccgccaccgaccagaatgccgatgccgggcatggtctcgaacagaaaatggtacagctcttcgatgttcataggtcgctatctcgccttcttcgcctacgccgctcgcgccgcggcaggtgggttcgtcattggtgctgtcagtatactatgacctgcagggaagtggcctacttctcttcttccacataccattcttcttcggcccagcgggcgcgatcggggatgctcatgaccgcggccaggatgccgagaacgccgggcaccagcgctccgagcagtgccgccggagcgggtagccacgagccgccgaaggaagcgagatgggccgccgcgcacgcaccgaacatgagcaccacggcagccaccaccgaaccggcgatgtcgaaggcacgggtgccgcgcacgcacaagaggctgtaaaggcccgcagcggcgatccagcttgcgcccacgacccaggtggccggctgcgacgccaccgccaggcaccctgccaccgggttgctcgagaagccgaggtgcatgaccgcgtcccagttcatgatgtcgaccgagccgcagccggccatgatgagggcgctcgcgaaggcgaaggccgccgtgatgaccgactgcagcatcggcagcagcacgccgcacgtcaccggcgaggccgccgcgaaacccacggagccgaacagcggctgcatgagcgccgagacggcctgggcggtgccacgccgccccacgaagtaccaccacgcgcccgtggccgcagtgagcagcaccgccggcacccaggcacccgcgccggcgagtcccaccacaaaggctccgtagccgaacaagacgccgatagaaggcctgatgacagccacgagagcgcagacggcaatcacgaccccgtaggcaatgggagcatcggtggcgagccccatagcagaacccggagtgaggtgcaggttcgccatgcccgccgccgccagcaaagccacggccgcagcggcaacgatgcgccccacgatggcggcaccgcgcaaccccagtcgatcgacgagcgggggcaagagctcccagacgcgctccggctcctcggcagccggctcttctatcttcccgttcacgatgtcggcgagcacccgcttgcccttcttggcgttacccagatagggcgaaagagcggccgagaaggcggccacatcctcgtagcgctcgtccatatcgggatcgagggcggcgaacatgacctcgtcggcctcggcgtccagctcgtcccagcacagcgacggcagcacgagctccgcctcttcgatggcctcctccgccgcgtccagatcatcggcgaaaaacgggttcgagcccgtgagcatctcgtaggtgaggctcgccagggcccactcgtcggtgcgcacatcgagcggctcctggcgcatctgctccaagggcatgtagccgatggtgccgccgcccgtggtgcccgatcccgtagcgtccatgagggcagccaggccgaaatcggccaccttggcctggcccttgccgttcacgatgacgttttccggcttgatatccagatgcagggtgtgctcgccgtgggccacctccagggcatgggagacggccgaaaacacggcggccaccacatccagcgtgatatcgtcgtccacctcatcgatgatttgcgcgagcgtcttgccctcgacgtattccatgatcacgtaggcgctgccgccttccacggcgcagtcgtacacggtgacgatattcgtatcagacagcttcgcgacagagcgagcctcttccaggccggggatgtgctcgaacagatccagctcgtcttcggcgtcggactcgggctcttcagcgatgacccgcgaggcgcgcacgccgcgcaaatggcgcacgtccaccgattcggcatcggcggtcgcgtcagtggcatcgggtgcctcttctaccacggtctggggttcgtagggcacctcgggggcgtggcgcgtcttgcggctcacccgacccgtgaggcgcgccggcccgcgccgccgaccggcaaagtcggtcgtggaggcgttccagggaatgagggagtcctcccactccccttcgccttccacgtcttcttcggcggcggcatcgtcccactcttcccagggcggcacctcctcggaggcgacacgccgtgaagcagccgccgtcgcggatcggcgccgacggcgctcgtcgcgggccgccaggaaatcggggtcggcggggaaggcatccgccgacgagctgccagcaggatcgcccgcagcggcgcccgaggctgcaccagtgcccgaggctgcaccggcgaccgagactgcgcccggacccgcattccggccagcgacccccgtctcggcgcccgatgcccccgcctctacctcttccaaatccgccgccatgcgcgcctccaaggcctcgaggcgagcagcggccagctcgtcttcggaaagctcgatgcacttgatggccacatcgcgcttgagatgcgtgtcgaaagcgtgcaccaccgtgccatagccgccagagccggcctggtcgatgacgcggtagcggtcgagtatgagcggggatcgtgccataggggcaaaacctctcttgggtacgtttcaggagtgttttcgaggtagcgcaattctaccattgcagcactctctgcgcgatggcggtttcgcagcaagcatctccccgtcagatgttcggctgccacgacagtgccaaagcgcccgcgcaaagcgcgcccgcaagggccgtcatgcaggggccgctatgcaaagatttctccatttttggtcacaaaatcgagttctgggtttttccacgcacccaaatcacccgatattgcccgaaactcaacgaaatactgaacaaatgcgcgcattggggatacccgccaacaccagagctatgattttctggcttacaaaacccagaactcgattttgtgaccaaatttcaagaattctttgtcgaaaggactcatcatgctgaccattggttgccatctctcgaagcgccgcggctatctggagatggccaaagaggcggcgtccatcaacgcgaacaccttccagtacttcacccgcagcccccgcggcagcgagcaggcggccctcgacgagaaggacgtcgccgcctacctcgccttcgcgaaggagcacggcatccacgacgcgctggcctacgccccctacgatgccgacccggctacagacaagatgaacgagcgtgacttcgtcctcatggtgtactcggaagatctcgcgcgcctggccgaagtggacggctcgctgtacctcatccgcccgggcagccgccttgacatcagcgtggaagaggggctggccgacgtggccgacgccctgaacaagatcatcacgccgtccatgaagacctgcgtgctgctggacaccatggccggcgagggcacccaggtgggcacgagcttcgagcagctggccgcgatcatcgccaaggtagaccatccggaacacgtgggcgtgtgcttcgactgcgccggcgtgtgggccgaaggctacgacatcgtaggcgacctcgacggcgtgctggaggagttcgaccgcaccatcggtctggacaagctgaaggccgtgcacttgaacgacgccacccatgagcgcggcagccacgtggatcgccacgcgcgcatcggcgagggaaagatcggcttcgacgcgctggcggccctcgtgaaccatccgaaattggccggcgtgccgttctatctggaggagcccgactcgacgctcgtcatttacgagcgcgacgtcgcgcggttccaggaagcctacaaggggtagaaagccccagcgcatcagccgtatcgcaagaaggcccgcgccgagagcatcctcggcgcgggccttttcaggctggaagggacattgcgcaacgggaaacccccgacgcgcgtggcggaaaggcccctagcgcgcgtggcgggcgcgggcgccggaaggcgcgccgtaagcgggctgcaccggggcgaagccctgggcctgggcgggaacgcccgcagcagggcgggcggctgcggcggggcgcgcaggagcggcggcgcgggccggcgccgctccgaaagagcgctgggccgcagcggcctcctgggctcggcgagcctggcgagcctccaactcggcggccgcgcgagcggcaaaggcgcgctccgcctcgcggcgagccttgcgcgacatcttgcgatcgggcaccacgatgggctgctgcaccgccggtgcgccctgcacccaggcgtccacctccgactgcgccggcatcggaatgctgctgggcgtccacccgctgccagccggggcggggcgcgacccacgtcctcggggcaccgcgcccgcaggggcgcccgcggaagccggcacggacccccgcgggggcacggccgcgccgcccgatgcccccatcggcaccggagctcccgcaccacgtgcggacatgggcgcaccagcaggagcggccggggcagcagcgacgggcgccggggcgggagcgggcgctgccgccctcccccggttcccgtagctgcgggccgcgttggcgcggcgcccgatgaccatctgcagttcggccaccttgcgacgctcggtttccaggccgtcggccatgccgcgcatacggcggtcgagagtcgtgatccacaagcaaagggcgagcacggccaccgccagcacaccgaggcctacagccaccaggccgaacggcgaagatagaaactcgaacacgggcgcgcccttccccagaagacgaatagttgatgactgggatgataaacgaccacgcccctattgtcgatacgaaaataggcgatttacctgctgggatcggtgccttctcaggaggtgaacacgagatcccccgctacgatccggtatggttgcgactctcctgcccgatcgagaagcagatggccctcctcatcgaggtcacgcacaacgcccctctgctccccttcgatatcgcgcaccgtcgcctcactgccaagtcctagggccaagtccagccaacgacgacggacaggagcgaacccttcgcgctcgaagatgtcccccatttcttccagtttatccagcaccgcacaagcacattgagcccgatccggaacatcttcccccagcatccgcaagctcgccgcaacgtctttcagggaaccctcgaactgctcttggagcaaattcagcccaattccgacgttgatccacgaaagcgtcccgtcctcggctacatccatttcggcgcgaataccgcagagctttcttcgaaacagcggaccttcctgagccaccagcacatcgttaggccatttgatgcctgccggatagccaaacgccacaaggctttcagcgacggcgacggcagcgccaagcgtgaaccagggtgcttgctcgggcaaaatgtggggtcgcacgagagccgtcatccaaagaccttcgccggaagccgacgaccaaatgcgatcataccgtccccgtccagcagtctgacgatcggccagcaccaccgtcagagacggcgctccagcttcggcaagacgacgcgcctcggtcatggtggagcccacttcgtcaaacccgtgaatttcccataggcactgctgtctaagaatggaaaccactttttcgatttcagccatagcgctaagaccttaccgacgagcgcacagcttgagcgcaagcaacagccgcaacaatcttgcagccatccaccagcacgaaaggcgcgcagccaacaaggaacgcagtgagcggatcaagccctgcaactaccataagctgcgcccatccgcatgcataggaaatagccacgaacactacacctgcaacgagctcgcaagcggcgcttcggataaaaaacagcgctcttcgcgccaacgagagtcgcgctcgctcggcagattcgattgatgaggagccgctcctttttgcaaggccaaagcgggagcgcaaagcgtgcaatagcggcgcggctacagccacaccgaaaaacgagccccacaaaaaacctcccgtaggccctgccaagatgcccaaaccaccccgcataccggagaacaccggcaaccccaccgcccccaaaatcaggtaaccggccatggcagcgatggcctcacgaggcttaagcaccgcaacggcaaaaacgatagcgaacatctgaagagtgaaggggacggggcccaaaggaaccgtcacccacgccgaaacagccatgatggcgatggtcaatcccacaaaagaaaccgatcgagcattcgacgtgctctttatagaggccattgctgtagccacaatcttctcccttcccgcgccgcgacggcgccaatcggtaatatgttaacggcgggacacccattcgggaaacgaaccctcttcccacagatagcaggcgatggaagccgatagcaaatcggcgcttcctccgggactcagccggtgggcgagacaaaaatcgcttagaacttgatagctcttgcgtccctgcatcgtaaaaaccgatcctcgctccagagtctgcgcagcgcgttgttgcacctcgccaaggagagcatcgtctcctctccagaggatcgtggtgtcctccactaccgtcatcaacgaaacaagagcatggcgcagcgcatcggaaaggcaggctcccttgtcgaaggcatcgcgcaatgctggcaaaccccgctgggccaccgacggaagcccagcctccatctcgccccggatccctgtcgctccgtaacgcgcatacaagcgctctcccgctgtcgccgaagcaacagctccctccagctctcgcgcaaccaaacccgctgtcgcctgccgcgtgaaagcgaatagctcatcgcagctcacccgaccgtgcaacgcgtacaggcgagctgcaaacgccgagagcattcccaaaacgaacaaaacgcccctttgggtattgacgccacccgtagcttccagaagccggcgctccgctggcacgccgcattctcgcacttcacggaacagctcgtcgggtttcccttcaaaagcgagccctgtttcgataaactccaaaaaataggggagaagggatgccgacccgcacatgaacgtgagaatgctcatatcgtcgtggcttccggtactgccatagcaaaccagccccggtttgttcgccgttgccacttcgagcaacaaaccgtttaccacaggctctgccaaaacccagcgcacgtcgtccaatttcttctcccccgtgcattttccaatgctgtttcttccgtcggcctaccgtctcatccctgccattggatgtccggtcgccgcgacgccctcacgttcgagccctgccacaggcacgagcggtcaggccctaaaagaacatcgtcagcgccaaatacagaatagacgggcacagcagacagcccgtacccgtgtagaaggtggccgtcatagcaccgtaaggaacaaggcgctcgtcagtagcggcaaggcccgcagccacgccagaagtcgttcccatcaaaccgccgaagatcatggcggacttcggattgttcaaacccaatggcttcgcaagcatcggcgtagcgatcatgaccacaatggacttcaaaacaccgatggcgatggaaattgccacgacctcggaggatgctcccacagccgcgcccgtaaccgggcccacaatgaaggtgacggcaccagcgccgatagtggccatatcagccgcactcgtatatccaaaggcgaacgcgaagatcgctccaataacgaaggcgaggatgacgccaatgaacagggcgagaataccgggaaggccggccttcttgatttcctccaaactcgcgccgaaggccgtcgagacaatggagaagtcgcggagcataccgccgcccatgaccgccagaccgctgaacatggcgatgtcagacaggcctttctcgccgcccgtgaccagaccgccgactaatgccaagatcaggccgaacacaatggcgatggccgagccggcaatacggcccttagtagctttgccaagcgcgttggccaaagccatgacggcgcccaccacgagaaacgacatgaccagtccgtttttggtcatgatgttggtgaccatttcaacaagttccacggcagccccctattccttattcagcggaggcagcggctcggaaggcgcgcccagcttcgagatgaccggaatgagcaaaagcggcacgatagtgcatacaatgccgcacataatggtgagaagaccaccacccatgatggccgcagcgacgtcctggcaggccgtcattgccaccacgatggggatgtacatagcgctccagaacatgatgccgtcctgagccttagtggaaagcttgttctccttgagaagcttgctcgaaaccaggatgagcgccagcatggcaaaacccacaccgccaacattggagccgacgccagtgatcataccgaggatgtcccccagcagcatgccgccgaagaagcatgccgagagcaaggctaatccgtagataaccatgaattaccccttacttttagcgagggggcatcagcaacatccccgctgatgcccccttcaatttctcaattactcgatgacaaacatcacagcgccggcatccacgcggtcgcccggagcaaacttaatctccttgaccacgccgtcacaagggcaagcgatgttctggttcatcttcatggcctccatgacgccgagcacgtccttggtagccacggtgtcgcccacagcgaccttgacctcgaccatcttgccgggcacgcgagacttaacatccatttctttctcctttgctacgagagctgatatctatgatccatggcccgcacctcatctttgcccatgaggcacacgccagtgaatccctttgcaagcacggtgtttccctcgtcgaaaagctccgcgagcttgatgcccgcaccatcgggaagctctagctccacatcgatggccacgccgctttcccgagacaaggcgcacaccgcgtcgtggaagcgctcgacagcgtcaagcgcccccaacttcaccacgagatccagatcggactcctcgtagcagtatggaagcccagtggccagggccagagccaccgagccgaacaccccgcagggcaggccggccgccgatgccagcgcccaagcctcgtccaacacgtcgaagaccggcagattcggaacggccgtgcatcgcgcatccgtaatcacctggtagggatcgcggatcagggacaccgaagagaagggcacgacggctcgcccccgcagacgaactcccttttgacgatagggcgaggcgaaccctaccgacaggcccggcgcatcgccttcctgccgggacacgatgccgggcaaagccacacctttcacctcgccgcgaagcaactgctccacagcgtcggagggccaccatgccgcatcgccgagaacttccaccgttatcgaccggcgtacggctggaactatggccaccagatcgtgacgatgaaagcaatcacgcatggctcaacgtcctttcatccagagcgggtcgctcttcgcagtggcttggtactgctcttgagcctccagcaggcagtcgaatagcttcgtcttctcctgatcgccgacgacagccaccgaccgcccgctcggccacgcctccacaagagccagctcgttggtctcggctgcaatgcgcacaccgggcgctgggcgcacgatgcgccctttgatgcgcaggatcgagcggcaggcccgctccagcgtcatctcagactgggctgtgcaggcacgcacaaccacttccagctccggcgttgtacgctgccgggcataggtgtgaatgggcccatcggcgttgagcacatgacccgctccccccatcgggaaactgtcacccgtaggcagccctcccgccaccaagatcgcccagccttcccgctcggcatcgggcaccaaggtaaggtcatcacgcaaaggcgctccgtccatgacgagccatccgaactcctggcatccatacaaatcgtgcacgccaatgccgcactcctcggccagaggcagaagctccatatccagtggcgtcccggcacacagcagatgcacgccttcggggatcgcctcccaaatacccagcttcttggcatcttccaaggcgacccgcagaaaactcgactcccccacaacaacccggggtttctcgcggcacagcgccacgagaaacgcatcccgggacgaatggggcaaaaatatcggctccaccgaggccccttcgaaggcgcctcgggagaacacgttgcccaaaggggcatagcacagcagcacgcgatcgccaggacaagccccggctcgccgcagagccctcgcacccgcagccgctcgctcgggcagctccggccatgtcacgcccacgatattctggaaagcggtgcttcccgtggtgaacgtcgtgtacgcgaagttcaaaggcgtatgaatctcctcgatgacatgagcgctcgtggggcccgccacatccttatcggccaaggtgcgacggggcatcgcgtcaagtgaaggagctgtagaaaactcctcagttagacgcgccaactcctcgagaacctgctgctgcgccgtacccactgtgaaccccctagaggtatttccctgccacggcggagaactcctcctccatgcggtcgataaccttgcggcgcatcatgcggccgccacgctcctcgccgagcgttccgtggcccataggcccggtggcatcgccgtcgccggccagcttagcggcctcgacctccccgatatggcggatcaccgtcgggcgcatgtcctcgacgttctcgatgagctcgtccacgccgcccaagtggtagaagaactgcgggccggccgcgaagaccggattctccttggacagttcctccaagcgctctatgtccatcttcgtgatgcgggagataggggtgatgggcatgacgtggatcatagtgccgaattcgggcgacagcgacaggatgtggtcggcctgcaagccgtggcagaggaaggcgccggagatggcgcggccgatgacaagcgcgatcacggaatgcccgcttttacgcgcctcggccaaggccagctggtaggagccggtggccttgttcatgccgaaaatctcctcgatcttgccggggccgttgccgggggtgtctacgataagcacgagcggacgcttctcccccaccggcttgtcggcatcctgcttgatggtggtgtaaaccaccttcgccatcttataggcctcctcaagaccgatgacaccgaaatagaccacggggaacttgtcgttgaacgcctgggcgtcattggcgatgaccacgacatcgcggccgtctatcgtcgcctctcccaccacagcgccggggcccacatcgtcgggaaacgtaacgtcgcccacctggttctcgcggaagctgcccgggtcgaccaccatatcaatggcatcgcggccgcgtccgatcattacctcaacagtcatagatggtgcctccttatcgacgcttcgccacggcgaggaactccgctgtggtcatttccggaatctgttcgacgtcctcgttgccgaagtaggcccacacgtcgcgagcatcctttggagccatctctaccgagagctccgccaaagccagctgctcgtccaccagctcctcgctgccgatgcgacggttcttcacgatctcctcgtagggctcgtccatgatggcggctaaggtttcgtggaaagcgcccagggtatcctccacaaggtagttcgcgtcgcgcatgatgtacttgtgcttgccgcccgtggtgcgatacaccaacgaccgatcggcagagtcgaactcgtccttgcccatctcctgctcgataacctccggaccggtcaggcccagacggcccaaatcgctcatgacgatgacatcggtggcagccgctacgaagcccatgccgccgaagcagcccaccttcgagccaatgagagaaatgacggggaacttgcccttcgtctcctgtatctgatccatcacctcggcgtgggccagaaggccggcgttggcctcatgcaggcgcacgccaccggtctcgaaggagatgaccaccgccggcagacgctctgccagctcgtcagggtactcctccttgatgcgctcgtacatctgacgggcgagcacgaaggcccccaccatcttggcaccgtgcacctcaccgacggccccgccaataaacttcccttcctgggagataacgaacactgggtgcttgccgataaggccgacgccagtcacgcagccgtcatcccattccaccgcctcgccgagtacgggcagatgggggctgctcatgcggtcggccggaccagccagctcggtaaacgtgccctcatctacgacaccatgcgcgcgctctcgcgcggacgcactgtagaagctcttctcctccaaggtcttccagtcgctcatttattccgcctccttcctcgcctcatcaatggcctgacgcaggcgcatggacaccacgaccggagtcgcgttgttgtcgttgatttcgatcgccacatcggatacgccgctctccttgacgaaacgctcgagcacgcgctcccatacctcgtcgaagccaaccaccggagtgcacaccttgacctgaacgtcgccggccaaattgcgctgctcaagcatgacctccatgtcgccggagcccgtcacgcctcggtgaaaccagcccacgggaagcgggcgcggatcgtcgggcgtgaacgtgaaattgagctctctcaatgccatcggataaacctccttgctgttttttggatcttctggcttgtcttaccaattgcggaacttcgccggcgggttgtacaaaccgcccgaccacttcacaagatccttcacggatttggccgctagcatgtcgcgggtagcgcggcgtacgtcgattcccaaatcagccggcgtcttaaagatgccgcgctcacgcagcgccgctgtctcagccggatcttcggccatgcccacttcggtgaaaccggccacggcacggatggcagccatgcggtcggccatggaagtgcacttgtgcaggtaggcaatgccctcttcagtgaccacgtgggtcagatcatcggagtagatcatcacaggaggaagatcgagaccggcgttttccgccagggccacggcgtccaacttgtccacgaaaccgggagccatcttctctcggaacgtctcctgaagttgcacgacgagccgcttgccgcggggaagatcgccaaccagctcgtcgtgcatgccgtactcctcgccgcacttcatccagcccggcgtggcgtggcgacggcccttggcatcgcagcccatgttcggggcgccgccaaaaccggcgatacgggtcgccgtggccgtcgaggaattgccgtacttgtctatctgcagcgtgccgccgatgaacatatccagggcgtaatggcccgccgtctgagcatagtcgcggttcgaacgcatggtgccgtcggggccgatgaagaacacatcggggcgcgcctgcacgtagtcggccatgcccgcctcgccgccgaagcaatacatggtcttcacccagcccgactcgatggccggaataagggtgggatgagggttggtcacgaagtaggagcagatcttgcccttgagccccagctcctcgccgtaggtgggcagaagcagctcaatggcagcggtgtcgaagccgatgccatgattcagccgctgaataccgtactcggcataaatgcccttgatgaccatcatggccctcagcacctgagagtcggtgataagcgccggatcgcgcgtgaacaaaggctcgatgtagaagggccgcggcgcctggatgacgaagtcgacccagtcgccaggaatatcgacacggggaacttcgtccacgatctcgttcacctgcacaaccacgacgccctgacgaaacttcacggcctcggcgatgaccggcgtatcctctgtgttgaatccggtgtaaatgttgccgtcacggtcggccgaaacacccacgcacagcgcgacgcgcggggtgaggtcgaggaagtagcggccatacaactccagatacgtatgaatagcacccagctcaatcttgccgtcgcgaacgtactcagccaagcgtcccgcctgagggcccgagaacgagaagtccaccttcttggcaatgcccttgtcgaaaatatccagatgggctggaatagagagcaccgactggaccatatgcaagtcgtgcaccttctcaatatccacttcgcaaaggcactgcgccaaaaagtcggcctgcttttggttatcgccctcgatgttcaccttgtccccaggacgaatcaccgcctccagaagctttaccgtatcaccggcctcgaccacctttccgtccatcacgtaaggacgggcagcctcgagacgctcgcggtaatcacgctcaagtgtgttccacgtcttcgattccgtcattgattctcctttcctaacgcctacttgtcttacttttcgatactgtccagatcgggcagatgcataacgcccaagccaacgcgttcgtggcaagagaacacatgcagcgaagactcgccgtaaaaggccacggccacccagccccggtttcgcacgatggcaatagtcatggccaggctcgccgatgacgccgtattcacgagcacaccgcgcttggcctcctccgtcgcgtgcataagagcatggatggagcgcgcctccttttccacgagccccgagttcagcgccgcaccgatgacggcgcgagcggccttcgtttggaagtcggtgtcgctcgtgccgccaacttcagtggccacagccacgatgccttcgcgaaggaactgacgcttgagcgcgtcctcctcggtcttcgactgggccatggccagctgcaaagcgcgccgacccaacccctgagggccgatacccttgatttgaagtcgttcgtagtcgatagaatccatacaaccacaccgccttcttacggcgccccttccgcccggagggggcgccgtcattcgaatggtccgttacaagaaacgcgcagaattagaggacgagtccgatagtggccacaaaaacgccagccgcaatggccgacacgatgacgccggagatattgcagcccatggcaatgggaataacgatggcgaaggggttctcctcttccaccgcatgctgagcgagcttggtggtggtgggcatgcaggagataccggcgatacccacggccggattgaaggatttgccggtcttcttgccgacgaagtacatgagccagccgccggcgatgccgcccacagccgagatggccagggccagaatgcccaggatgaggatgatgcccaccgtgggattcaagatggtgctcgcctcgcacaggcagccgagcacgaggcccaaaaacagagaggagaagctggtgatgccaccctcgagcaactcctgatagggcagaatctttgcctccttcacggccatgccgaggaagaacgacagcatgagcggagcggccacgggcaaaagcaggcagagcagcaggcagacaacgacgatgaagatgaacttcgccttctgggaaacctggggcatatcgaactcgatgtcgatgccgcgatacttcttgggcacgagggccttgatgatgtaggggtagcctgcgtaggtgagtgacaggtacaggtaagcaatgatggacaccgacacgaacagctccggcttcatcataagggtgccgaacagcaccataggaccgtcggcgccgccgatgatggccacggaggcggcactggcggggtcgaggccgaagaagtcaacgccaagagccagggtaacgaaggtacccatttcggcgaagatggcaatgatgatgcacgtccacgggcgggacagcaagaagctgatctcgctgcgagcgccaatgcccatgaacacaaggcaggcgatgaggttgttggagaacatgaagttgtagatcggctgcaggaaattcacctgaatggccgtcataaggctatcggtatcactgacgagcgggtcgatgatcaaggtaccggtggtatcgccggcgaggaacagcacgccgcagttcacggcgatcatgccgaggcccatggggaccatgatcagcggctcgagcttgcctttgaagccgaaatacgcgagcacaaaacctaagattgtcaagccgacgcggacgacacccaaaatggggtcttccacgaacaaggtggcaataccgggaaacacttgagctaaaacatccattttagttcgttttcctttcgggaatagaggagcgggcgtcgatgcgccccgggcaaatcagatactcgggttaatcggaatctttggatttgctgcggctcatcagcttgttgatgaccacgatgacagcgataaccaaaagcgagattgccgccgtcagcgcatacgtgagaagcgcgtacaagttgacatccatcctcgtctcacctccttaaggcaataaaaaagcagagcatccggctttcgctcaaatactctgcttctcataaccttatgatgcgacatccgaagatgctctgcatatttgagacctcgcttgactgtacttcgtcaacgcgaaatctaagttgttgatgtcatcatacggacttgacgatgaaacgtcaacaccaaatcttcaatttttttgactatgttttaagagcaggtcaatcggttgattcgcgagttgatccgtacaccttcactttttctcaaaactcagctggacgcgtgcggctgagttcgggatgcttcccccgacagcggcgccgaaggggcgccgcgcgagcggaaggagattccgatgtcccagagaaggcagaggccctacaggaggctcgaccgcgccgagagggccgcgatagagcgggggctggacaagaaccggccggcccgcgcgatggcgcgcgacctggggaggtcccagtcgagcgtcgccgacgaggtcaggcgcaaccgcaccgtcacgcgcgggccgggcaaggggtcgagggtcgagtcggtgcccgagggcgcctgcgccaggctccgcggctggccgcacgtctgcaacggctgcaacaggcgccgctaccactgctcgatgccgttccgctgcgagtactccgcggcccgcgcccagctgctggccgacggcgagctgtccgccgccaggcgcggggtggaccgcacggaggaggagttcgagtccatcgccgccaagatcagggccgacctggcccgcggcctgtcgccggcgcagatagccgacgcccgctcgtccgagttcagggccgccccctccaccatctaccgctggatagagcggggctacgccggcatgtccaacatggacctgcgccgcaaggtggggtacgggccgaggaggagggcggcgcccgcgccgacgccgcacggcccggagcgctccttctcggcgttctcggcgctcccggagggcgagcgcgaggccgcctgcgagatggacacggtgatcgggcgcgccgccgaccggcagtgcgtcctcacgctctacctgcgctgctgccgcgcgcagctgtgcctgcttttgcccgagaggtcgtcgagcgcggtggcggccgcgctcgacgtgctggaggc

SEQ ID NO: 10564 - DNA, 733 bp, Unknown
  gut microbiota DNA sequence
cacgggcttgcagaaaggacgtttcatggttgatcgcaaggcattccgctccctgtcttcggggctctacctcatcacggccaaggcgggcgatgcgcgctgcggctgcgtggtgaacacgctcgtgcaggtggcgagcgagccggccacgttgtcggtgtcgctgaacaaagagaacgccaccaccgtcgccatcctggagtcgggccgcttcgctgccacggtgctcgccgaggacacccccatggagctcatcggcaccttcggcttccacacctctgccgacactgacaagttcgccgcctgcgcgagcgcggtcgacggcgcggaggtgccctacgtgaccgagcacggcctggcgcgcttctccgtctccgttaccgagaccatcgacgtgggcagccactacctgttcgtgggcgtcgtggaagaggccgagatgctcgccgccggcgacccgctcacctacgcctactaccacgccgtgaagggcggcaagaccccgcccaaggccgccacctacaacaacggcgacgaggcggcggtccccggggtcaccgagacggctgccggcgcgcccgagtccggcaagaagatcgcctggcgctgcaccatttgcggctacatcgaggaaggctacccggacggcctgcccgagggctacatgtgccccatctgcggcgctcctcgcgagatgttcgagcgcgtggaactatagcgatcccgcaagccc

SEQ ID NO: 10565 - DNA, 1450 bp, Unknown
  gut microbiota DNA sequence
ttgctcagcaaggttgcttttcgccgcagtaatcttccagcgaccagcccatgcggaacagacgagcttgctgattcgcgaattccttgctttgagggcggaatctcttgcgccgccgtcgatagcactgctcggcgatgcgccgcatctcgcccgaattgccgatctgccccgccgtcaccgtgatgaccttgtagccgtccgcctccagcgccagacgcttctgggcatccgccgatgaggggccggccctctaccgcaggccgtccctctagtgcaaaaacatggcgtcgccgaaggagaggaggcggtagcgctcgtcgatggcgtgctggtaggcggccaggatgttctcgcgggtgctgaaggcggagacgagcatcatgagcgtggagcgcggcacgtggaagttggtgatgagggcatccaccgcgtggaactcgtaacccggcaggatatagaggctcgtggcctcgcggtcgcgggcgacaagagcaccccggccgccgtcagcctcgggatcccaggcgctttccaggctgcggacgctcgtcgtgcccacggcgacaacgcggccgcccgcggcatgggtcgcgttcacggcatccaccgtggaggggggcaccgtgtagaactccgtgtggatgtggtgcttctccggatcgtcctcgtccactacgcggaaggtgtccaggcccacttccagctctaccgtggcccagccgatgccgcggtcgcgcaagcgctcgatgagctcgggcgtgaagtgcagcccggccgtgggcgcggccgccgagctttcccggcgcgagtacaccgtctggtacagctcctcgtcgccggcgtagtcgcggatatagggcggcaagggcgtgcgtcccacggcatgtagagcctcgtcaagcgacagcaagggcgtggaaagccgcgccacgcgctcgccgcgctgcccgtcgcgggcccagtcgatgatctcggcggaaagcaccacgtccccggcggcgttggtgaaatccaccacggccccagcgcccggcttcaggcgcttgcccggccgcacgagcacctcccagaaggccacgcggttcgtccgcggctcggggcctccgcactcgcgcagcagaaacacctcggccgcgccgcccgtgcccctcttggcaccgagcaggcgcgccggcatgacccgcgtctcgttggccacgagcaaatcccccggccgcaagtagtcgatgatgtccttgaagatgcgatcttccacttccccgctagcacgatccatcacgagcagccgacactcgtcgcgcacggccgccggctcctgagcaatcagctcttcgggcaagttgtagtcgaaatcatcggttctcatgaaaagcgctccttagaatgcatgcaggcgctatactaccatgacccaactcaacccgcgtcgtccgggtgccgagggggt

SEQ ID NO: 10566 - DNA, 6673 bp, Unknown
  gut microbiota DNA sequence
ttcggactatactagcgaactcgttagtccgaaatcagaccaatcgcattttgaggtacagaaagcccatgaacgccgacaagatcgcgctcaacgaaaacaccgcgctcgacgagaaaagccaaatcgtggagacaatccgcgccatcgatgatttctatcgccaggctgacgagctgtatcgtcaaaccgcgtggcgcatgggactccctgattgcgccttcgatatcgtgtacgcgctcgtcaacgaagatgggctcacgcagaagcagttgtgcgagctcggattctcttcgaagcaaacggtgcactcgtctatcaagcgcatggtcgacaaaggcgtagtcgagctgcgaggagacacgccccgcactcaacgcgtttatctgactggttacgggagaaagcagtacgaagcccacattcaagccgtactggccgccgagcatgaagccgtcgcgatcttcaccgatgaagagcagcgccaacttaccagcgccatgaagcgctacatcaacgcgctgaacgaaaacctctcggctctcaccttccactagagacgcccgctttccttgcttgttctgccctcttttctccgaaaggtttccccatgtcagtcgatatgtccaaacatttctccaccagcgccctcatacggttcacgctgcccaccatcgccatgatgatcttcacctcgtgctacaccatcgtggacgggttcttcgtgtcgaactacgcggggaaaacggcgctggcagccgtgaacctgatcttccccgccgtgatgatactggcctcggtgggcatgatgatcggcaccggcggcagcgcgcttgtggccaagaccttgggcgagggcgaccggccccgggcgcggcgccatttctcgttgctcatcatcttcgccttcgtcgtgggctcggtgctttcccttggcggctggttcttcatggagcccacggccaccatgctcggcgccacgccgggaagccagatgcaccatgacgccgcgctttacggccgcatgatgatgatctcgctgccgttcttcatcctgcagtacgccttccagagcttcttcgtcacggcgggcaagcccaagtacggctttctggtcatcgtggcggccggcgtggcgaacatccttttggacttcctgttcgtcggcgtgttcggctgggggcttcccggcgcggcgctcgccacgaacatcggcgagctcatcggcggcggcattccgctcgtctacttcgcccgcaagcgctcgacgcacctgtacttcgtgcggccgcatctgcgctggcccgtcatcgggcacgcttgcgccaacggctcgtcggagatggtcaccaacatcgccatgagcctcgtgggcatcctgtacaactggcagcttctgcgcttcatcggcgaggacggcgtggcggcctacggcgtcatcatgtacaccgtgatgatcttctcggccgtgttcatgggctactccgtgggcacctcaccgctcatgagcttccagtacggcgcccagaaccacaccgagatgcgctcgcttctatggaagagcctcgggatcatcggcgtggcgagcatcgtcatgttcctgctcggccagtggctcgccgcaccgctttcggccatcttcgtcagctacgacgcggccctgctggagctcaccgtgagcgcctacaagctgtacgccctgtgctttctgttcatgggattcgccatgtacgcctcggcattcttcacggcgctcaacaacgggctcgtctcggcgctcatctcgtttctgcgcacgctcgtgttccaggtggcggccgtcatcgtgctgccgatgctgttcggcatcgacggcatctggctctcggtcacggtgggcgacgggctcacctgcctggtggccgccacgttcatgatcgcgctttcgggccgctacggctaccgcaagcgcggcctgagcccgaaggcgaaagcgaaggcagaaaacggggactaggccacgttttctgcatcgtagtcaacttatctgcatcatttcggcaccccttgatgcagaaaccaagtttactcgggcgggtgagggacacagcgtaccctcacccgccttgcttgatgtcgcagcacctcctacacggcgtcgacgcgcagggcctctacgacgttgtcggcgcggcagcggtgcatgccgtaggccaccgatgcgcccacggcgaccacggtcatggcggcggccagggccacgtagctccagggcagcgtgaagggcagccccgtcatcgatccggagatcacctgccacagcaggaaggacacgaaaagcgacagcagcacgccgggcacgaggccgcggacgcaccaggcgacgcattcctcggccaccatggcgcggaactgccggttcgagagtcccaccgacttcatgacggcgaactcgcggcggcgcaggatgaggctgttggtcaccgtgttgaacacgttggccatggcgatgagcgccagaatcaccgcgaacagcaggcagaacacgttcaccaccgtggcgatcatctggttggagtcgcgctgttcgatgtagtcgttgaaggagtagaacgccagcccgtagggactcttgtcgtggaagtacgcgctgccggccgtcgccagctcctcggcgagcgcgccgtggtcgccatcggcggagtcgaagtagccgtagaagatgggggcgtcattgccgaaaccctggtaagccgccatggactcgggcacgatgagctgcaggccctccccacgggcactggcgatggcaggcgcctcctcggccagggcaacaacctcgacggagaccgtctgcacctccgcctcctccagagggaaccattcgaccccgtcgtcatcgccttcaaggtagggctggaaggcgaaggcctcagcattgccctctccggatgttgcgccgacgccgatgcccgccgccggctcgccgtgataggtcaccgccgtaagggcctccaaagtgcccggctctcgcagcacgttgagcaactggtagacgctgccattgttgccgtagccctgggccagggcgatggcccgcaggtgagccggatcgcgaaagtcggcggggtcaagccccaagctcttcgtgtagtcgtcgaaggcggcgtcgtcgaggtaggctaccgaccccacggtgccgacgcggccgtcggccatcttgccgcccatgccgttctcctgatcgacgagggcctcccctgccatggcctcgggcagcatggcgtacagccccgtccccattttccaacccacaggctgggcgcctgccacctgggagaggtcttggaaggcgccggcgaacaccttggcctgcgaggcgaacagctcgttgttcgcggccgccaccgcctccggcgtcgtgggagcggcgggctgggtcgcagcggcgtcgggagtcgcagcgccctcagcgcccgtcgcgctgccatcactgacttgcgcgttcccgtcgaccgtacccgcgtcctgcggcgtctccgcatcgagctgggccatgacgcccacctcgccggccatctcgccgccgccggtcaccacgtcggtcagggtgccgaggaacacattcagcgagccggcggtcatgagcagcacgatggccagcgccagcgacaccgaggccgcccggcccttccccgtgccgcgcttgcggttgatgcgcgccagcatgccgccgacgccgagcacgcacccggccgccccgcgcgccttccacagcgacgaggcccccgtgcacttcgcggcccgcgccgccccacgcttggaaacgcggctgccgctggcggcccgcagcgagtcgatgatgttcgtacggctcgcccgctttgccggaatccacacggacacgagcaccgtgacgaacgtgagcaccgaggccgccgccaacacccagccgttcacggccacgcggaaagccacttcccccgagccggccagctgggagatggccggcccaagcgccgcgaaagtggcagcgcacccggcaagaccgatgagaagcccacaggggatgccgatgacggccacgatggccccttccagcaccacggcccggcgcagctgccggcgcgaggcgcccaccgaggacagaagcccaaactgcttgatgcgctcggccaccgagatgttgaaggcgttgaagatgagcgaaacgcacgccacgacgatgaccgccgccagcaccacgaccaggccgtagaacgtcgcccaaatggaggagtcgctggaaacgcccatgtagcgcagcatggccgtgtggagcaccacatgctcgtcggggaacagcgcctctgcggcttcttccacctgctgggtgttggccacgtcgttcaacgtgaagaacacgtcggtaaaggcgtcgggcgcggcgcccccggcggtcacgcccaccatgcctgccgccgtggaaagggcgtagcccggacgatcgtaaaagcccaccacggtataggtgctctcctcggtgttcgtgatatcctcgttgaagatgccgccgtcgatgtccgcctccagcacgcccatggaggagttgagcggtgtgccgtcggtgatctcgctctcgtgggcctccccctgcacgccccacgaggcggtcatggtgcccgcggacatggatccctcctcgcccggggcgagtcgggccacccgctggcccacgtcgaaggtgaccgtatcgccgaggttcaccccgccgtagtcgttccacgtggagaagagcatgatctcgtggtcgttctcgggcaggcgtccctcgctgggcgcgatgccgcagatgtcgcccacatcgccttcgatggagcgaatggccaggtaggttccctgggtattctgctgatcggcggtcaacttggcgaagcctacatcgcgcataatcgccgtgccggccacctgcgggtcggcttgagcgtcggcgatcttctcgtcaagcgccgagctgccatcggcttccacgcaggccatccacgtgccggccaggtgcgcctcggaacgatagagatagtcgttcagcgacacataggtggtgagcaccgccgtgagcagggcggcggccaaggccacgccggcgatggtcacgagcgtgcgcaccttgttggcgcgcaggctctttacggtgaagttcgtcgtggcgttcatcggcggatcctctcgtcgcgcacgatgcggccgtcctccacggcgatgatgcgatcggcggccagcgcgatctcctcgtcgtgggtgatgacgatcatggtctggccgaactcgcggttggaatcgcgcagaagctgcatgatctcgcagctgttgcgggtgtccagattgcccgtgggctcgtcggccagcactaccgccggcgcgttcatgagggcgcgaccgatggccacgcgctgctgctggccgccggagagctggctgggcagatgcccctcgcggccggcgagtcccaacctttgcacgaggccttgcaggcggcccgcgttcaccgtgcggccgtccaaggccacgggcagcgtcatgttctccaccacgttcagcaccggcaccaggttgtagaactggtacaccagccccacctcgcggcggcggaacaccgccagctcctcgtcggagcgcgcgtacacgtcggcgccgttcaacagcacgtgcccggaggtgggccggtccacgccgccgatgaggtgcagcagggtggacttgcccgagcccgacgatcccacgatggccacgaactcgccctcttccacgctgaaggacacgtcatccaacgcgcgcgtggccgcctcgccctctccgtagatcttcgtcaagtggctgatcgtcaaaatatccatgccagatgcctttcttctcctggtttcccaatctacggaacaagtatggcggccgccccttgccgccctataacgcgcccattacgatagcgtaagaataggcgcagggcgcaacgcaacccgaaaaagaccctcaggatgtctgagggtcttcttgggagggcaagattgcggacgaactaggcgacaaggccgtcgatgtgagacatcatctccttcgcgcccagcacaccagagctcatgcttaggccacaagctgcgcccttgatgtcatagtaaggccggcagaaagcgctacccatattcactccgccaatataaagaccgggaatgggttctccgtcttcattgagagctacaaggtgatcgttggtgcgaatgccgcccagagtcgtccaatacgcagagttgtactcaaacaggtagtagccgcaatcctccttgatgggagtaagaaacatggggtctttgccgaattcggtatcatcgccggcaacacacagcttattgtattcctcaaccgttttctccaagtttgcaagaccaaacacttcggccacctcagcaatgctatcgcccttgcatgcccaaccttgggaaacggcctgttcgaattgcccaggggcgttggaaagcaccggatagaacatctcacgaccaaagtcccaatcgggttcgcccagatactgatatacgcctatttgcgtgcaagcatcgtagtattctccgtcaaccaagacatagtaacgaccctgagccaggccagcctgcccgctgtataccagcggatcgacggccagaagctcctcgttcataaaacg

SEQ ID NO: 10567 - DNA, 3508 bp, Unknown
  gut microbiota DNA sequence
ttacagctagaaagcaagaagaggagactatgaagaaatacgtcatcgcgctggatcagggcaccacctcttcccgcgccatgctcatcgaccgcgccggccgccccgtcgcctcggttcagcgcccgttcccgcagatctacccgcagcccggttgggtggagcacgacccgcaagacatcctctcctcgcagctgggtgcgctcaccgagctcattatgtccgcgaacgtggacaccgccgagatcgattccatcggcattaccaaccagcgcgagaccaccatcgtgtgggatcgcgccaccggcgaacccatcatgaacgccatcgtctggcagtgccgccgcacggcgcccatggtggaggccatcgcgagcgacccggctaccgcggccgagatcaccgcacgcacggggctcgtgcccgacgcctatttctccgccagcaagctcgcctggatcttgggtgaggtgcccggcgcccgcgcccgcgccgaggcgggggagctctgcttcggcaccgtggacagctggctcatttggaagctcaccgacggggccgtgcacgccacggacgtgaccaatgcgagccggaccatgctctacaacatccacgagaggcgctgggatcccttcctgcttaagctcttcggcattcccgaggccattcttcccgaggtgcgcccctcttccggcaacttcggcgtgacggcgaaccccgggctcgtccagggcatccccatatgcggtgtggcgggcgaccagcaggcggcgctcttcggccagtgctgcttccatgcgggccaggcaaagaacacctacggcaccggctgctttctgctcatgcacaccgggcacgaggcctgcgcgagcgagcacgggctcgtgaccacggtggcggcctcggcccccaacgcgggggacaccgagtacgcgctcgagggcagtgtgttcatggccggcgccctcatccagtggctccgcgacgagctcggcatcatcgacagcgtcgccgaaaccgacgccatcgctcgcagtgttgccacgaccgacggcgtcttcgtcgtgcccgcgttcacgggcctgggcgccccctggtgggatgccgacgcccgcggcgctattctcggcctcacccgcggcgccggacgcgcccacatcgtgcgggcggctctggagtcgatcgcctaccaggtgtgcgacttggcccgcgccatggccgaggacgcgcacatgccgctttcggtgctgaacgtcgacgggggagcggcggccaacgacttcctcatgcagttccaagccgacatgctcggcgcgcccctgcgtcgccctgacaacgccgagaccactgctctcggcgccgcctacctggccggtctttccacgggcttctggaaaagcaccgaggagctggcggccctgcgcgagggcgaagaccgcttcctgcccaccttcgacgagcccatgcgcgccgcccgcctcgccgcctggcacgaggccgtctcccgcgtccgcagctaggacttcgcccgtctctcccgatttggtgcggaaagcgtgagcgagggggcgcgacggcggtcgagcgcctacaataggcctcaaggcattcgcgacggaaaggaagtggcccatgcgcgtgagcatcggaagcgaccacgccggcttcgagcagaagcaggccctggtggattatctggtggggaaggggtacgatgtcatcgaccgcggccccgacaacgatgatcgcgtcgattaccccgactacgcggcccccgtggcccacgatgtggccgatggcaccgccgagcgcggtgtgctcgtgtgcggcacgggcatcggcatggccatggccgccgacaaggtgcccggcgtgcgtgccgccaacatcatcaactccgagttcgccgccttgtgccgcgagcacaacgatgcgaacgtcattaccctttccggccgcttcgtgccgctcgaggagaacgagcgcatcctcgacaccttcttcaccaccgacttcggcggcggccgccacgccggccgcgtcgaaaagatcatggctctcgactagcaaaggagacaatagatggctttggaatttctcgccgctgaagatccgcaggtgaccgactgcctgcgccaggaactcgcccgccagcgggggagtgtggagctcatcgcgtcggagaacttcacctcccgcgccgtcatggaggccgtgggcagcgtgctcaccaacaagtacgccgaagggtaccccggcaagcgctactacggcggctgcgagaaggtcgacatggtggaggaccttgcccgcgaccgcgcctgcgagctgtacggcgcgaagtacgccaacgtgcagccccattccggtgccagcgcgaacttcggcgcgtatctttccatcatcgagcccggcgacacggtgctcggcatgagcctcgaccatggcggccatctcacccacggcagccccgtgaacttctccggccttctgtacaacatcgtctcctacggcgtgaaccccgagaccgagaccatcgactacgacgagctcgagcgcattgcgaaggagtgccgcccgaaggtcatcgtcgggggcgcctcggcctacccgcgcttcatcgacttcgagcgcatggcggaaatcgcccatgaggtgggcgcctacctcatggtggacatggcccacattgccggcctcgtggccgcggggctgcacccgagtccggtgccccacgccgacatcgtcacctccacgagccacaagaccctgcgcggcccgcgcggcggcttcattctcacgaactcggatgagctgggtccgaagatcaacaaggccatcttccccggtgctcagggcggccctctcatgcacgtcatcgccggcaaggccgtggccttcggcgaggcgctgcgtcccgattaccgtgtttatatggagcatgtggtggagaactgccgcaccctcggccagggcatgaccgacggcggcctgcgcctcgtctccggtggcacggacaaccacctgtgcctcgttgacctcacggcctccgacatcaccggcaaggacgccgagaagctcttggaatccgtgggccttacggtgaacaagaactccatccccaacgagcagcgctcgcccttcgtgacgagcggcatccgcgtgggctccgcggccgccaccacccgaggatttaccgccgaggacttctacgagatcggccagctcatcgcgaccacggtgttcaacgccaccgacgacgccaaactcgccgacgtgcgtcgtcgcgtggacgccctgctggaagcccatcccctgtatccgggcttggagtattaaaagaggttttgggtttggctgagcaggctgcgaggcgggcgggggcgcccgcgcgcaggttgcgcagcgaacaggcgacacggatgttgctgcgatagcagttgggtaggtgcgggggcggacggggcctccgcgcgcaggttgcgcagcgactggaacagtccagtgg

SEQ ID NO: 10568 - DNA, 5725 bp, Unknown
  gut microbiota DNA sequence
tatttgcgggggtgccctcttggttccttatcgtgtatcttaaggatcgagaaaaaagcgcccgggcggggcgccgggtgctgggaggaatcatggccttcgtggaatttgccgacgtgagcaagatctaccagatgggcgaggtggaagtggctgccgtgcgcgacatgagcttcactatcgagcggggcgagttcgtggtcatcgtggggccctccggcgccggcaagacgacgcttttgaacatgctcggcggcatggactcggccacctccggcaccatcacgctggacggcgcgcgcgtcagctccttcaaccgcaagcagctcacccagtaccgccgccacgacatcggcttcgtcttccagttctacaacctggtgcagaacctgacggcccgcgagaacgtggagctggcgagccagatctgccgcgacccccttgatgccgacgaggtgctggcggccgtgggcctggccgaccgggtgcgcaacttccccggacagctgtccggtggcgagcagcagcgcgtcgccatcgcccgcgccctggcgaagaaccccaagctccttttgtgcgacgagcccaccggtgctctggactacgagacgggcaaggccatcctgaagcttctgcaggacacctgccgcgatacggggcgcacggtcgtggtcgtcacccacaacagcgcgttcaccgctatcgccgaccgcgtcatccacgtgcgcgagggctccgtggccgccgtggagctgaacgaggcgcccctgtccgccgacgtgctggagtggtagcgtgaaggcgttcaacaaagatattgtccgctccatccgccactcgctcgggcgctttgtcgccattgccgccatcgtggcactgggctgcggcttctacgccgggctgcgcatgacggcgccggatatgaagctggcggccgacgcctactacgacggcaccgatctcatggacatccgcgtcgtctctaccttgggtctcacggatgaggacatcgaggccctgcgcgatgtgcccggcgtctcgggcgtggaggcggcctattccgccgatgtgctggccaccctgaacgacgagcagtacgtgatgcgcgtgcactcgctgtcgccctcggcggcgacggcggtgaaggtggacgcgggcgccatctcctccgatgacgcgaattatctgaaccggctcgatctggtggaaggccgttggcccacctcggccaacgagtgcgtcatcttcaacgaccgcgttatgagcggtccctcctcgctgggggacacggtgacggttgatccgtcggtgggcaacgtgcaggacacgctggcggaaaccgagttcaccgtggtggggcgtgtgcactcgccgctctacgtcagttcgacgtccatgggcacctccaccatcggctcgggcaccatcgagcagttcatgtacgtgctgccggaggccttcgatgcggacatgccctacgtggaggcctacgtctccgtggaaggggcggcagagcttcccgcagacagcgacgcctacgacgatcgcgtggccggcgttgtggccgccatcgagggcatcgcgccggctcgggagcaggcccgggtggatggcctgaaggccgaggcccaggccgatttggacgaggcgcgagcggaatacgaaaaagaggaggctcgcgcgaagaccgagctcgccgatgcccgcgccgagttggatgcggccaaggaggagctggacgagggccagcgcaagctggatgcagccgcctccacccttgccgcgagcgagaagaagatcaaggacggcgagaaggagtacacccagggcacggaatcgctttccaagcgcaaggccgacgccgaggcgcagttcgccgaggccgagcagcagatcgccgccaatgaggcgaacctcgccgaggccaatgcggcattgccgacgctgcaggacgccctggcccaggccgaggccgccttgcaggtgccgaacctccccgccgagcagcgcgcggagcttgaggcgacccgcgccgacctggagcagaagatcgccgacatcgcggctgcggcgacggccttggaggaggcgaaggcgcagctggcgcaagagcgcgcctccgctgacgcgcagatcgccgcggctcaggctcggctcgatcaggccaagacgagcgtcgaggaaggcaagaagcagctggaagagggcaaggcggaatacgaacaggccaaagccgacctggaggcgggccgggccgagtacgagcagggcgtggccgactacgacgccgccgcggccgaggccaacgaggagttggacaaagcggagcaggagctcgccgacgcccagaaggacatcgacaacatcgaaccgccggactggctcgtcatggaccgcacgaagaacttcggcgtggtgagcttcgcctccgatgccgatcgcatcgacgccatcgcgtcgttcttccccttcatcttcttcctcgtggcagcgcttgtggctcttaccaccatgacccgcatggtggaggaggagcgcatgctcatcggcaccttcaaggcgctcggctactcgcgggcgcgcatcacatcgaagtacctcatctacgccgccctggccgcagggctcggcagcgttctcggtatcgcggtgctttcccaggtgctgccctgggtcatcatggaggcctactccatcgtctactatgtgccccgcgccgccatgcccatcgactggcccatcgcgcttgtcgccgccggcctcggcgtcggcatcacgctgctgtccacctgggccgccgccgcggccaccctgcgcgagaccccggccgccctcatgcagccgccggcgcccaaggccggcaagcgaattctgctggagcgcgtcgggcccctgtggcgccgcctctcgttctcgtggaaggtgacgttccgtaacatcttccgctacaagcgccgtctcgtcatgacgtgcgtgggcatcgccggctgcacggcgcttctgctgacgggcctggggctgcagaattccatcaacgacatcatcgatgtgcaatacggcgagctggtggactacaacgtcgtcatctccgagaaggacgacgccgccgatgacgatcgcgccgccgccgatgcccttctggccgacacggattcgttgccagtggccgtgcgtgccaccgagacctccatgatcgcccagggcacagacggcaccgaggccatgaccaccatcgtggcgccgtcggacccggcggcgtttaaggagctgtggcacttccgcacccgcgagggccacgaggaggtggccctcgccgacgccggcgccgtcgtcaccgagaagctggcgaccaaactgggccttggcgtgggcgatgccatcgtgttcgccgagcaggacgatctgggcaacgccacggcgacgacctactccgtgcccgtggcgggcatcatcgagaactacatcggcgactacgccttcatgacgccggagacctacgagcgcaccttcggggaggaggcggacaacctcacggtgtacgcccgggccactaccgacgagggggagcgccaagccctctccgaggccctgcgcgccaccggcgcggtggataccgtggccttcaacgacgaggtcatcgactcctacaagcagatgctgcgctcggtgaacatggtcgtggtggtgctcgtggtggccgcggcggcactggcgttcatcgtgctgtacaacctgacgaacatcaacatcaccgagcgggcccgcgagatcgccaccttgaaggtgctcggcttcacgccccgcgaggtgaacgcctacatcttccgcgagatcgtgcttctggccatcttgggagcgctcgtgggcctggccctcggcatcgtgctagagggcttcgtcgtggtgacggccgaggtggaccaggtcatgttcggccgcaccatccattgggacagcttcgtcatcgcgtttgtgctcaccatggtgttcaccgtcatcgtcatgctcgtcatgcgccccaaactcgcccacatcgacatggtggagagcctgaagtccaacgagtaaggctgtgtgatctggaaaatgtgccgaaatggacaaggtttgcacaaagcaacctggcaagattcaaaaaagcacattttccaggtctttaaggcgaggagagatccccttttacggtgcgtgatggcaaaataccaggtcatgtgagcatgtattgcgattgtctgcattgcagaaagttcccaatctggagaatgtgatttattgggcggagaattctggagaatgtacttttttggacgcagcaaatagcgaagctgtgcaaagtgaccagaaaatcacattttccagactgagggggtcgtagcagcgaattatgggcttcgctgtccggcgcgacgggggagtgctgtcgtgtgctactatagcgggcaaaccttacgggccgcatgaggcggccccacctgcgaaggaggagttgcgaacctatgaaggtaaccgagaagaagctcgccgacggcgtcatcaagctcgactgcgaggccacggccatcgaggtgaacaacgcgctgaaggaggccgccgaggccttcgcgctgtccatgggcgtgcgccccatgccgggcaagtccatcgaggagctcgcgaaagagcagctgggcatcgccgacttagacaagatcgtcgagcccaacgccatcgaggtgctcgtgccccgggcgctcgaccgccgcaacctcgtgccggcgttcccgcccaaggccacgcccacggtgaagttcgagcgcggcaagaagttcacgttcaccctgaacgttaccgtgaagcccacctacgagctgaccagctacgagccggtggagatcaccgtgccccccttcaccttcgacgagacccctatcaaccagcagctggaggagatcgccaagaactccgtcacctacgtggtggccgacgcgaagccgcttgaggcgggagacgcctgctccattgccatgaagtgcttcgacgacggcgaggagatcaaggcgctcacctgcgaggaccgcacctacctcatgggtcgcgggtacatgccagaaggcttcgacgaggcgctcgttggcatggagccgggccagaccaaggagttcaccttcgaggctcccttgggcaccgagaacggggaagtggtgaacaagcccatctcctgcaccgtcaccgtgaaggagatccagcaggaagtcgtgccgatcatcgacgatgcctgggtgaaggcgaacatgcccatgttcgcgagcaaggaggccctggtggccgatatgcgccgcgttttcgaggcccagcagcgcgaggcctacgagggctacgtgcagcagatggccgtgggccagctcacgcgccgcttcgagggccgcatcgccgatgagatctacgaggccacgcgcgaccagctcatgcagaacctgcgcatggagcttcagcaggccggcatgacatgggagcagttcgtggcccaaaacggcggcgagcagcagttcggcatgatgctcatgatgcagacccgcgaggtgctcgtgcagggcttctgcctggacgcggtgtaccgccacgagcacatgacgctgaccgacaaggatatggaggacgcctgcctgggcatgaatccccagggcaatcccaagatgatgcgccagcagctggaggactcgggtcgcggcttcgctctgcgcgagac

SEQ ID NO: 10569 - DNA, 3885 bp, Unknown
  gut microbiota DNA sequence
tcggcgtacgtaccacaggcgctttgctatgcaccatggacggcatcgtgataaacacccaaggtcaagcactgcgcgaagatggaagcgccattgaaggcctgtatgtcacaggcaacgattccggaggatactattccatgacttatccgaacctgtcgaccggcaacgcttgcggcaggacagtaactttcgcacgaatgattgctcagaatctggctgcccagtagccatctcgaccaaaacccgttttgtcgagccgctatcccttacgccccaaactcacaggcggacaggataacggctcgacctgtatcatcgggagaaatgcggcagtggtcgggccatgcttcggcgaggaggatctcggcatcgtcgaggaggtagtcgcgcacgacggccagagcgtggggaaaggcggccgtcgggccttgggcgaggagggccatggccgaggtgaggccgccgccgcgccagatttccaaacggcccagctcgtctacgatgaggaggccgggggcgcgggagggatccttcgactccgcgccttcggcactccgcccggaatgcgacttggcatcggtgggcaccgccacgctggcgcgcacggcaagttcatcaaagtgggtgttcacgcgagcgattgcctcatcgtctatgtgccaggccaactccgccttcgccgcctggctctcttcgtcgaaggtgccgtcggctcgggccaagtcaccccgacgggcgaaagggatgcgctcgccgctgggcagaagcacgttgtcgatgcccagcttctcgaagccgttcgcatcggcatgctcgccttctgaaggcacccactgacccggcgccagcacgccgacgcaggacaccccgcaatcggccagctccgtcaccagcgattccagccagcgcgtcttcccaatctgcacctcgcccgttaagagaaacagcattcgaacctcttccattagcgcatcgcgcacgaccgcaccatcaccgtctccgctgtgccgctcctagacgatcctctgcacgaaacgccccctacgcctccgggttgcgcagggcggccatcgtgagggcctccccgaagaactgaccagcaccgttcttcacagcaaagcgggccttgtcggggtcggctaccacgctgccggccagcatatccacgccccaacggaataggaacggcgccatgatcacgcttggcccgacgagcaccgtcgtggcgttcgcggccaaatccaacagacgcgaggccgtcttgttgatgagggtcacgccggtcatgaacaggtagtcggcgccggggatgacgtactcgcaagccggatcgggcacgtcacccgcctgggagcacttgcgctcgagcaccgtcaggcgcgcgtactcctcgatgcgttccacatgggggaagtgccccaccacaaccacacgcgcatccccgccggcggcgctgatctgcgggcggtacatttcgaaagcgtccatcttgcgaatagtgccgtcgggcacctccaccgccgcatcgtaggtgcaccccaacgggtccagcagcgtgcgctgcgagtaccacgcgttcagcgccgccacgcccaggctcgcctcctcgaagcaccacgatttggaaagctccgccacctcgcgcagggacatcccgcgcaaatcgcccgtgtagccacgacgcgcgccgccggtcgtggtgaagctcacccccatgccactgtcggcttccacataggaccagtgggtgcccagacaatagtcgcgcaccacgacgtcctcgggaatgccggcgatcaggtggttgtacagcttccagggcgtattcggctcgtttgtgcccgggaatgcaatggcccccgtcgcagcccccttcgtgcagcagtctttctcggcgcaacccatggcttcagtcctttctcagatgatggcgacccgacattccgggcgcttttgctcagtactcatcctaccgaattgttctctcttgtaaatcattttacttcatgaataattctctcttgtaaatcattcatgagtgagaatatactagataccatgcaaacgagcactgcaaaatccacgcttcattcggccgcctcccggagggcccgatttgtcgtgctggcccttgccctcatcctcgttggcgccgctgcgatctcccttttgctgggccgctaccccattgatccggctcaagccgtggccatgctcgtcagcaagatcgttccggttgatcccatctggaccgagcagcaggcgacactcttcttcaatgtacgtttgccgcgcattttgctggccctcatggtgggatgctgtctggcctgtgccggcgccgcctaccagggcaccttccaaaatccgctcgtctcacccgacattttgggcgcaagccagggcgccgcattcggcgcagccgtcgccattcttctgggcgtaagttccttcacgacgtcccttttcgcgttcgggttctccctgttcaccgtgctcttggtgctgctcatcagttcgcgggcccgcggcaaccacatgatggtggtcgtgctcgccggcgtcatggtgtcgtcgctgttccaagccggcgtctcctacgccaaactggtggccgaccccaccgacgagctcgccgacatcacctactggctcatgggatcgctcacgggcgcgaacatgcgcgacatcgccatggtgttccccatcatgctcgtcggttgcgccactctgttcgccctgcgctggcgcatcaacatcctcaccatgggcgacgacgaggccgccaccatgggcgtgaacgcccggcgcacccgcatcgtcgtcatcgtcgccgccaccctcgttactgccgcgagcgtctgcgtcacgggcatgatcggctgggtgggcctcgtcattccgcatctgtgccgcatgctcgtcggcgccgactatcgtcgcctcattcccgcgtccatgctcatgggcgccagcttcctgctcatcgtggacgacgtcgcccgccttgccaccaccgccgaaatccccatcggcattctcaccgctttcgtgggcgcgccgttctttctgtacctcatcacgcggaagaagaagctatgagcatcgacgtagcgcacttgagcttctcctacggaagccgcgagattctgcacgacctttcgttctccattcccgatgggtgcctcgtgaacgtgctcggacccaacggcgtgggcaagtccaccctgttccgctgcatcctgggactttccccgcactatagcggcacgattctggtgaacgggaaggatctgcgtgcgctttcagtgcgcgagcgcgcccgcgagatctcctacattccccagtcgcacgcaccggtgtacgactacgaagtggtcgacgtggtgctcatggccacgggcaacgacctgaagatgctcgccacgcccggggaagcccagctgcagcgtgcccacgaggcgctggcccgcatcggcatcgagcacttggcccatcgcacctatacgcaaatctccggcggcgagcagcagctcgtgcttatcgcgcgggcgctcgcgcaaaacgcgcgcaccatcatcatggacgagcccacaagcgcgctcgattacggcaacaccatgcgcgtgctgtcctgcgtgcggcagttggcccgcgagggactctccatcgtgcaatcgacccacaaccccgatcacgccttcctgtattcggacgccaccatggtgctttcgaaggggcggctgcgggccttcggcaacccccacgatgtcatcacctccgagctcatcagcgagctgtacgacatcgaggtggaggtcaattccctttatggcgacaaggtgcgcgtctgcgtgcccgtgcgcgagatagaacgttcct

SEQ ID NO: 10570 - DNA, 20504 bp, Unknown
  gut microbiota DNA sequence
tgcctgaggagctcgcgggcgtgggcgagggaggtctcggtggcggtgcccgatagcaggcgcgccacttcggccacgcgcgcatcgcccgtgacgggggtgaggatggtctcgggcgcatcgccggcggtcttcgtcaccgtgtaatgggcatcggcgagcacggccacttgagccagatgcgtgatggcgatgacctgatggctgctcgcgagctcggccagcacggtggcgagcgcattggcggtgctgccgcccacgccggcatccacttcgtcgaagacaagcgtctcggttccgtccttcgcgcccaaggccactttgatggccagcatgacgcggctgatctcaccgccggaggcgatgcgggccaaggggcgcggttgcatggaggcgccgggcttgaactcgaagacgacgctcgcactgcccgcggtgctccagttttcgcggggcagcggctccaccgtgcacaccagcgccgccgttcccatctccagacgtccgagcacctcgttgaccgctgccgcgaactgcggggcggcctcggcgcgggcggcgtcgtaggcggccgccgcctgggctagcgccgcctcggccgcttccagcgccgcctcggcgcgggccaggttctcatcggcgtcgtcgatgaggccgacgagggccgccgccgcgtcccagcgctcgaagacggcttccatggtggggccgaaggaacgcatgaggcccatgagctgccccatgcgctcctgggccgccgccaaagactcgccgtcgaaatcgatggcgtcgcagtagccggccatatcccgggcgacgtcctccacgacgaagcatgtttcccggagcgttgtggcgaagggcgccagcgactcgtcggcccgggaggcctcctcgatgagcgagatggccgtgttcagggcgtccagcgccccgccgtcgccagagagcgcctcggcggctccgtgggagttgcgggcgagcacctcggcgtgctcggcccgggcgagccagtcgcgcgtttcctcgtactcgccgccctcggggttcaccgcctctatctgctgcagcgtgaagcgggcctcctccagctgcgtgttggaggcgctcgccgttgccctcatctcttccagggccgcctcggcggcacgggcatcggcgagggcctcgcgaaaggctgctcctacggtgctttccagatcggcccaaccatcgaggatgcggccgtgctctgccggcttcagcagcgattggtactcgtgctgcccgcagagctccaccaaaggccccaccgtgcgcgcgagctccgacacgctggccatggttccgttgatggtggcgcgactgcgcccgtcggcgctgaccttgcgcactgcgacgagctcatcggcggtgggatcggaagggaacaggcgcccccgcacctcggcgtttttcgccccctcgcgcacataagagctgtcggcgcgctcgccgacgagcagcttcacggcgctgacgagcgccgtctttccggcgcccgtctcgccggtgaggacggtgagaccgggggagggcgaaagggaggcctcgcggatgagggccacgtccttcacttggatttcgtcgatcatggttccccgctagaagtcgatgacgtcgaagacgatgccctgctccgcctcaagcacgctgaacagctcgtcgggggccacgcggcgcacggcccgggagacggatacctcgccgccgtgggtgacgatgaagtcggcctgcagcttgcgggcgcaggattcggtgagggccgcgcgatagggcagcccctcgtgctccagggcgaagcgcacgtcggggccgtcgatcgagcacacggacagaaacgccatggccgagcgcaaagccgagcgggcgtcgtggtcggagagggcctcggcgagggcagcgcgcacctctccgaaggcctcggcggagacccacagctccgcggccccggccagctccatggcatggagcttcacccaggcggcggcggtgctctcgcgttcgccgatgaagtcgagcagaacgtcgctatcgatgagcaggcgcatggctattctccttccctggttgcgggcgcgccgtcgcgggcctcccagaacgacgccggtacggggcgcgtggcctggcgcaagcggaagcgcagctcgttggcctgggcgtcggtgagggcgatgcgaaggggagattctccccgttgcgcatcgggcagctcgccggtggcaagtacgtaatcgtaggcggcgttcaccagctcggtgggcgacgagccgatggaccgcagcttcgcgttcacctggtcgcggatttccaggggcactcgggccgttaccatggcgtgcatggccgctcctttctcttgcttttggcgcagtataacggaacaccgaacaaattgcaataataatacgaacaagtatttgcattatggtcaaaaagtgttatgctccatggacaaggagtcgacggctcgtgtctttttcggcaagacgcttgcctcggtcggtcgatttggggaagatggagcgatgcagcgcaccggtcggcatgttcgcccggggcaagctgcggcgtaatggcagaacggaagggaaaccttggcacagcgagcgttcggaaaaggaaaagcgacgagggtctttctcgccctgttgctcgccttctccctcgtcggcatcggcgcggttccggctgcggccgatcctgccgacgacactcaggctgccgtggatgcggcgcaggccacactggatgaggccgaatcccgcatggcccagatcaatagcgagtacgagcagctcaccgccgaggtggccgagctgcagaccaagatcgacgagacggcggcggcggccatggaggcccagcaggccatgctcgaggggcgcgcggctttaggccaggtggccgtgggcgagtaccgcgacggcagttccatggggcttttgggcctcatccttgattcgaagaacttcgacgagctgctccgcaacatggagtacgtcactcagatcatgtcctatcaggccgacgaggtggccgagcagaaggagcgcaagcgcgccttcgacgacgtgagcgacgagctgaacgcccagaagaacgagcaggaagaggcgttggcggcccaggaggccaagcgcgccgaggcccaaagcgtcgtggaggatgccacggcccgcctggagggcgctcaggaggagcacgcggcccgtctggccgagctcgccgctcaggccgaggccctgcgcaagcaggaagaggaggccgccgcagcggcggccgcggccgtgcaggagagccccgacgccaatacgggcgatcgcgagccggtggtctccgacgacgagggcccctccgataacggcggctcgtcgggtagctctggcgattccggcagctcaggatcatcggggaattccggcagctccggcggctccggcaacgggggcggatccggcgcctcgtcggaggaagggtggctttcaggcgtggcctcggcctacggcggcagcaccgatccgaacacgccgaaccccggcaccacgtccaccggcgccgtctgcgacgacaactccatgggcgtggcggtgcccaaatcggtgccgaactaccgcagttatttcggacgtacggtggaaatcgtctacggcggtcagaccgtgtatgccacggtgaacgactgcggctccatgggcggcggttcccgcgtcctcgatctgcagccgggcgtgtggaaggccttcggcttctccagctgccgcgcctggggcctgcgcaccgtcaagtaccgcttcctgtagggcgcctcgccgcgcctcttcgcggctcgccggagcccgcttcccgtctgcctccgcgcgcccgcggcccgcttcccgtctgtcgggcgcgggaaagttctgcgctcgctccgcctcgaagtgcgctatactgtggcgttacatgcgatgacgaagacagcggacgcgcgtcacggtcgccagagaagggcttcaccggctgagagagcccgaccctctgagtgcgtcttattcccttccgagcagcattcccgaacgcgaacgctcatcggcgaggcgaccagtaggggtgccgggtgctcccgtcacagagcgcgaacaagtgggcgacgctgcatcgccacccaatgggtgcgcgggtgcgttgccaaccgaggtggtaccgcgagagccttctcccgtccttggattcctggtaagccgcaagcggccccaggcgggacggaagaaggctctttttttgttggctcgagaagaaaggcgaaccttatggcaatcgcagaggagttggcggcgctgcgcgagcgcaccttggccgaaatcgccgcggcggacacgtcggcggcgctcgaggcggtgcgcgtggcagtgctgggcaagtccggcacgctgaccgggtatttgagatccatgggccaggtgcccgctgaagagcgcgcgagcgtgggcaaggccgtgaacgcggcccgcgtggaagtggaagaggcgctggccgcccgcaaggcggcactcgatgccgccgagctggaagccgccatgggagcggcggccgtggacgtgacgctgcccggccgcgcccagcaggtgggtacccgccatctcatcaacggcatcatcgacgaggtgtccgacatcttcttgggccttggctacaaagtggtggaaggcgaggagatcgagaccgactactacaacttcacggccctgaacgccccggccgatcatccgagccgttccatgcaggacaccttctacgtgcacgacctgtccggcgacacctcgcgggtgcgcggcgagtccgacgtgctgctgcgcacccagacctccggcgtgcaggtgcatgtcatggaggactgggacctgcccatctacatgatcgccccgggcaaggtgtaccgccgcgatgtggccgacccgtcgcatctgccgcagttccaccagatcgaggggctcgtggtggatcgcggcatcaccttcggcgacctgaagggcacgctcgactacgtgtgcaagcagatcttcgggcccgagcgcaagacgcgcttccgcgcccactacttcccgttcacggagccctcggccgaggcggacgtgagctgcggcatctgccacggcgagggttgccgcatgtgcaagggcaccggctggatcgagatcttgggctgcggcatggtggacccgaacgtgctttccatgagcggcatcgacccggaggagtactcggggttcgctttcggcatgggggtggagcgcatcgcctgcctgaagtacgacgtgccggatttgcgtatgcttttggaaggcgacatgcggttcttgcggcaattttagttgtagctctgccggggtcgggcttccgagtagtgctcagtcgctcagacagtcctcgctcggcggaaatgcccaccgggcatttccgttcgctgcggaactcgcttggtgagcaccacccgaaatccctctgcgcattcccatggtggagagtggaatagaaccggctagaaatcttgttgtcaaatgagacaggcgattaagaggaagaaaccagtatgaaagtatctttgaagtggctttctgagtttacggcggtgccggaggatttgaaggcgttctgcgacaggctcgatctgacgggcacgggcgtggaaggcgtggagaagaccggcgaggccttcgagggcgttgtggtggggcacgtgctcacctgcgagccgcatcccgattccgaccacatgcacgtggtgacggtggatgtgggcgccgaggaacccgtgcagatcgtctgcggggcgccgaacatcgcggcggacatcaaggtgcccgtggcgctcgtgggcgcggtgctgcccggcgatttcaagatcaagaagtcgaagctgcgcggggtggtgagctgcggcatgtgctgctcgaagcgcgagttgggactcggccaggatcattccggcatttgggtgcttcccgccgatgcgccggtggggcagtccatggcggacttcatgggcgcgggggacaccgtgctcgacctggagatcacgccgaaccggccggactgcctgtccatggtgggcatggcccgcgaggtgggggccatgtaccagcagccggtggcctggccgctttccggcgacgtggagaaactggccgccgtgaccgccggcgaggacgtggcggccgccgtcaccgttgaggtgcccgatgccgcgcgctgcccgcgctacaccgcccgggtcatcgacaacgtgaaggtggggccttcccccgaatggcttgccgagcgcgtgactgctgccgggggccgttccatcaacaatgtcgtggacgtgacgaactacatcctgtacctgtacggccagccgctgcacgccttcgatttcgcgaaagtggccagcgccgacgggtgcgcccatatcgtcgtgcgcgccgccgccgacggcgagcacctcaccaccctggacggggaggaccgcgagctgacgagcgacatgacggtcatcgccacccccgagcgcgccgtggcgctcgccggcgtcatgggtggcgagaacagcgaggtcgccgaggagaccacctgcgtgcttttggagtccgccgccttcgagcgcggccgcacctcccgcacgagccgcaacctgggccttatctccgaggcctccatgcgctacgagcgcggcgtggacgatcacttgtgcgaagtggtctcccaggctgcggcggcgcttctggccgaggtgtccgggggcaccgtgcgtcccggcgtggtggacgtatacgagcttcccaccgcccgtccggagctcatcttccgcattccgcgctttgtggccatgatgggggccgacattcccgccgacttcatcgaggacattctcgtgcgcctcggctgtgccgttgaggccaccgacgacccctccgtgctctcggtgctgccgcccaccttccgccccgacctggagcgcgagattgacctgtacgaggaagtgctgcgcctgtggggcatggaccgcatcccgccgacgctgcccggcggccgcgagcgcgtgggcgcgcgcacgccggagcaggagacggtgcgcgtgatcaacgacaccctgcgcgcctccggcatgaacgagaccatgacctactccttcgccgagcccggcgacatcgagcggctgcgcctgcccgccgaggggctggggctggccgtggagcttctgaacccgctgaatgcggacatgtcggtcatgcgccagtccatcgtgcccgggcttctgcgctcggtggcctacaaccaggcccgcggcgtgaagaacatccagctctacgagatcggcacggtgtttatggccgccgagggccgcaagaaggccaaggagcgcaagaagctcgccggcgtcctggccggctccatgcgcgatgcggcgtggaactcaccagcggtgcccttcgacttcttcgatgccaagggcgtgctggagaacctggcccgcgagctggcgcttcccaaggtgcgcttccgggcgctttccgccgaggaggccccgcagctgcagccgggccgcgccgccgagatgatggcgaatggtgcggttatcggctgggtgggggagattcacccgctcgtggccgacgccttcggggccgagccgcccgtggtggccttcgagcttgatgtggcggcgctcgtgcgcgcgtgccgtccggcccgcgactacgtggacgtgcccaccttcccggccgtcacggtggatcaggccttcgtggtggccgaggacgtgccccatgagaagatggtccaggtgatgacctcggccggcgggaagcttctggaatccgtggcgctgttcgacgtgtaccgcgatgcggagcgcgtgggcgccggcaagaagtccatggcctacagcctcgtctaccgcgcgcccgaccgcacgctgaccagcgaggaagtggagcgcgcccacggcaagctcgtgtcgaaggtggaaaaggccaccggcgccgagatccgcgggtaggcgtcgggcgagggcggaaccacgcggtattctgattcgctcaggcagtcctcgctctacaggacaggacattcagtcctgtcctgttcgctgcggaactcgctcggtcagaacaccccgtgtttccgcttgatccggcggcggtcgagacgggcttttcgtggaaggcggccggggacggcgccccttcggtacaatagcgaaccggcaaatgagtgagggcggcctcgtgccgcccgctttcgataaaggagcatctatgtgcggaatcgtcggctataccggtgaggcgagcgccacgcccatcctggtggaggggctcacccgcatggaataccgcggctacgactcggcgggtgtggccgtggagcaggacggcggcattcaggtgatcacccgcaagggcaaggtggccgagctcgcgcacaccctcggccacttcgaaatgacgggcacctgcggcatcgggcacacccgttgggccacccacggcaagccgagcgaggccaacgcgcacccgcacacctcgtgctccggcgacatcgccgtggtgcacaacggcatcatcgagaacttcgccgagctgcgcgaggagctcgtcggccgcgggcacgtcttcaagagcgagacggataccgaggtggtggcgcacctcgtggaggagtcctatcaccgcatgctcgccgaaggcaccggcgacttgcgtgcggcggtggccgaggcggccgcgcggctcgtcggcgcctacggcctggccgtcatggccgatgccgagccgggcacgatcatcgcctgccgcaaggattcccccatcgtggtgggctgcggcgagaccggcagctacgtggcctccgacatcattgcgatgatcgacgccacgcgtgatgtggtggtgctcgccgacgggcagatggcgcgcctgcgccccgatggcatcgagtactacgacgaggccggcaaccccattaagcccgacgtcacccatgtcgattgggatctcgacgtcgccgaaaagggcggctaccccgacttcatgctgaaggagattcacgagcagccccgcgtcatccgcgatacgctggccggccgcctggtcgctggctcgctggttatcgacgagctggacatgacgccggccgagctcaacctggtcgatcgcgtctacattatcgcgtgcggcacctcctaccatgcgggccttatcgccaagaacctcatcgagagctgggcgcgcatcccctgcgaggtggaggtcgccagcgagttccgctaccgcaaccccatcatcacgcccacgacgctggtcgtggccgtatcgcaatcgggcgagacggccgacacgctggcggccatccgcgacgcccgcgtgaagggggcgaaggtcttcggcatcacgaacgtggtgggaagccccgtggcccgcgaatccgatggcgtcatctacaccaaggccaacaaggagatcgccgtggcctccacgaagagctttttggggcaggtcgtctccctcacgcttttggcgatgctgctcggtcaggcggtgggccggctgaccggccggcagatcaagctgctgttcagcgagctggccgataccgccgagcaggtcgagcgcatcctcgccgactgcgatccggcggtggaagcggcggccgacgccatggtggacgcgacaagcgccctgttcatcggccggggcatgggggccgccaccagctacgagggtgcccttaagatgaaggagatcagctacctgcacgccgaggcctacgccgccggcgagatgaagcacggtcccatcgcccttatcgacgagggattccccgtggtggccatcgcgacgaagagccccgtttacgacaaggtggtgtcgaatttgcaggagtcccgggcccgcggcgcctgcatcatcgccgtggccaccgagggcgacgaggaaatcgccaagcacgccaaccacgtcatctacgtaccgaaggtgcgcgacgccttctcgcccatcacggccagcgtgcccttgcagctgctctcgcgcgccgtggccgtcaaacgcggctgcgacgtggaccagccccgcaatctcgcgaaatcggtgacggtcgaatagcttcgaatctctttcggcgccgcgctcgaccccgaggcggcgcctttgcgtatccccgatgatctgaaaggcagatggagtggcccgatcgaagaaatcccaagccgccgtcgatggcgcgcttgccatggacgtgcccaacgaggaagtgggcctcggcgtggacatcgtggaaatcgcgcgcatgcgcaagatcatcgatcgctcgccggccttcgtggagaaggtgtactccgccgccgagcgggcctattgcgactcccatgctcaccccgaagtgcactacgccacccgcttcgccgccaaggaggcggtgctgaaggcgctcggcacggggttttccgagggcatcggctggctcgatgtggaagtgcgccgcacgagcaaggggcgcccctacgtggtgctcaccggacgcgcccgcgaagtggcccgggaacagggcgtgcgggagattcccctctcgctatcctacacccataccgacgccgtggcctgcgccatggccatcaccgaggagtcggtggcggccaccgagcggcggcgcgaccccatggaggagctcacccgccagttcaaggacgcccgcgccctgctggacgacctcccgggagcgcttgcagccgggtagaatgagcgatcttcgaaacccgctgtcgatccaccttcctgcgcaaccatcgatatcccaaagcaagccctcgggacaacttttcagcatttcgtgcagagaaaatcgcgattgtgcgagtctgaagcgccttcgttgactcattttgcggagaaaatcacgatcgtgcgagtttttctcttctcagaactcgcacgatcgtgattttctcgacatttgcgacgcattttatgttttgtcccgaggtttgctgagttttgcgaagcgaacagacaaatgcggctaacgcgacagggcggttttgccctattgcgacagctcggctaccacgcgttccagggcgtggacgtcgatgggcttggcgacatgggcgttcatgccgcaggccagggcctggcgctcgtcctcggcgaaggcgttggccgtcatggcgatgatggggatggtgccggcgtcgtggcgatccatcgcgcggatggcccgggcggcgtcgtggccgttcatgacgggcatctgcacgtccatgaagatcatgtcgaaggtgcccggggcgctcatcccgaacttcgccacggcctcctcgccgttggcggccacctcgcaggtggcgtcgtggatgttcaggatggcggtgatgacttccgcgttcagggcgttgtcctctgccacgaggacgtgcttgtgcgccagggcgttcccgtcggtcccgctcgcgttgccggctcgctttccgccgtcgccctcggtgccgtccgactcgtcgccggccggcgggaagtccagatcgacgatgaaggtgctgcccgtccccagctcgctttccacggagatggtgcctcccataagatcgatgaggttcttcgtgatggccatgccgaggcccgttccctgaaccttgttggtgaggctcgactcctcgcgggtgaacgaatcgaagatggtggcgaggtagtccttcgacatgccgatgccgtcgtcgcggacgatgatgcgcaggtgctgcagctcgccgtggcgcttggcggagccgtcgacgcggaagaggatgtggccgccctcgggcgtgtacttcatggcgttggagagcaggttcatgaggatctggcgcagccgcccctcgtcgccgacgagccggtcgtgctcgaccttgtccacttccacggtgaacacttggtttttggcgtcggtctgctggcgcatcatggcctcgacggactccacggtgccggagagggcgaaggcgcttgctgccagggtggtcttgccggcctcgatcttcgacatgtccagcacgtcgttgatgagccccaaaagatgctggccggaggtggcgatcttgcggttgtagtcgcgcacatgggcggggttgtcggcctcgcggtcgatgagcgtggagaagcccaggatggcgttcatgggcgtgcggatgtcgtggctcatggaggagaggaacgagcttttggcgcggttggcgtcctcggcggcggtggcggcgcgctcgaggcgggcacggatctcgtggtcggcggtgacgtcggtgagcgagaagatggtcttctcgcgctcggcgagcatcacgggccgcgccgtcatgcgcagccactgggagcggcccagcgccgggttgtccgcctcgaattcccaggtgcgcgccttatcgccggcgccggagtgcacgatggcggccacgttggcgtaggcctcgttgggcgacagctcgttggggacgaagaagtcgcgggccggaatgccgaggatgtcctgggtgttctcgaagacggcctcgatgaggcgctccttgcggtcgacgatgaagatggcggtgtcgatgttggcgccgatggccgagtacacgctttggatgtactgctcgtagcggtgctcgcggcggcgccggtacaccatgagggccaccatggccgccgccgccacggccacggccacggcgagcacggccaccatctggttggtgatgccgacgatctgcgtgccgtcggattccaccaccgaaagcggcaggatggtcacgagcgaccagccgctcttggcgctgatgggggtgtagaagacgaactggtcggcgccgtcgagggtcatgacgaggctgccggaggtatcggaggcgatgccggcgagcaacgaggagatctgggacgagtcggcgttgtcgttgatgagggccgaaaggctgccctggaccgcctcgtcggcgccgtggttggcgtcgagcacgatggtgccggaggagtcgacgacgaaggtggcgccggcgctggaataggcggtgccgtaggagttctgcagctcgtcggcggggtaggagacgtagacggcgccgaggacgtcgtcgggatccgcgggtgtggtggccgtcccggggccggcggtgacgggggcgtcgacgatgggggcgtagaagaggatgcggcgttcgccgccgtggccgagatacatctccgaggaaccggtctcgccggccatggccgggccgaacagctcgtcttccaaggccggatcgtacaggtcggtctcgctcgaggagcaccaggtggtgccgtccttggagcgaatccaggcggcggcggcctcgtgggtggagatgaagtccttcacctggtcgcgggcctcttgcggggtgacgtcggcgatgaagtgggcgaggcttttcacggagttctggtcggaggtgaggcattcgtccaggtagtgggcgcgggccgtggccagctccatgaccgaggtggtcgtggtgttgcgcacgagggactggatctgcccgaggtagaacaggttcaccgtgatggcgacggcggcaaagacggccacgatgaccaggcctgcggccatgatcttgcggctgtcgactttgacggcgtgcacggcctcccctttctgctctcaatgacacctcagtataaggctataatgccgcaattgtggcgagattcgctattaacccctgtcaataggggggcgagcgtgccgccccgccttaggactcgatggcgcggatggcgtcgggaaggtaggtgatgagttcctcggcggcgacgcagatgtcggtgagggcggccgcggcggcccgacccgcctcggcatgcagggcgcagccgagggccgcggcgtcgcgggggctaaggccctgggcgagcagggcgccgacgatgcccgcgagtacgtcgcccgtgccggccttggcgagcgcggacgtgccccggtccatgacctccgcggtgccgtcgggcgaggcgatgaaggtcacggggcctttgagggccacgacggcgccgtaggcctcggcgagcgcgcaggccagggccgcaggcgcggggtcggcttcggctagcgtggcgcggcttgcgggggagagggcggccgcagcctccgcgagggggctgcgcactccccgggcggccgcgtcctcggcctctcccagggcctcccgggcgccttgggccagccgcgccgcctcgccgccgtggggcgtgagcagcgtcgcgcgcccggcggcggcccgctcgcgggccaggcgcaggccggtggtgttggcgagaagcccgagggcgcccccgtcgatgagcagaggggcctcccagccccgcaccgtctccatgagaagcgaggtgagggaggtttccgccgcgtcgaagccgcagccgatgacgcaggccgtcgggtggcccggccggggcgccggcgccttggccggcttccacgctctccagtcgcgcaccaccaaagacggccgccagccacgcacggtgatcatcgatttcccggcgcagaacacctcggtgtagccggccccggcacgctcgccggccgcagccgccaggcaggccgcgccggggtaggcggccgatccgaccacgaggctcaagtgcccgcgggtgtacttgttggcatcggcggccggatgcggcagcagacaggccatctcggcattgccccggccgggggccactttcagatcctccgcgtcttccatctcttccacgccttccaaataatgagcgaaaccctcatgaaacacagcgccaacgcagcgcaatcctatcggaaacgggacggccgcgcggcgtaattctcatgttcccgcttctagaatgaatatcgtcaccgtagcacactgcgatggcggatagccaaagggttaaggagttgtgattatcatggacatcaaggtaggacgcaactggggcctgttcgccgcgggcatcgccctggtcatcatcggattcgtgctgctcatggtgccggggctcacgctggtgagcatcgctgtcattgccggctgcatgtttctggccgcgggcatcgtggatgcctacgcttacttcaagtaccgcgaggccgaggggctgtccggctgggcgctcgcctacgccgtctgcgacattatcttgggcgtgctgttcatcgtgcatcccatagcgtcggctgtggtgattccctgggtcatgggcatcttcgtggtggcctacggcatcttcgagatcgccgccgccgtccgcttccgcgatgcgcttcccggctggggctgggtgctgttcgccggcatcgtgtcgctgttctgcggcatcgcctttttcctgtggccgggcaccttcgcgctgttcttgggcttcttcctcatggcccgcggcgtgcagatggccgtctacggcgtgtcgctgccccaggcgaccatcgtggcccacacccactaggaagtgcgcgccctcgggaggagttgcgctctgaggaagcaatgcccgctaggcgaggagttggcggcactgcggccgcgccagtgataccataggcgcgaagagattcgaggcccggaaacgcttccgggcctcttcatgcggaaagcgaggaatcatggcggagcagggcaatctgttcgaaggacaggatccggcggcgcgggccgaggcgctcaggcgcgagatcgagcaccacagctaccagtattacgccctggacgcgcccaccatttcggacgcggccttcgactcgctcatgcgggagctgcgcgagatagaggcggcgcaccccgagctggtgacggcctcctcgcccacccagcgagtcggcgggtatgtgggcgagcagttcgcacccgtcgtgcacgagcggcgcatgtactcgctcgacaacgccatggatttagacgagcttgacgagtggatggagcgcactgccgaggcctgcggaggggcgcttccgcctttgtgctgcgagctgaagattgacggcagctccatcgcgctcacctacgaggacggcgtgctcgtgcgggcggccacccgcggcgacggcaccaccggcgaggacgtgaccgtgaacatgcgcaccgtgcgcgacgtgcccctgcgcctgcgcgacgaggcgcgcggtgccatcgcgccgggggtggagacgctggagctgcgcggcgaggtgtacatgccgaagaagagcttcgaggccttgaacgccgccgccgaggaggagggccgcgcccccttcgcgaacccgcgcaacgccgccgccggctcgctgcgccagaaggacccggccgtgacgaagatgcgcgacctctctacctttatgtacgccatcgccgatgacgccgccttggaggtggagggccagtgggagcttctgcagtggctgcggaaggccggcttccacgtgaacccggacgtgcggctgtgcaccacggccgaggaggtgcgcgggttctgccgcgagtgcctggatcggcgcgagtcgctgccctacgagatcgacggcgtggtggtgaaggtgaacgacttcgcccgccagcgagccatgggatttaccgcccgcgcgccgcgctgggccatcgcgttcaagttcccgcccgaggagaagacgacgcttctgcgcgacatcaccgtgcaggtggggcgcaccggcgcgctcacgccggtggcggagctggtgcccgtggtggtggccggctccacggtggcccgggcgacgctgcacaacctggacgaggtgcaccgcaaggacgtgcgcgtgggcgacacggtcatcgtgcggaaggcgggcgacgtgattcccgaggtgctggggccggtgctctcgctgcgcagccccgaggcgcgcatctgggagatgccgagcgtgtgcccgagctgcggcagccccgtggtgcgcgacccgggcgaggtggccttccgctgcatctccatcgactgcccggcccaggcgctggagcggcttctgcattgggcgagccgcggggcgctcgacatcgacggcatgggggaggagatcgtctcgcggctcgtggagagcgggcgcgtggcggacgtggccgactactactcgctttcggaagaggagctggcgagcttggacatgggccgcgtgaaggccgacggggagccggtgcgcctcgggcacacggtggcgaagaagctcgtggcggccatcgaggcgtcgaagggccgctcgtttgcgcgcgtgctgttcgggctgggcatccggcacgtgggtaagaccacggccgaggccattgcggcggcctatccctccatggacgcgctcgcggcggccggggaggacgagctggcgggcgtctacggcgtggggccgaaggtggcccacgggatgtggctgttcttccgcacgccggacaacgtgtcggtcatcgagcggttgcgcgcggccggcgtgaccatggccgatgaggccgtcgctgtcggcgaggaggtgccccaggtgctggcgggccttaccttcgtgctgacggggacgcttacgcactcgggcatgacccgcgacgaggccggggcgcgcctgaaggccatgggggccaaggtgtcggggtcggtgtcgaagaagacgagcttcgtcgtggcgggggagaacgcgggctcgaagtacgacaaggcggtggcgttggacgtgcccgtgctggacgaggcgcagctattgaacctgctggagaccggggaggttccgcgcgaggtgtaggtgcggggcttccgggggcggagccgcggggtactgctcagtcgctcagacagtcctcgatggtatcgaaggcgtcgggcgatcctcgtcccacgccccttgcgccttcgataccatctgcggaactcgctttgtgagcagcaccccgcgtctccgccggactcaacttctcttctgacttcatttgtcatgaatggggaaggcgtgaacggggcgtgggggttcggtttagttctcgcgcacggggcgtgaactgaaggcgggcaagttgtggagggggttggcgggcgcgtcttcctcctttaggcttcggccccatggttatgttcaaagcgcacaccaaggccgcggggatgattgtcgcggctgctcttctggcggcgttgtgcaccgccttctcccatcctgcggcctatgcgtccgaggtggaaagtccctttacgaagactcaggacttcgcccgcgagataaaagagtacgtgggcgatgtggccgacgaggcggccgcccaagctgaggctgaggcgctcgagggccggcggcagtcggtcgtcgtcgaggctgatgcgcagctcggggtgccgtactcctacggcggcacgaccccttcgggcttcgattgctccggcttcacgcgctgggtgttcgaacacgctctcggccgcgagctgccgcgcacggcggccgagcagagcgcactgggcgagggagtctctctcgatgagctggtgcccggcgatcttctgttctggggctcgggagcgggcgcctaccacgtgggcatctacgcgggcgatggcgagtacatccacgcctccacgggcgcgggccgcgtcatgcgcgccaccttcgactactttgcccccgatttcgccaagcgcgttatcgagtagacgctcgttgcgaggcgtcgcgcgctagtaccggcgggtgcgaatgcccgtcgtcgatgcgattgatgatctggcccatcagcgaaagggctcctttgcttcgcgtcgtcgagaagaaataatttgcagtctttgagacgccgttttgcgggttatgtgacaaaatgccagatcagaaacgcaaataggagtgtatgaccaggtaattcgccgagacggtcgctcaacgtttgccaaatgcatcgattttatcggttggacaggttcccccttcgcgctataatgcgggcttcaaggcaaaaacttgccctggtttcgcgcactcaaatgcgcaaacgcgaaaagataactactgaggaggcacgatgacttcactgagggaggcagtatctattcttactgctgcggctctagtcgttgcccctgtgggcggcgtggccgcaacgtacactaccggttatgccgacgacggcgacgacggacatacggttaaggacgaccgggatcatgatattccggccaattacgaggaagcgctcgcctggatcaaagaaggcaagaccctctataagtcttgcgtcgactatatggcgggtcatgccgacaagttcggcggcctgaccgaggagcagcgcgccgagctgtggaaccttgcggtcgatgatgggtcgactgagctggagcccgagacgccggcggtttctgagccggagcccgagtctgttcccgctcctgtggagaccacgccggaatctgaggagcctgcaaagacgcctgcgcagcctgaaatgccggatgtggaagagcccgtcgttcccgaggtgacggtggatccgactgctcccgttgatcctgccgatcctgttgaccctgccgactcggttgatcccgctgatccgaccgatccgacggacccgaccgagcctactgacccgacggagccgaccgatcctgtcgatcctgtcgagccagtggaccctgctgagcccgtcgatcctgccgagccagcggatcccgctgagcctgccgatcctgccgatcccgttgaccccgagcagcccgaccccgagcagcccgcggaaccggacgagccgatcatcgatacggacaacccggtcgattccggccagcagaggcccggcaacgccggcggtgtcacggacgactcgcacatggccgccgtcatcaaggggcagacccagacgccgctcaagcaggtggccgtcacggtgccttccatctccttcacgcatatcgacaactcgtcctatgtggcgcgccactacagcgaggatctcaccaccgagaagttcatctcgcttgtgggcgagtcggcccgcaccatcgccgccgagaacgacctgtacgcctcggtcatgatcgcgcaggccattctggagtccgcgtcgggcaattccacgctggcccaggcgccgaacaacaacctgttcggcatcaagggcacctaccgcggcaattccgtgcagctgcccacgcgcgaagacgacggcacgggcgccacctacaccatcatgagcgacttccgccagtacgagacggtggacgagtcgctttccgattatgccgacctgctcagccattccatgggcgatttctacgccggcgcgcgcaagtcgaactccgacagctttgtggacgcgtgcgactttctcgtgggccgctatgccacggacatcttctactccgagaagctgcaggacctcatcgagacctacgacctcacccgcttcgacgtgccgctcacctacgagctgaccgacaccttcgtgctgccggtcaaagacgaggtcaccgggcttgacaagtacctcgatccggttgccgacagggtgg

SEQ ID NO: 10571 - DNA, 12763 bp, Unknown
  gut microbiota DNA sequence
ccaaatggccaaaaagtagctgccagctggcagctaggtacctgtttttgaccatggaggctatagcgacgaaatcaggctggctgctcggaaaatattcccaggtcagtgcgtcgacgaatattggtacaaagcaagccgccttttcggtttgcagctaacgaccgataattgaccaaaacgtcgcttcaagctcttcgaacttgcagctggcatttggaatttggccattgagcgcagctttcccttgcgcgcggctactcgctgtcgaccagggtgccgcctttgccatggttgaggatgatcttgcgggcgcgggtgtaagcgtccagggccggccgcacgcgttcgtagttgtccttcttgtagatggcgtacagccggaaggccgcatcgtcgtcggtcacgggaagcaccgtcacgcgggagaaatccgacaggtagcgcagctggggcatggatgcctgcaggatcatgacgtcttccacacccagcggaatagcgcagtagttcatgtaggtgcgcccgagtaccgcccgggtgcggggcgtgtagccgtgctcttggcagacgcgttcgatgttggtccagcccgacaaggaatagccgtcggcgaatttcacgaagcggtagctgcgcagatcgtccatggtcaccgacttcatagaggccagggggctgtccatagagaccatggcaacgaagggcgaacgaatgagcggaatgtaggcaagtcccaaattatcgagcttgtccagttcggcataggccagcaagatgtcggcatcgccttccaccaattgctccaggtagttcgtatcgttcaggctgttgtagctggcaggagcctcgccctcggcgtcgagaaacgttgcggcaatggaggtgatggaggcgatggcgctatcggacatgatgccgttcaccttgagcggcgtgagggtctgtatatcgtggatgcgctgcttggcgtcatcataggtatccaccatctgaagggcggcagcggcgaacacgttgcctgattcggtgagctcgacccggcgtcggtcgcgctctaaaagcgagcagccgagctccttttccatggcgacgatatgcttggaaagcgtcggctgtgtgaggtgcaagatctctgccgccttggtgtagttcagcgtctgagacagcacgatgaattcgcgcaacaagctcagctccatggaaagcccccttcaaaccccttctgcttttcgcgttattgacaccatacaccctaatgggccgaaagggcacggcatctcctgccccattccaaatggaataagcttattcgcagcagctgatcagcaaagaaatgcccttctgagtattgagtagccccaaattgacggttcttacggaaagaacgtcaatttggggctagatatatctcgaataatcgaaattcgttaacaagatagtcacgaattgacggttgttacgtaagaagggtcattttgtggctagaaaaaattcggggaagtagagtgacattcctcaaggtctgtgttgctcgcggatctcacgacggcgggcttcgcgggcctgagcgtactcgcggcgggcggcggtgtcgaaggacttcaccttggcctggggttcctgcaggttgtccaccttgatgaagcgggccatgcggctggcgatggagtcctcggcgccggggttccagccgatgggctgcatggtgaagcggaacttcttgccgctcaggaactcgtcggcggagacttcctcggccacagtgatggcctgctccgggcagatggtctcgcagaggcggcactgcatgcacaaagcgctgcgatgctccacgccgaaggcgtcgttggcggcgtcgaatcgggtcagggcgccggtggggcagaacacggtgcacatgcggcaggagcggcagagttccgtgtcgatggtgacctggccccagaggcgcgtggtcacggtgggggccgcgggggtgccgagggctttcagactgttgaagaggcgcaggcgacgctcgggcacgaagtgggggagggtaccgtcagcctgcacatgggcgaactggggctcgcgactgtcttgttgcgactctcctgtgggcggggccacggggtaccctgattcgctcaaacagtcctcgctggcatctgccacggtggcggcgttcacggcattagtgtcatcctgagcggaggccgtaggccggagtcgaaggatctctcgagtgtcggaggcgtgctggaggcggatgcggtcgatgggggagggggttcccagggcagcgaggagggtttcggcggagacgatgatctcatcgctgagggcgccgccgcagcgatgagggcaactctcacaggggccgctgatgagctggatggaacgggcgccgcgggcggtggcttccacgagcagcgactcgtccacgcgacccagacagacgacgccgacaaggggccggccgtcggaggtggcacctgcaatcttcccagggacgaaggagggcgcggtggcatcgcaggagtctcgcttcatgcgattgccgctggccattgcaaaggcgcgctcgcaggcgatggccactcggccctcattctcggcaagagcggcttctacggcgccgaacagttcctcgtcggtggggttggcggcggtaaggcagccggtggggcaggccgaggcgcaggttccgcaaccgatgcacttctcaggggagacgacaatgccctcttcgcccaaggagatggcacccgtggtgcacacggcggtgcagcacaggcattccccgttgcggtggcgcacgagcacgcagcgctggggctcgaccgcaagcagcggtgaattcatctcatcgatgaggttgatcatctgtccgtggcgatagttagtcatgataggacacccccgtaatggcgcggatggtttcgctggggtgcacctcgcacacgcgctcgccttcccgcagccgtacccgatggatcttcagttgcaacgattcggcctccgccaacggggcctcggtaaagtacgtgaataggagcgttgatgcggccttgccggcgcaagcataggtcttggccatttcggcagccagcatggccgggcgcttgtcgcgctccatctgggcgggatcgaaatagcggcgcggaagaacgaggccgttcacgagccccgccatgattacgacacaggcggtctgccccgcaaaatcctccggcagccccacgcgcacgccgtcgccgacgaagccgggagagagcactcggtcttgaacggcgtcgcacagggctggcgctgtggcctgctcgcccgcatctttcgcggcggcgcggagcagcgctgctccctgatcgtcatccgcgccgacggcaacgatagccgcatcgatcagcgcgcttcccctgaggcccgaaaggcagtcgacgatttcggccgcttcggccaaggcggtggtggcgcttgcagcctgctggcgcagcagggcgcttacaggagcatcggcgaaggcgacgcctgcgcggaggcttaaggcggcatcgcccgaagcgacggcgttcgccagggcgctttgggccaaatagtcgccaaagccgcaccagctgcgcagggcgagcgggtcttctggatcggcggcaaggcgcaaaagcgtaaaagcgcgagcggcccggcaggtatcggcatggcgcatatcgccgccgagcgaggggcgggacagcgggcttgcggcgatgccctccgcctgaagcgcttgggcgatgcgcgcggcccattgcctggtggcggccgccacggcaatgtcttggggtcgcgccccgtaagagaggtggtggctcaccagcgaaacgacgcctgtcagttcgctcttggggcgctcgaaagccaccgcctcgcagcttccctggtcggtgcaggcgcagggcaccggtcgcgcatcgagggcctcgtcggcagccaggaggttgaccgcgtcggttaccacgcggctgagatggctgtaggccagggtttcgcgaacggcgttggggttggcggcaacgagctcttcgatgcccgagaaatgcgggtaatcttccgagccgtgcgtgcgggcgcacggctcgcttgcgacaaggagcgccgtgcgcgcaagaagacccgcgaggcattgggacgcgcggctggccatttggtagtcgtcgacgagaacgtaatcgcggcggaaggcctccaggtcatgggcgaagcgctggccgtaatcgaaggccgcgcggggaagctcgcaggcgaggtaggactctcgatggcgcaaggagccgacgagcaggcgaaagacgcgctcttcctgctcgtcgtagaaccaatcgccgctcatgggctccaggtcggcccagctgcggtagaagaacttcagcatttcgctgaggcgccgcggtgcaaccccggaggttttcacatcttccagaagaaggcgctcctcgaagcccatgaggatgcggccccgccgacccgtgcgggcttcggcttgcggagaggacagcacgtcgagcgcgtacagcggcagtgtcgtcaccaagggcaggtcctcaaggggcacgaccgccttaaggcgccgctcgagggcgcaggccgcagcgggggtggcggcgaacaggatgatttctcgcggcggcacgccttgggccaaaagatccaggacggcctccacaagccgttgggtcttgccgcatccgacgcgcccctcgacggagtgcacttcggctgcagaggcgtagggcgacaggtccatggtcgcgtcctcccttcaggcttaggctgctaccagatcggcgagcagggcggcgtcctcttccaaaaagccctcggtcacattggcaacgccctggtaaaaggtcgtgtcggcgaaccgacgggtatcgctaaggaacaccggcacccagctggcgaggtggtcgtccatgaagttgcgctgggtgttgatgagtgagaaggcgcgctcttcgtcgccggcgcgcagggccttcgccgcccggtgagccagaacgcccatgaactccagctccacggccacgtgatcctcgccgacggtccaggactcggacttttccaggccgcaggagcggtaaatggcgagcacctcgtcgcgggcatcgctcatgagcaggcgcttttccgaagtgtagacggattcgaagggataggccgccgaataggtgtcgatgcccgagcccagaaacgcgcgggtatagtccaccgacagcttcatgagggggtcgacccaggcgttggagaggtacttggcgatctggtaatagccctcgtccatgagtccgttgcccgaagagacggggtaatcggtgtcgttcagctgggcgagcagcgcctcgtcaacctcttcgcggaacaggcgggcgagaaagctgtaggtctcgctgcggctttcgcagagcgcggccagatcttcggcggtcatgacgccctcgtcgttggtatcggtgccgagggcagcgttctcggtggtttcggcagtctcgacgatggtctcggcagcgtcatctttgcgggtcgcgatagtcatggttgcctccctagttctcgttgtcggcgtgcagatacgcgcggccgtgctcggtggcggaccactggcccgtccattccacggcgcccgcatgctcgagtttgtcgatgaagtacatggcgtagcgcttggggttctgcagcaccggttcgtcgtccaccacgtccccgatctcacgtaggctggcgcctccgtcgcgagcgcacagctcaaggcaggtggtgaagatggcgccgtactgcggctctgtctcgtacagggcggcgatcatctccatcgggcgatagctgtccagcttggcggcccctgcctcggtcaggctccagaacacctccggcgccggggcgacgcgccagtactcgacgccttccacttccacgcgcaagggctcctgctccacctcggccagcggggtgccgttctcgtcggtctgagcgatggccccggcgcgttcgagcaagttgcacaaggtcagcggctcgtagaccgagtggtggtggcgcttcatctcggcgatgacctcctcaaggtcggccgtggggaggggggatgcgcacgtgcccatgatggtgaagagcattttgtggaaggtgggcatctgggcgaacagtgcgtcgatgcgctcctcggcggtctcgccgttgtcgaaggcgaccaggtcgcgctggaactgaggggcggcttcggggttcggcatattgaaggggccctcggcgagaaccgagggggcctcatcgtcggcgtcggtgtcgtcgtcgaaggcgaaggcctgcaaggggtcgaagtcggcggtcaggtagccgtcgagtatctcatcggtttcggtgcggtcagtcatggggcctcctcggtgcgagttgtgcggtgccacgatcttaacgaggcataaatttatgcgtcaagcctgttcagaggcatgttctcatgacgatttggcttggatgatgcttgcgcgccatgagcttattccgattcgacatgctgtcagatttcccgttgacggcgccgcagcgcgccccgatactgggcctcgaaacgctccgtctcgggctggccttcgcggttgcgctcgggacgcatttgcaggatgaaggaggatgccatgctgcccaaaccgtcgctcgtgcttcaggtgaggcttcggcccgaggagtactcggataccgctgctgccgagatcaagcgcagctacatgtacctggcccagtccgtcgtgtccgagctggacgaaggcgaacgtgccgagggcaacctcatgcgtctgaacgtccgcctcatgaagcccttttgggatgcgtctgaccctgctgctgaacagctgtggcgcgcttcgttcatgccctggcttgtcaacgccacgcgcaatatgtccacagccatgcacaactacaacacggtgctgcatcccctgggtgccggcaacgtgacctaccagtgggccgacttcgacttcgccccccatgccgtgctgcgcctgaaggtggacgacgaaaaccgcactccgtctgaagcgccggctctctgcgacaaggtgcgcacgcttgccgccgagggcgtcttcgacgagaacgtggcccgcatccgcatcccctcccgggcgagcattgccgctcaagaggccgccttcgaagaggagcaggcctgctaccgcgccgccctggccgcccagaatgaggcggccgaagatgaagcggccgttcccgctgaaacggcggccgaaggcgaaggttcgtttgaggccgacgaggcggctgttgttactgaagacatcgaagagcttggtatcgctcagccctccgacttggcggacgacgccgcagctgacgcgaccaccgaggctcccgagggtgtcagcgaagttctcgccgagccggtgttcagcctcgattattccatctggggcatcgaatacgccgacggcaccgtcgttgagctcgattctcgcattcactaagcttaccccggcccggatcgcgcttcccctcttccccaacctcacgatccgggcgtctttcccctcccttgaacgggcaggacgccacccctccggcgccctgcccgttcgcatctccgacttttcccagaaggcggtacttgttcgtcgcttatgccgctgccgcataagcaatgccgaatgggcattgccagcccgtcaacccggcatcttcggaaattccttatgccaccccaagcgcgtaacgtgtacgtcagaaaagcttgtgagatgtctccgccccagggggacttccaagctttctaaagagagaacccgaaagaagagaaggaggatgaaatgggcaagctgaacatgacgcgccggtctttcgtcaagaccgccgccgtgtctgccgccgtggctgccgttgccggtgccgccagccccaccgctgctctcgccgagaacgagaacgccgccgccaccgaatcggcggtcacgcgcatccgctcctgctgccgcggctgcggcaaggtggagtgcggcgtgtgggtgtacgtgcaggacggcaaggtcattcgcaccgagggcgacgaggactgcttcctcaccatgggcaaccactgctccaagggccaggcgtccattcaggcggcctaccaccccgaccgcatcaagtaccccatgaagcgcacgaaccccaagggcgacgacgatcccggctgggtgcgcatttcctgggacgaggcctaccagaccatcgccgacaacattctggagatcaccgagaagtacggcaacgagtccaccttcacctggtgcggcaccggccgccagtggtgcatgcagtccgacgccggcatggcgctgcttctgttcggcacgccgaacatcgtggccgcctaccaggtgtgcaagggcccgcgccacttcgccagccgtatcgacaacgtgcaggcctggtcgtggtccgagctgatcaaccactccacgaagttcgtgcagtgggccaccgagcagtcgcagtcgaactacgacgacgccgcccgcaccgtggtggacgtcgcccgttgcgccgacgccttcatctcggtggacccgcgccagacgaacctgggacgtaccgccaagtactggctgccgctgcgccccggcaccgacaacgcgctggcgctcggctggtgccacctcatcctgaagaacgacctgtgcgactggcagttcctgaaacgttggtcgaactcgccgttcatcgtggtgccggacatggacccgactggctacgaggagcatgtgcagaacggcggctacccctacgcctaccagacccgcctgctcaccgaggccgacatcgacccgaccatggtggactgggagatcgaaggcgacggcgacccgcagcgctacctcgtgttcgaccagctgaacaaccgctggacctactggcaggcgcacccggaggtgggcgaggcccactgggagggcgagaattggcagaagtccacgagctacttcgaccaggatctctcccgtctgcgtgacgacgagtcgaagaagcccggcaaggtgtacgacctctccgagttcaacccgctcatcgacccggccatgtacggcgaattcgacgtgaagctgaaggacggcaccacccataagggacgccctgtgtgggatatttgggccgagtacctggagggcttcacccccgagaaggtgagcgagatcaccgaggtggacgcgcagctgctgaccgacgcctgcctggagtgggccacccgcgacgatccgcgcatccccaacggcggcatcaactacggcctggccatcgagcatcacggcatgtccacgcagaactgtcgcgccatcatggccgcctgcgccatggtgggcgccatcgacacccccggcggccagcgcggcgctaccaacggctggaccacccagtcgggcccgacgtccatgtatcccggcgccgacggcggctcgaaccccgcctcgtttgtgcgcgcgccgttcttcgggctgtacaaccgcatcgccggctacgagaagttccccatgctgtactggtacgccgtgtgggccgactgcaactcggtcatggagtacatgcaccgcgatgcgaacgccccctacgagattcacgcgggcatgatcggctccggcgaccatatgaacatggccaacgccagctacaactgggaggccctgctcatgctggacttcctcttcgaggcgaacctgtggcattcgcccacctcgggcgcggccgacatccttttgccggtgtgccactggaccgagatgaacgcccagcgcatcgcccagggctccggcggctccttcagcctgtgcgtgcgcgccgtcgaccctccgggagagtgcaagagcgatcctttgtacttcctggagctcggcccctacttcggcgtgcccttctccaccgatccggaggatccctactgggagaagaagtcggccgagaccggcaagtctgtggacctgctcgccctggagtacgagtgcctcgacgccgagcacggcggcggctgcgccccctacgactcctgggacgatttcgtggccgcctatcaggagcacggcacctggaacatgaaggaagtgttcccggacgactggggttcctaccgccgcttcgagatcggccaggcctaccgcaaggcgccccatcagcagccgacgaagctggacatcaacatccccggcttccccacgccgaccatgaagcacgagctgtgggccaccaccatcgagtcccacttccccgagggctccgacggccccgaggtgacgccgggcttccacaccgaggcgctgccctactacgtggagggtatccactcccgggtgcgcgatgccgagacctacgaggagtacccgattctctgcattaccggccgccgcatccccgtgtacttccacagcgagcatcgccagctgccgtggtgccgcgagctgtggccggtgccccgcatggagatcaacccggagacagccgccgaactcggtctggagcagggcgattgggcctggatcgagagcccctggggcaaggtgcgccagaccgtggacctctactacggcatcgcgcccggcaccatcaactgcgagcaccagtggtggtacccggagctggcccaggccgacaagggcttcaaactgtcctgcatcaactgcatcgtcgaccgcacggcccaggacaagtacaacggctcgtccacggtgcgcggctatccggtgaaggtgtacaaggccacgcccgagaacagccccttcggcaaccccgtgccctgcggcaacgacggcaccgagatcatccacgactcgtccgatccgcgcctgaagctgtgggccatcggcgccgagggcattcaccccgacaagttcgacgcgtaagagaaaggagtgggagaaatgacacagcttgctatttgcactgacctcgaccgttgcgtcggatgtttggcctgcagcgtgtcctgcaaagtggtcaacggcgtgcccatcggcaacttctggaacaagaccctgcgcgtgggccccacccccaaagagggcggttccggccagtttccggatgtcgaaacctactttttgaacgtgcagtgccagcactgcgagaacccccagtgcgtgtcggtgtgtcccaccgaggcgtcgcacaagttgcccgacggcaccattcagattgacaaatcgaagtgcatcggctgtcagttctgcgtcatgagctgcccctacggcgtgcgctacctcaacgaggaagagggcgtcgtggagaagtgcaccctctgccagcagcgcacggcccagggcgagctgccccagtgcgtgagccagtgctgcggcatggcccgctggtacggcgacgccgagcagggtatcgagtccttcgagggcccgcgcggcgagcggctgggcgacttcgtgaacgacttcaccgaggatcaggtgtacaagctcaccgacgtgggcaacggaccgagcatgttctacatcatgcgcaacatcaagtggcagggggtcgagtagcccatggaaattcaaatcccgctcgtcatcttcacgagctttctggcctgggccgcgggcatcttcggcacccagtgcatcctcgcgctgcagaagcgcggcggcgcggtacagctgccggcgctcatctgctcggctgtggtgctcgtggtgggcggcattgccgtcgtgttccatctgacccacccgttcaacctgttcaacgggttcgggcacatcacctcgggcatcacccaggagctcatcgccattgtgcttctggcggtggccatggtgctgttcttcctgatgctgcgccgctccgaggatgatacggtgccccagtggctggccgtggtgggcctcgtgctggtgtgcgtgctcatcgtggccatgggccacagctacatgatgccgtcgctgcccgcctgggacacggtgctgcagctgctgtcgctgctcggtgcggcctgcgtcatgggcccggccaccgtggccttcatcggcgccgcgcgtggcattgaaatcgagggtatcgggcttctcgcggtcatcggcgcagcggtaaacgccgtgctttcggtggcctacatgttcgccatggaggcctcgagcgccaccttccagtccttccagtactacttcgacccgacgcacccgaatgtggccatggccaacccggccaacgtgtccctgttcacgggcgactcgatgacggcgcttgtgattgcggtcattgcgctggtggtcgcgcttatcggcgcgcttgcgggcaagaagcagggcgcgtggaaagtttggggtgcggtggtcgccatcgccggtttggtgtgcgccgtggctctgcgcgtcatgatgtacaccatgggagagaccctgttcatgctgtactagcgggcttcggggaagccgccgatgcgagcctccccacccttcgagaaatgagacaaggaggttctcatgcgaggaatatacaagcgggccgcactcgcgcttgccgctggagcgctcgtggtaggcctcgccgggtgcgccgcggagagcgcgccggtgagcgacccttccaagggcgataacacccaactggcctataccggcgccgaatccgccgacgagcagagcttcgataccgtcacgttcggcagctatcagggtcaggacatcacctggctcaagctcgccgaggagaacggcaagacgctgctgatcagcgaacaggtgctggacgccgtgcccta

SEQ ID NO: 10572 - DNA, 14174 bp, Unknown
  gut microbiota DNA sequence
cacgcccccagaaggacattgagtgggcgacgagctcgatccgcacgtggctgaacggcgagttcttgaaggccgccttcagcgccgatgagcagggtgccattgccgccacgacgctgaccgatgcgaagaacaacgtgtcccacacggcggccacggcggctgacccgtcggtgcatgcggccgaggagacgactgatcaggtctttctgctgagcctggccgaggcgaagcagtacttcgccaacaacgctgctcgtgtggcccatcctaccgactacgccgtgagacagggcgtgtatgtgggcgtggcgagcaacgacgagcagcccgacggcgcggcggcctggtggctgcgttccaacggctactatgccggctacgcctcggtggtgaccgacgacggctatgtgcacggcgacggctaccgcatggccggcgagctgcacgacggcttcgacgaccacggctccgagcttaagagcacgctcggcggcaacgtgggtgtgcgtcccgccatctgggtggagacgagcgcgctttcctagaagcgcttttggatggggcagttcgcttgtcgtattgccccatcccatcgattgattcgatttggattgatgcggttgtggctcgccgagggcgggctacggggtaccgctcagtcgctcagacagtcctcgctcggcgaaacaggacatttagtcctgtttcgttcgctgcggaactcgcttggtgagcaataccccgtatcccgctacgctcaactctagtcgcggcaatgtcaaagcgaatccgagctaatcgaagagaagactcgagaaggaggacaagcatggctggaggaaattcgctgacgcggcgcacgctgtgtatcggcgtgggcgccaccgtggccatggccgggctgggcgcgctgcgctatgtgggcagcgagccgctcgtgcggccgccgggagggcaggacgaggagaatctggtttcccgctgtgtgcactgctaccgctgcatcgaggcgtgccccgagaaggtgatcgtggctgcctctcttgatgcgggcgtactgaatatgcgcacgccgcgcatggagttctccgactgctaccccggtcagctggacgattttcgctattgcgatttctgcgccgagcgcaacgggggcgtgccgctgtgcgccgctgcctgcccctcgggggccctgacactgccggtcgattacgcccccgaaaccgaggtcatcggcgtggcggtgctgaacaccgagacgtgcatcgcctatcgcagcagcttctgcgccttctgccatgacgtgtgcatccaggtgcgcggcgaggaagacgcggctatctattaccagaacgccgacgcgaccgacgctttggacacgcggctgcccgtggtggatccgacgaagtgcaacggttgcggcgcctgcgaggccgtgtgcgtgtcggcccaggccggttccactatgaacgcctcggaacgcgccattgtcgtgaagccgctggaagggtaggggatcgtcatgaagttcaagaatgcgcgcaccgccgtggccgccgttgccttcgcggcgctggctttctgtctcattgtcggcgtggccgcgggaacctggtgcgggttcggggcgaacgacatcgcggttctgtgcccggtgggcgcgctgctttccatggtggccgccaagacgctcgtcccgcgcgccgttatcagcgtagtggtgaccgtggccctcgtgctgcttctgggccgtttgttctgcggctgggcttgtccggtgaccctggggcgccgggtgaaggagttcttcaagcccgtgaagaagcgcgagcgggagacggaggccctcgcgcaagcgaaccaggccctcgctgccgaggagattgcggcgctcaaagaggcatcgtcgggtcacgactgcgccgcctgtggggcctgccatgccaagcgcaacgcgcccctggactcgcgtcatgcggtgcttggcggcgcgctgctgacgacggccgtgttcgggttccccgtgttctgcctcgtctgccccgtggggctctccttcgcggccgtggccctgttggtgagcttgttcggctcgggcgatttgaactggtcgctgctgttcgtgccggtcatgctcgtcatcgagctggtattcctgcgcaagtggtgcggccgcttctgtcccatctcggcgttcatgagcctcttctcccgcttcagtcgcacgggcatgccggtcatcgacaacgagcgctgcctggaaacagccaagggcaccccttgcagccgctgcgccacggcctgcaccttcgatgtgaacctgcgtcatcccgatttgggcgagctgcccctgcacgactgcgcccgctgcggcgactgcatcgacgcgtgccccacgagcgccatttccttccgcgccgtcagcggcaagcctgttcccttcgtcgacgccttcgcctcggtgcgctccggtggcaaggcgaagacgcccgccgcgccggctttggacgattttgagccagaagaagcataaggcggtaggggcccacggctcgcgccatctattcgaaacctgtgatttttatcaggggcggctttcgggccgcccctgcttttgcggacgagtatcatggaaaggctggcaaagtccgaacgtgggcggcgcttcgagagaggagtcgcctatggggataatcctggaagctcttaacgtgctggcgatggtttcgaccatcgccgctttcatacttgaggtatggaaaacatggagggaggataagcgcgaggatgccgcggggaaagaaaataggggctagctggcactaacccctatcaccaaacctgcgccgcccgacccgcctatggtcgctcgggctttgccggtgcctgtagtatatcatggtcgcattcgaagagaaagcagtgccactgatggtcaacaagacgttcatccccgaaggcgaggcggtcccggcctcgcagattggcgcgacgctggaggcgctcgccgccactatcgccgcgcgtcgcgacgccgacgaggcgagctacacctaccggcttctgacgggcaacgtcgacgatgtgctgaagaaagtcatggaagaatccggggaagtggctctggccgccaaggatgtggaaggttgggcgacctcctcgctcgcggccgccgtggcgctggaagctgctagtgccggggctggcgatgcggtctccgacgccgaagctgccgatgggggtgccggcgctcctctttccgtccagctgcccccggagtacggcgaggcggtcgatcatttgcgctacgaggccgccgatgtggtgtatcatcttctcgtcgtgctggagcgctacggcatcacgctcgacgagttcgctgccgagctgaacaatcgcatgaccgaaggagagcggccgcacggcgccgttcgcttgcacgacgagttcgtgcgccgcggaaagtagcgttcagctgcaggtcttgtgcggggaagagacggaaatctcgcggcagcctgagcgagcgaaacgatatgaagaacttcggtggagcccccgagttgaaggaaagaaggatttcatggcccgactgtttggaactgatggcgtgcgcggcatcgcaaatgtgaagctgacctgcgagatggcctatcgtctcggccaggccgccgccatctaccttggcaagaccatcgttgtgggtcgcgacacgcgccgctccggcgacatgctgggcgcggccctttccgcgggcatcatgagcgcgggcggtaccgtgctcgaggccggtatcattcccacgccgggcgtggccctgctcgtgcgcgagatgcgcgcggcgggcggcgcggtcatctccgcctctcacaatccgccggagtacaacggcatcaagttcttcgatgctcagggcttcaagctgcccgacgccgtggaagacgagatcgaggccttcatcgtcaacggtggcttggaaggcgaggtcgctgccgccgaggaggccgcctggagcgccgctcaagctgctgcgcccgatgctcccgccgatgcgacgagctatctggcctccgagatcaagatgcctgctggtgccgaggtgggcgtggtcattccgctggaaaacgcttgcgacatttacatcgaccacgcggctcgttccatcgaggatcagggcatttccttcaagggcctgcgcatcgctttggatacgggccacggtgcttcctcgctcacgtccccggaggctctgcgacgcttgggcgccgaggtgatcgtcatcaacgatgatttcgatggcatggacatcaacgtgcagtgcggctccactcatctcgagcccctgcgcgcgcttatggccgagacgggtgccgacgtgggtattgcgcatgatggcgatgccgaccgcgtcatgctcatggcgcccgatggcaccgagatcgacggcgatatggtggaagcggtctgcgcgctcgatatgcgcgagcgcggcgtgctggccggtgacacggttgtgtccacggtgatgtgcaacttcggtttcgtgcgcgccatgaaagaggtgggcatcaacgtggtgcagaccaaggtaggcgaccgatacgttctggaggctatgcgcgagcacggctactccatcggtggcgagcagtctggccacatgattctgctcgatcacaactccacgggcgacggcctcatgacggcctgccagttcttggcggcggtcatccgttccggcaagcccgtggccgaggcgattcaggtcatggagaagatgccgcagaccctgattaacgtgcgcgtgaacgacaagcatgccgtggaggacagcgccgaggtggccgctgctgtggcctctgctgaggaggcgctcggcgaggacggtcgcgtgcttctgcgcccgagtggcaccgagccggtggtgcgcgtgatggtggaggcagttgatccggccgccgcgcaagcgcacgccgaggccatcgccgccgtagtggaagcctgtgtgtaaggcgaaggcgaccgacaggccctgttttcgagaacaatgcagtaaatgccagttcgaccccgtaatggtaagagtgtcagtcccgtttcttaccaaagcgaggtcgaactggcattttcgcccctcaatcgtctccccttcttgccaaagcggggtcgaactggcatttacttgggagatttcgaaaatgattttgctcgtcggaatcataaggctcgctcgattatgttcttctataagcgaatagctcattgatttcgctttggcaacagaacgcggcatcgctgttaacctggggttatttacaaggagtcaccgttacactgtcgttatttcttggtagtgatcggcgcaagagctttctgtcctcggtcctgctttatctgctgccgaaaggacgggcgacatgaaaacgcgaacccttgctcctggggcctatctggcgagaagcggccagggcgtctcgctgtacgacgccgacggcaagtgctttgccatgaataagatgggcggctccattctcgctttggccctcacgggcctttccgctgagggcatcgccgatgcgttgcgtcattatttcaacgggactcccacccagtcccgcgacgaggtggcggcatggctcgacgaaatggaagcgagcggtttcctgaattcctagcagttggccaccgacattgttgccccatgtcggccattgctcaaaagtatgcaggattttgcgattaggagagccatgcacgccctttcagtcgctgcaggctctccctatcgcaaaatcctgcacaaatggcgcgctgaggctctccctatcgcaaaatcctgcacaaaagagccccaacggttgacgtggcaagtcattgggccgcggtatacaaaggatatccgtaataagccaaaaacgaatttgcttacctgggctgccatagcggccttgctcgtcggggctgccgtgacgacttgccctgcttggcaccacgctttttaaggatgagggcaacaatcatgaatgggagattcgtaaggtttctcaaaagcgatgatagtattaaccgcattacgctaaagttcgctcaatgaaagtatacctcagccatatcacggcctacgcttctggcgcgcatggtctatcctgcgccctctcacgttgcaggagtttcacagtacagggaaagtggcggacgccaatctgttcccttcgaacatctatcagacttcagcggtgctgcgagattgcgctataagggaatgcgacatccatggtctttttgacgagctgcctgagatgcccgaactgcgcttttgcctcaaagactgcactgacggacttggcgcgaaaccatggcatatcctgcatgatggtaaagagggtacgaaaagttcgatgcttgctgagcgtcatcgcagcctcctgaattatccaagagggtctttcgtgcgcatcgctgaggggttattcgtctgttcgccagagcttgtgttcgttcaaatggcctcctgcctttctttcggtgagttgcttgcccttggctatgagctctgtgggtgctatccgcgatcaacgcaaaagagtgttccgctggtgcgtcgtcctcttaccacgccgaaccgcctgatggcttacgcagcgcgtctgaatggtgcaaagggtgcaaagctcgcgagagcggttgcaaagcaggtgcgggcaaaatcgggatccgtgatggaaaccgagcttgccgccattgcgtttacggcggaggtttacgggggtctcggtattgccgaagcgctcatcaacgcccccgttgccttgtcggaggaggcgcgccgggttgctcgtaccgattgggttgtgctcgatttttactggcccaaggcgcatttcggcattgaatacaatgggcgtactgcccatgcgagcgccgatcagcaggatcgcgattctcgcaagcgggatggacttatggttgacggcatcgagacagctacgatgacgaattcccagtttcagaatgtgacggaatgcacggctcttctcgatagggtatccggccgtgcgggaaagaagcgtcggaagcgcagggctgctcatgcggatgcccatcgaaagttgagacgccaggtaagcaaaattccaccagcagcattttcctttctaagccgacgctgcacgagtcggctgccctccctccctcttcgcctttctaggttgtgcgcctgccttccgtacgcggcaggcacctttcgtgatgcggtgagcgagagctcgagcgggtgtaggactatgcgctgctctggcctcgaacttccttttttgctggacgaatcttcttttgctctttttgctggatgcgcgaggccttgaatttgtgcaggattttgcgatagagagagccgccgagggctggctggcgattcaaagctctcctgatcgcaaaatcctgcacaaatggcgctcgggggactctcttaatcgcaaaatcctgcacgaaaagaggaggagcgcgtgcgagatttgtccctctggccagaacctgcttgttcgcgccgcgcctttcgctatgatggaaggcacggaaattcaaggaggacgctgtgacgacaagagacgacaacatcgttgcggaggaagcgcgggccatcgaggtcggtgaggagacgggtgcgggagcgccgggcgcatcgggtggctcgggccgtgggcgccgcgatacctgggccacgcataccggcttcatcctcgcctgcgttggcagcgccgtgggcatggccaacatttggctgtttccctatcgcgtggctcagctgggcggcgcggccttcctcatcccgtacctcattttcgtggcgctgctgggctttacgggcgtgattggagaaatgtccttcggtcgggctatgggcgctggccccatgggcgcattcggccgcgccatggagatgcgcggtgggcggcacggcgagcgcatcggtaagatcatcggcctcgttcccaccttgggatcgctcgccattgccatcgggtacgccgtggtgctcggctgggcgtgcaactactttgtggcttcgcttgacggcgagcttatggcgcagacggatatgggcgcctttttcggggccatcgcgtcggacttcggcaacgtgggcttccacctgctgggcttggcgctcaccttcggcattatggttctgggcatctcccgcggcatcgagcgcgtgaacaaggtgctcatgcccacgttcttcgtgctgttcgtcatcatcgccatccgcgtggccacactgcccggtgcggcagctggctacgagtatctgctcgtgtcccgctgggaggcgttgctgaaccccactacctgggtgtacgctctgggccaggcattcttcagcctatcgcttgccgggtgcggcacgctcgtctacggtagttacctcaagcgagatgtggacgtggtggacgccgccaagaacgtcgccattttcgataccatcgccgggcttgtggccgcctgcgtcgtggtgccggcggtgttcgcctttgggctggacgtgtcttccgggccgccgcttctgttcatcacgctggcccaggtcttccaggagatgcccttcggtaacattttcgctgtcatcttgttcgcggcggtggtgttcgctgccatcacgagccttatgaacttgttcgaggcgccggtggaggcgctgcaggcccagctggggctgtcgcgcgcggtgtcggtgggcatcgtggccgtgatcgccgtggccgtgggcctgttcctggaaaacggcagctcggtgagcgactggatggacgtcatctccatctacgtcatccccgtcggcgcgtttctggcggccgtcatgttcttctgggtatgccctcgcggcttcgcgaagaagcaggccgagatgggccgcaaaaagccgctcggccgctggttcgatttcatgacccgctacgttttcgtcatcatcaccgcgctcgtcatcgtgcttggcatcttctacggcggcatcgggtaggccagggtggcgatggagaggaggcgcctttacagcgcaggagggtttgggctgctcttcgccgtttatgtcggcatgatcgggcacccgggcgaatcggcgggggagttcttcttcggctcttcgctcggcattgcttgcgccggagtgctcgctgctgcggcggggctcgccctgcagcgcggaagagtctcgcgtctttccgatcgcttcatgtccctgcttgtattggtgttgggcttcgggatcgctttagtgggggcgatccttcgttttctcggagcgcttggctatgcggccgcaccttctctatctggcattctcttcggtgccgggtgcttgtttctggcccttgtgtggacgaggatttatgcggcctatcatttcattgaggccctgcgccgtggatcccttgcgttgctctgcagcgtcttcttctctctggtcatgagcttcgttccgaacgcggcggtggtcgatgggtgctacgtggcagccctgtgcttctcgctgccctttgctctgtacgaacttttgcgcatccagggtctcgaccggccgacggccgatgtcgctcgcgaggggggcgtgcgcgcccgcttcgcctcgcttgcgaaaactgcctggggccctttgtgcggcttgggcatttgttcctttcttctcggctcgctttggatgcaggcgtttcccctggctggaagttcggtgcagggcggcggacccgcgagactcccttccgtgggtcctcttgttgccatggggcttatcggtttcgccacttctcgcattacttcctacgatcaggcacggaagctcttttgggttgtcatgcccattacggccgctatcttcctaataacgccttccttggaagaggtgacgctgccttattggaacctgcttgtctcgaatcttcaaaacggcggttcgatttgcatggtgttctgcacctgggcactgctgctcctcggctcgcgcaccaacgggttttccgttgaggtggtcttcggtgccagccttgctttggtggcggcgctttccattctcggagccttcacttttgaggcgctcggtcaaggcggaaatgtcgtgacggtggtaatgttcattctctacatgggtgcggtcatcctctttctcgcgtggggcggtgcggaagatcgcgcttccaccacccaagcacgcgacttcttcgaagcgttcatccagtcccgctgcaacaagctggctgccgcacacggcctcactccgcgagagactgagctgctcgcactcctcgggcgcggccacggctacgcctacattgccgagagcctttacatctctgagaccacggtgcgcacccatgcgcgcaacatctaccacaaactgggaatcgcgtcccaagaagagctgcttagccttatcgaccatacggaacttggtgaagagcattaggtgtttccccggttcacagttgtctcaacaatttgttgaggcgaagaagcttttatttacccaccttgttgattgtattttgaggctttgagagccatggtgcgaggtgcccgcagaaagcggggtatccgccgatcaaggagggacggaacatggagaatcaagagcaagcgagaaaggttgttggaggtgcgggcatcgatcgccgcgacttcctcaagggtgcagctgtgagtggggccgcggccctggctgccggggccctggccggctgcgcgccgcagggcggtaccgagacgaccgccgacgatcttgccgccacgggaacgggtggggagagcgaatggggcaccttcgacgagaacggaaagttcaccccttcgtttttggccgatccggagcccattcccgatgatgccatcgtcgaggagttcgatgcggagatcgttgtggtcggtttcgggctgacgggcctgtctgcggcccgcgaggccatggaagagggtgccgacgtgttcgtcatcgagaagggcgatacccaccacgtgcactcgcatcagttccacgccatcaacgcccaggctcagaaggatgccggttacgaggtgtcggaagaggagattgatgctctggtggatcgcgtgatgagcgatcaccgcgagcgtgtcgaccgccgcatgtggtcctacctgctgcaccattgcggcgaggacttcgattggtacctttcggcctgcccccacaccatcgtgaacccaaacgagaccgtgggcgaaaccgagctggacgcctatgcgctcatcaacaactgcacggccggcctggccgccattgtgggtcgctacttcgatgacgtgagcgaagagcgcatggaagccgtgcgtgcgggggagccctatgtggtgcccttcaacaagccgctgaaccccaactgggattttgccgacgagcgctacccgatgtccgccggggtcgtgcaggtggagcccactcacgccaaggtgggcgaggccgtggccaagatggtggaagaaggcgcgcgagtcaactacgcctgctgggcgcggcgtctcgtgcaggacgacacggggcgtgtgaccggtgtcatctacgctgatatcgacgacaacctgtacaaggtgaacgcttccaagggcgtcatcctggccacaggtgactacggcggaaaccagcagatgatccagtattacatgccgcgcgtgttggaggacggcgaatggctcggctggcccgacaccgacgccaaaggtgatgtcaccaacatcggcgagggcctgcagatggcccattgggtcggggcacgtaccgattattgccacgcgttccccaacgaccattacggcggatccctcggctgcgatccgatgctcttcgtggacggctccggtgagcgcttcatgaacgaagacgtgaccggcgaggtgctgggtgagaaggtcacgcgcgtgaacggccgctgcatctggcaggtcttcgacgacaactacccggatcagatctcgcacatgcccgtcggccatcgctgctactggcaagtggtggacaacttcgacgacattcccatgggcctgttccttgatcccatcggcatgatcacccgcagcgaggtggagatgatgacgccgtgcatctgcgacaccattgaagagcttgccgccgccatggaagtgcccgccgatacgctgaaggccacgattgaccgctacaacgagctgtgcgagaagggcgttgacgaggacttcggcaagtgcgccgaccgtatggcgccggtgaagcagccgccgttctacgcggcgaagatgccgacgctgggctaccagacgttctatggcagcgtgtgctgcgactacaacatgcacgcggtggacatggacaatcggcccattcccggtctgtatgtcggcggtacgatcatgggtagccgcttctggcacatctacccgaacacgaccatgggcatgaaccacgcaggcgccctgtgctacggacgcttggccgctaagaacgccgtggccggcatctaagccattcccgcggaatcccccccctccgcacgagcggccccgaatctttcggggccgctcgtgcggagggggaacgagtccgatggggccagccacagcgtgggagacggctgctgatcccggcttgcgggatgtgctacgatacctccagaccggggaggctttggggccgttgtcggaagagatcgacgctctggttgatacgttcaacaaggatcgagagtgggtgaatcgcgtgctgacctacgagcaggaaactgagatgcgctgccgtcgggccagagaggaagctcttgagcagggcatcgagcagggcatcgagcagggcatcgagcagggcatggatcgcctaggaaccctcattggccgtcttattgacgcggggcgcctcgacgacgccaaacgcgtctctgaggatgccgcctaccgcgacaagctgctttcggagttcagactgcagggctgaggcgagatattgagaaatcgcaataacttggcaatatctcagatatgggatttggaaggtggcgagcgcgggattcctcttatcttcgggcaatagtttggaaggaggggaatcatgataggtctcgatgcgtcattggcaaggacgggaatgaatatggacacttcgctgaagaagctgtcgttgctcgtgctaccatagagccagcttgaagtacatagcctgccgccgggtaggcgtgaagcgctcgcagcgcggacatcgttaggcctttgaagatgttcgccccgcgggcgctttttgtttaggccgccttgggcgttcgtgcggagatctttcgactacggccttcggccttcgctcaagatgacatgggggggggtcggccttcggccttcgctcaagatgacacgtccggcggcgcgagaagaaaggaagacctatgaagcagttcgtgacggaagagtcgttctgggagctgttccccgaggcccagatcggcatcgtggtggcccacaacatgaagccgactgccgaggtggcgcccgcggatgccgccgccattgcgcgtgccctcgccgaggccaacggcaaggccgatcagcatctggagagcaacaccatctcgcagaacgaggtcgtagctgtttggcgcgaggcctatcagaaattcaagacgaagaagggtgcgcgctgctccatcgagaacctgctcaagcgcgtgctgaagggcaatcccgtggggtccatcacgccgtcggtggacatctacaacacggtgtcgctcacccacgcactgcccgtgggcggcgagggcatcgatgccatggacggcgatatccgcctcggcatcaccgagggcggcgatgcgttccgtccgctcggcgaggaggagaacgcccccacgctggagggcgagctgtgctaccgcgacgacgccggcgccatctgccgctgctggaactggcgcgacggcgagcgcacggccctgaccgacgactcgaagaaggccttcctcatcatcgagtccgtggatccggaccgcgccgacgacctcgccgccgccaccgatcagctggccgccatggtgcagcagtacctgggcgccgacatcttcgccaagcagatcatcgctcgcgacaacccgaccatggtgatcgacgaatagcgcgagtgcgcagagaagcgaagacgcggg

SEQ ID NO: 10573 - DNA, 87544 bp, Unknown
  gut microbiota DNA sequence
ttgccttggggaagtcggagggcttcacccacatcggccccaccatcgtgtttgtcgtggccctggtgctttctatgctggggctttccttcgctgtgaagacgctgccgacgggcactgcctatgccgtgtgggtgggcatcggcgcggccctcacggtcatctacggcatggtcacgggttcggagcccgcaaacctcgcccgcatcctgctcatcgccggcctcgtcggctgcgtcatcggcctcaaactcgtcgacggcgcaactgattaaacaattacacttccattattcaacctttacaccttcgcttttcaacctttataatgtgtaaagctgaaaggtgggttggaatggtggatggaatcagcattcgcgaggcagcttccgagctgggcgtttccgtgcagacggtgcataatcgcatcaagagcggcgcgcttgacggcgaaaaaacgaataccggctggcgggtaagcgcacgttcggtggaggctgccaaaaagacgccgccaagaaaaggtcgtccttggcacggggagacgtatctcctgatgaacggtccctacgaggtgatgacattcgcctatcgtcgcgaaacggactcgttcgctccaggtgaggtcgtcgatgccgaacgcgccccgttgggaacggtgacgcgagaggggcgaggaaaggcgtccggcctcaagacgtggtggcagcatcgcagcattcctggttcccgtgcggggatggatgagaagctgcgcagtctcggcctcgaggagccctcccagatcccctttcgcaatctggggctttcgctttctgatcaatattggattcgccccgccgatcatgctctgcgctgggaggacgtcaactactttcagaacgatttcgggggcgctgagggcgattgggacgagtggctggccgaggtggggctctcgtcgccggacaacacttccgagggcgttcttccgaaacggtggctctgccggggaaatgagcgaattctgctgaagggtcatatcccctggactgaccagcaggtttacaacgaggccgtggcgaccgctcttcatgggcgcctcctcgctccaggcgattatgttccctatgaagttcagcacacggaggccttgggtgtggtgagcgcatgcccctgcttcctgtcgctgcatgaggagtacgtgcccatgagcttggttctggaagccgaacgccgcagaaagggcgagacgccttatgacaccgtggtacgcgcttgcgtaaaccggggcattccgttgaaaaccgctgaaacgcagcttgcgaaaatgatcgtgtgcgatagcgtcatggccaacaccgatcgccatctgcgcaacttcgggcttgtgcggaacatcgatgatcttcgttggcggtttgcgccgatcttcgacacgggaaacagcctgtggtgcgacaaggacgaaggtgctgtcgctcggggcgactacgcgttctcgtcacacccgttcagcgatatgccgaatcgccagctcatgtacgcggcggaactgggctggttcgatgcgaggaaactggaaggctttgctgacgaggcctgcgagattctggccgaaggggatctgtgccgctggcgcctcgactacctgcgcgagggcatctgccggcgcatcggtgctgtgcgggggctgcttgtctaagtgcgggggcaaagtcttagctatgcttcgcccagaaggcgtcgaaggcgtccatgagttccatccgtgaatggacattcgccttctgatagatattgtagacgtgtgcccgtacggtggactcggcaacaaaaagcctctctgcaacgtaggaggtcgttctgccggcgatgaggtagtcgaacacttcggtctctcgcttcgacagcttgcactcagctgcgaaggatgccaaggcagtgcttttgtcgggccgcaagtcgcgatcctcgctgatggcgcggtcgtccgcgatggaaaccaagggcatgcgatcgcgatcagtaaacacgagagttgcagtgatcaatacgatagtcatgccaaaaacagccaaggtagcaacggagacgctcccagagaaaaagcctgcggtccagccggcgagcatccccacggaaatggcgagccttcctatcgccatggttcggaagagtgacgcgtcgtttgccttgacaatgttgcagtagtcgttcagggcaagtacctcgaacagaagatagcctatcatcgccatcccctcgcccgcgatggactctccccccgagatggccagaagcgcgaagcccaggcccatggagggggcgacggcccgatagagcacatagggcttagcggcgtccttcgcgaattgggcatacaggatgtagacgcctgctagcaccacaatgcagacaggttccgcaagatagctggctggcagtgcgaagctgccggagaatgccatggccgcaagcagcgagaaggcgagggagtagcagacgagcgccagcgtcatcttaagagcggggatgctcttggtgacgttgcggatggatgtttcctcggacagagcttcatccttcagtggctcggtactttcgttgtcgaaaagagcagtgcctcctcgccgtgaaatgagacgactcgagaaaacgagcgcggcggcagacagcagggggaagacgatgctggcgcccaagagggttcgctcaccgcccatcagagcgacaagaaacagaagcgcgcccacgccgtaggatatgaccagcaaggtgagggtgtcgccgagtctcatggcgccgaaaaaactgagccacattaaaaagagtgacacctcggtcatggcagtcagcaaagcagcgacgctgtgggcctcctcacttccgccccaaaggaggaggggggtaacggcgatgcccgcgacggctcctagggcaaggaagcagtacttaccgcgatcggtggcgataacgcatgagagcgtcagcgagatggcgagcatagcgcagcgcatgagaagctcgaagagctcaaaggggatgccgcccacgcaaagggggctgccgaacagaggcgagggagaaaggccggcgatgaacagccaggcccaaaagaagccgaatcccaaaaaccttacagggaacaccccttcttcaagcagcttcattgccccttctctctctcgggcctttttaccatgggtctattataaggggcaaggtgtcgccacctagctctcatttgacccgtttgtgcagcgtttaatgtctgatcagggagaatagaaaaaaataagcggaattacttaggtcggaatcgctgaaaaccctgcgttttgacgaatggtaagcaaggctaatcccatcgtaaggtggtctcgttgcatggttgcgcccagttgggcggcacaagagcaaggagaccatcatggaagacgcaccggaattgttcgtcacgcccgaatccgagcaatctgaagcggtggcggtgtcagggaatgtccaggcactgctcgaccttatggcgcgcaatcctctgcatcgggagatctatctccagattatcgagttctgcgaagtgcgccgtctcttgggagatgtcgaagccatggtggccgactgctcggggttctcacttacggcgcagacgcccttccggcttatcgcgaatgttgtggacaacggaggcatccattggtacgaggtggatgcacaaggcgatgagatcacggaggagcgcagggcgaatttaacggacgatgaagccgacgatcttgtcgagggttttgccctcgaagcttccgatgcgggacgtgaggtcttggagcgcatggctcccgaacgtcgtttgcgtgacctgttcgacaaggcgcccggccgccttagcacctatctggacattatcgatttctgcggtgagccccaaacgttcaaggccatcgaggcgctcgtccaccaaaccgacgccggggctcttatcggcgcgtcgggccagccgctgcagccgagctatttcgtggacatgctggaacgctccggcggcctggtatgggataagggatggaaggcgacagggaaggggagtgcgcttgcgaagcaattgcggcccgcgctggccgtttagaacttggtaaatgaccggaagagagaaagcgagaggagaaacgatgacgaatatggcgatcacgcggcgtggcttcatgaaagccgccgcgaccgctacggcggctctgggcgttgctggcgcgcctgtcctgctcgacgaggttgatcaggcctttgccgacagtatccccaagcgcgagaagcacaagacggcgtgccatggctgtaccaactgctgccccgtttgcgtgtacaccgaagacggtgtggtggtgaagattgaaggagaccccgacggcccgctcaacaagggcggtgtgtgcctgaagtgcctctcccaaattcagacggtctacagcccgcgccatgtgttgcatcccatgaagagggtgggcgatcggggccagaaccagtgggaggcgatttcctgggacgaggccaccgaccttgcgggcgagcagattgcaacggctgtcgaaaagtacggcccgtactcctactggagtgctcgcgggggtggcggtgcctatatcgaatgggagacgtggggtctcgactacacgttcggaggctgcaactccctggcctctggtgcctgtcagtgtgctatgccccgagatttcgtttccacgacgtcggttgggttcaactgctgcgtagatatggacaatgtcgatcgctgggtgggcgttgtggacaacgccgagcttgatggcaagcggcgcgacgacaccgagcgcgtattcgtgctgtggggaagccagccccactcctccaaggcggcccatggcggtcatggcctggtagatgcgcgctctaatctcggggtgaaatccgttgtggtcgatccttatctgacggccgaggccgccaaggctgatgtctggctgccggtgcgccccggctccgattgcgccctcatgctctcgtggatccgctacatcatcgaccagaaggcctacgacgagcccttcgtgaagtattggaccaatttgccgttcctcatcaaccccgacacgcgcctggcctaccgggccgaggaggtttggcccgactacgtgaatccggccgccgatccggacgatgtctacgatacgccagcctacgtttgcttcgatgcgcgcacgaacaccatccagccctttcccttcacggccccaggcgacagcccggtcgatccggtcgttttcgctacggcgacggtgaacggaaaagaggctaagacggccggccagatctattgggaagaggccgaaccgtggacgctggaagcggcggccgagacctgctggctgaaacccgagaagatccaagaggccatagagctgtacataaacgccgatttcggcggaatcagcaacggcgtgttctccgatcaccaggagaattcctccacggcccccctgggtgctctggccatcgattccttgctcgggttcgtcgaaacgccactctccgccttccagaaccacggtccggcgagccttacgcccgaccgacccacggtgcgcaccggcgttttctccacgagcttcgagcgctacggattaggctggacgaccggtctcaccaagggcgagaacgatcgtctgctcgacgatatcgtagccggctgggacgccaagggccgcgacggtgaagagatgcgtcgctacttcttccaatcacgctgcgacaccatgggggccaacgcccacaagggcatccaccagtggcagacctgcgctcctcgcgagctgcgagagggcatcaccaccggcgagccctatcgcccgcgcgtcatgtacgagatgtccggcaacaagtacgccgttatggggccggctctcgaatggaagaaggcctacgaccagcaggacttcatcatccagcagtatccgatgatgacctcgttcaccgttcagagcgtggacttgttcctccctacgaccgaatggctggaatacgatagctacgaggcaccggccacacacttcaaccgccattacgcccgctgccaagtaacccacctcggcgagaccgtgaatccgttcgtctccccctaccaggtggcgaaggcggccgttgagaagctcggcgaggataatgtgttcgaccccgatgcctacaagcagcccttcttcgagtcgatcgaagcggcgcgtcaattctgggccgaggacatggggcgcgaaagctggcaggagatgctcgacgacatcgaccatcgctacaccgagacgccggtagaggagtatctggtgtataagcagtacgagggcgtggtctccgacgggctgccccgtgggtttgccactatctcccgcaaggtcgacgtctacagcgaggcgatgatccgcctggcgcgcacgggcttcccctacatgtacccctatgagcagccctcttgtgacgattacgaccctatctgcacgttccacgagccgactgaaagcccgctgaatgatgcggaatacccgctcgtcatcaccaccggccgcctcccgcatttccatcacggcacgatgcgccacgctccttttattcgcgagcttatgcccgcgcccgagctgcgcatcaatccccagaccgctgccgagtacggcatcgagcatctggactgggtcaagataacctcgcgccgcggcagctcccatgcccgtgcctatcttacccagggaattgcccccggcgtgctcattaccgagcgcttctggaatccggagtgttacgactccacccaggagaccatcacgccgggcatcgaggagtgcggctacaacatcatgtccgcagactcattccagaacccttgtttcgccacgaacagctatcgcgcgttcacggtgaaaatcgagaagtgcgatcgcccggagcgcatctgggtggagagcaaggaattcgagccgttcatgccgacgctgcagaacgagcctgtcaccgaggaggtgttctaaatggcgaagggactgctcatcaacctcgaccgctgcacgggctgcgacagctgcatcgtggcctgcaagcttgaaaaccgtctgccgctcgggtcgttctacaacaaggtgatagccatcggcccgactggcactttccccgatgtcgagaagtactggctgccctcgcagtgccagcagtgcgagaaccctcagtgcgtggcagtgtgtcccacgggcgcgagctaccgtgatcccgagacgggctatgtgcttatcgacaaggacaagtgcattggctgccagtactgtctgtacggctgcccctatggcgtgcgtcagatggacgaggagcacggcgtggcccagaagtgcacgctgtgctcgcagatcaccgccgatggcagcgatgtgcccgcctgcgtgcacaattgcaactgcggcgcccgcttctttggcgattacgacgatcccgacagcgacgtttgccgggaaatggcgaagtaccccgaagagtgcattcacgctcttcccgaccccggcaacgccaagccgctcacccgctacatcctgtccccgaagttcgccagttggaaggagctgatctaggtggatatccaatggcccctcgtcctgttctcgctcatcgcggggacgggaggatccctcttcgccttcgtcgccctctccgagcttgtcggcggcaaggacaaaacgcgctttgccgcaacggtgacggtgcttgtgcttatcgtcgtcggcggatgcctttccatgctgcatttggcgtcgccgcagaacgcctttgctgcgctcacgaacatcttttcgttctcgggcatctccattgagctgatgcttctgggtctgacgttcgtcgccgccgcggcctatgcgattgtggtcaagcgagttcgcaatgctgcggcagccaaggtcctcgcgcttgtcggcggcattttgggtttggccctcggctatttctgcggccatggctacgttattgaggcccaaccgacctggatgcacgaatcgttgcccttggcctactttggcacgtcgcttgcttgcggcgcgtttgcctatgacatcatcgcttcgcgcttaggcgatggaaaagaggagctgcgcggccgcatgcccgtagccctcatggtgtgcacgaccgtctccgccgtggcagtggtggcctatgcgggagccctcggcttcgatgcggccatggcccatggcgctgtgttttggggaggagttgtgctctgcggcatcgtcggaaccctgggtgccggtctggtgcgccttgtcggacgtgcggttccggctttgcccgtagacgccatcggcctgatctgcgctttcgtgggcggggtttcgattcgcgtgctcatgtgggtgtgcgccacgggctacctggatctgttcgcccataccgttcccagcgtcatgctgaatctctagaggtctgtcaggcggcctcgtccggggccgcccgttgttggaaggagcgcattgtgaacaccgaagaagctgtctcgctgcttggctccagagctgatttctaccgccagatcgcccaatggtacttcgctccgttgagtgaggagcagatcgaggcgctggccgctcaggatctgcgggctttggcggaagatgaccagtcgtcctacgccgagggctacaacgatttgtaccgagcactgcgcctgcgccatacgggcacccgccaggctctggccgccgatttcacgggcgcgttttatggcgtgaccacggcggagggggagacggcgcaacccttcgagtcgctttaccgctacgacggcggctcgcttatggggcagccgcgcggggaggtgtaccgcgcgctcaaacaggctcgcctcaaggtgcgcgaggggctcgacttgcccgaggaccacctctctttcatcgcggcgttagaggccgagctttgcgaccgggctgcaacgtatctgcgggacggggatgttgcggcggccgctcggacgctttccgaccaacgggcattcttcgatgagcatatcgcttcctggttcggtgattttcgagaccgcgccagcgctatggtgacaacgaggttctaccggggtgttcttaaggtaacagatgcattcttcaacgatgagccgggaatgatggacgaattgctggagtacgtgagctaaaggttctcgcggaaagcagtcgagaggattgcttgtgcgagagacagcgaagggtgtgcagtgccgggggcccgattgcgggactccggcgcctgcaggctctgaagaaaggagacgggagtgaacgagaatgcgagcggtgaagctcctcggtcaacgacttcgtccgatgggcgcgatgcgcggcgagcgataagccgccgccaagcgatcgagggcgccgtggccattggcgtccttgcggctttcggcggtaccgtcaaagcctttgcgggggagggcgacgcgctctatcctccgggagggcaggatacgggaacactctggggcagctgcatccgctgtggccggtgcgtgggcgcctgcccgaccaaagtgatcgtccccgggacgttggatgatggagcggtgaacgcgcgtctgcctcttatggatttccgtttgggcttttgcgacatgtgtgagggctccttccgttgcgccgccaattgccctacgggagctttgcgccccttcgatccctacgtcgacaaaatcggcatggcccgtgtggaagaggccgagtgcgagctgtacggcgtgtcggcgcactgcaatgcgccctgcgtcgatgcgtgcgcctgggacgcgttgacgattgacggcgaggggcgcctcgtcgtcgacgaggagaaatgcaacgggtgcggtgcctgtgagctggcttgcgtagcgggctcctatggttcctatggcggcagcggccttcgtggcatcaatatagtcccttggaaggagggtgagagcgatgagcgtaaatagcgagactcagacgagtggacggccgcggcgcagtcgtgtatcccgagtgcggaaggcagtgctcgcgattgcattcgccttgttctgcgccggggtagtggttgccggaggactgggcgatgcgtgcagcgtgggctacgaggccattgcggcggtgtgccccctcggcgctctcgaagggtttttcggttcctggtcctttgctcctcgcatggccattggtcttgggctcgcgcttgtggtggtcatcgtcgcgggacgcgccttctgctcttggatatgtcccgtcccccctcttcagggattcttgcgcacaaagaagcagcggcatcgcgtcgcggcagagcagaaggctcaggccgaggagtcgcttacgcgatggaagaaggcgtgctcgggttgctccggcggctgcggcgacgtttgcccgagtgctggaaacgcaggaggagacgcgtctttcgaggaggcttcatgggcccgcaagggcgtaaagcttgattcgcgccatgcggtgctggccgggacgctggccacaacggcgctgtgcggatttcccgtcttctgcctcctttgtcccgttgggctcacgttcgccacggtgattgcgttctatcgcttcgtggggttcaatgagccgacgttcgatcttcttgtgttcccggcgatcatcgtggttgagctggttttgctgcgcaagtggtgtcaccgcttttgccccatcggcgctttgatgtccctgttcgctccgttggcgcgtcgcttgcgtccgcaagtgaaggttgatgcgtgcctgcgctcgaccggcgaggattgcgtcgtctgcggctcggtgtgtcccgaaggcatcgatccggtgcgtgatttgggacgccgcccgctctatgaatgcacgcgttgcggccgctgcgccgaagtctgtcccacccaggccatcaccttccggcggcgacgcgcccgctcgaccgatccggtgatgatcgacgacggacaggcggtgcttctcgattagcttatgccctctccgccaaatcctccacggagcagccgagaacgtgggccaaggcgatcaccacgctggcggaggctttcaaaaggtggttgcgtcgttgctcgtgcagctggatcatgcgcaggggaggacgatttcggcttggtagccctcgaagctgtcgatgagctccatgcgtgtatgggtctcagtcttctggtagatcttgtgcacatggcttcgggcagtcgaatcggagataaagagcttttcggaaatgtattgggtggtgcgtccggccaagaggtagtcgagcacctcggtctcgcgttttgaaagaccatgccgtccggcaaagcctgccacgatctgctcgcgagctggcatctcctcggctttctcgagcatggcacgtccaaaggaaatggctttcaggccttcgatgctcttgtcggtgaaaacgagcgttccgacgctgagtgcgatcaggaccccaatgatgaccgtagcgaccatagtggtgctcatattgccgaacgagcaaactgcctcggcacccatccatcccacgagcattccgagagatgcggcgagacgggcaataaccatagtggcgagtagcgatgagtcgtcggtcttcaccacattgcagtaatcgttgaggcttaaggcctcaaaaagcagaaaagagaagacaatggcacaactccccaaaagcggtagtcccggccacgatacgagcaagaggcagaagcctccgcccatgagcagcggtatgcctcggtaaagtccatacaacctcgttttcaaggactttatctcgcaaatggtgagaacgagcagggttgccaccagactgcagcccgattgaaccaaaggaccgctgattacctgctcaggggcaaataaggcgacggcggaaagccatgcaaaagccgatgagacgagggctagcgcaatggtcatgagccaaacagagtggggcatgcgaggaagtgctttttgcgtgctcgggatgtctacgaacagctcgctgccacgttgcgcttgatagtgccgctcggaaagcaagaaagacagacctgaggcgataggtagcagtgcggcaatagcgatggccgcctcagagggcaatgcgctcgttgcgagacagatgatcgagccgcctgcataagagagaacgatgagcttcagcgtttcgtcgaggcgcatatagccgaagaagcacagccacatgaggaacatggacacttccgctaatgcggcaagggcagaggcaacggttgttgcgagagggtaagagctggcagcgagaagtgccactgcgcccgttccggcaacgatcgaaatagcgagcagagtgcgctttccgatcacgctcgccaatggcgcgcgcagggcgaatacgattcccagcgccaaaacgcggaaaagtagctcaggtatttcaaaaggggcgccagaaaggccgtaaagctgtccgaaggccggagatggagagacggcgacaaggaagagccacgcccagaacatgctgaagccaaaaaggcgaacgggaaaaagcttcctgctctcgaagaccatgggtatcccccttctcaaccggtgcctccattatagccttttcccactggaaagctgtcgcgcagatacttttgcccaaggctctgatcagcctaaacgcaaaaaccaacgttttgattgatgggggtcaccgagtcgaaaacgccgaaatcaacggtttcggcgattctgccagaggtgatttttgcctaaggttctctccgtcatttacggacgagcgagaaagaaggttgcccatggccccagccatcaaacagcatcaagcagccgcagaagggggagcgacggtggcctctcgatgccgggggacgtctccttttgaggcatcagtcgagcgagtgaagagcgcgttgcactgtcggggatcgttcaccgagatcatgcgcaaggccctggggttctgcacgcaacagcgctccttctcggaagtggaagctgagatcgccacctacccggagttcaggtacgttgaatatagtcaggcggccatcctggatatcctcgttcaagtcggcgctttggaaaagaggaaccttgacaagagtggcggcatcgtccctgtggcgcgtcttagggcgctttccgaagacgaccgggatgatctggtggtcgcctatgctcttgaaaccaccgaggccggcaaggcggccatcgccgatatggagccggccgagcgcctgcaggcgctcttcgcagaggcgcccgaacgcaatgagacctacctacgcgtcatggagttttgccgtatcccccggacgttcgacgacgtttcggcgctgctgaaggacgcggcttcggcgaagtctcgcaacccctacaccgacctgccgctgtatccgagcgcctatctgggccatttggaaggggctggcggtcttctgtgggatgagggctggatcctcactgaggacggcgctgcgtttcttgaggcccacgggtgctgctagcgccaatgtggaaacgaatcgaaccgagagaagggagcgaatagaaaatggcaagaaagcgcaattacgacatcctggccaacgctgccgcccttgtgggcgccatgccttcggctcagtccgcatcgttggtcgagaccgatgccgcgttcgctgcgtcgagcgcgaaactcgagcgtcaccacagctgctgccatggatgctacaactgctgccccgtctgggtgtacacggaggacggcgttgtcgtgaagatggagggcgactatgacggcaccctgtcgaagggctccatctgcacgaaggcgctgaaccagcagcatttagtctacagtccgcgccacgtgctgcaccccatgcgacgtgtcggcatgcgcggcaccaacgagtggatggccatcagctgggatgaggcgctggacattgtcggcgagcagatggccacggccacgaagaagttcggcccctactccattatggtgggtgccggcggcggaggcacctacggcaacgttttccagcgcgtcacccaggatgccatcggcgcgcccgtgtgcatctcgggcggcgggtgccagtgctacctgcccgccgattgcgcgggccagtggatgcgcggcggctcgaacaaccgccatgagggcaacaacgcccgcgagatgtggaacgcctggcatcccaccatggaatgcgtcgtgctgtggggtgcccagacgagcgcttcgggcgccgcctatgcggcgcgcgcgaatgcggacatgcgcgagcgcggcgtcaagaccattgtgatcgatccctatctcacagaagaggcctccaaagccgacatctggttgcccgtccgccccatgagcgatatcgccatgctgtgcggctggttcaactacatcatagccaacaaactctacgacgagcagttctgcaagtactggacgaactaccccttcctcatcgatcccgacacgcgccttcccctgaaggcggaagaggtgtggcccgactacgtgaacccctcggccgatcctaacgacgtgtacgacacgcccgcttacgtctgcttcgacgcccgcactaactcggtgcagcccttcccctatacggctccagaagattccccggtcgaccccgtgatcttttgtgaggcagaagtgaacggaaagctctgcaaaacgggcggtcagattcagtgggaggccgtggccgattgggatctcgcgaagacggcggaggtcacctgggtggatgccgggcgcatcgagcaggccatcaagctttacgcgagcacgctttccggcatcggcaccggtcagttcgccgacatgagcgagctttccagcaacttcatcttcggcaccatggcgcttgacatgctctgcggcaaggtgaacaagcccggcgtggtgctcaccgagcagaaacccgaatcgcgccacaccacacgtcccacgcacttttggtgcgggcgcccctatcaggagacgttcggcgtcggctggacggtgggcctgaccgagggggagaaccgtcggcgcagccaggcggccatcgagcgctggaacgagaagggcgtcgatggcgtggccaagcagaaggagttcgtcgattaccaaatggcgcgactgggatccgaccggcacaaggccgtgcatcagtggcagctgaacgcactggctcccgtgcgccacggacttctgctcggcgaaccctataagatcgccgtgcgctgggagcaatcgggcaacaagtactgcgtcatgagctcgggggaggagtggaaccgcgcttacgccacgttggatttctgcgtgcaccagcagccccatatgacctccaccaccatcgaggatgccgatgtgtttctgcccatgcaggagtggctcgagttcgagcatgccaccgaaacggtcacccagttcaatcagacgttcatgcgcaagcagatcgtgcatctcggcgagacggccgatccgttcatctgcgtcacccaggtagtcgacaagctggccgagaagctcggaggcgatgacaagctcctgtgccgcgatttccagttcaacggcacctaccgcaccaaggaggacatctatcccacctgggcgaagctgttcggcgtggaagattgggtggaagcggtgaagcactccgaggatcacacgctcacggtgcccatcgacgagctgtatcagttctaccagcacttggacattgtggacgatggtctgccggcgggtttcgccacgctctctcgcaaatgcgagccctatgtcaccatggcggttatgaacgggcatacgggctttccctaccacttcccctacgagcagacgggcccgaatggcgaatggctcgaatacgatgccgtctgcacctacaaggagcagagcgagaacatgcttcaggaagacgaggactacccgttctatctgacgacggggcgtgtggcccactaccaccacaccacgctgcgcaccgccccctacagccgcgagctcatgcccgttcccgatgcgcgcatcaatcccgacgatgcggcccgtctgggtatcaagcacggcgactggatcgagttgtcgagtcgtcgcggatcgactcgcgggcgcgcctatgtgaccgccggcgttcgtcccggagtcgtcatgatggagcgtttctactttcctgaaagctacgacaagtcccagaagaagatcacgggcgggtggcgccagtgcaacgtgaacctcatggcccgcgacgacgtcgtcaatcccaatttcgcttccgcctcgtggcgcggctaccgagtgaacgtgaggaaatctacgaagcctgagggcatctggacggaaccggaggagttccagcccttcatgcccacctatcaagccgagccgaacacggaggaggtgttccgccatgcctaggaaatgcctggtcatcaatcttgatcgctgcacggggtgcgacagctgcattgtcagttgcaagttcgagaaccacttgcctttgggcacgttctataaccgcgtgatgcaggttggccccacgggaagctaccccaacgtcgaacgctacaacttgcccgtccagtgccagcaatgtactcacgctcgctgcgtggaagtgtgcccaacgggcgcgagctaccgcgacagcgagtcgggcatcgtgctggtggacgagtccaagtgcatcggctgccagtactgcctgtacgcctgcccctatggcgtacgcaccttctccgaggcggacggcgtggcgcgcaagtgtaccctgtgccagcatcttacggccaacggctctgcggagccggcctgcgtgcacaactgcccgggaggagcgcgcttctacggcgatttggacgacccgaattcgtccgttagccgcgagcttgccaagtacggcgacgactgcatccattccctggtcgcccccgagggggaagaaccgctcacgcgttacatcctctcgccgtctgtcgcctcttggaaggagttggtctaaatggccccgaagattcaatggccgctcgtgctgttctccatgctcgcgggatgcggaggatgcgcttttgctttcgccggcatcgcgaatgcgatgggagagagcatctcggtcacgcttttcgttactatcgtggcctttgtgctggtggttgtcggtgctatctgctcgatgatgcatctggcgacacccaagcacgccttcgccgccgtcacccatctgctgtccttttcgggtatttccgttgagctcatcatgcttggagtggtgtgcgctcttatggccctctttgcggggagcatcgtctttatcggcaatgccacagcgacgcttgttctcgggatgctgggtgcgctgtcgggcgtggtcctggcgttcgtgacgggccatggctacctcatctcttcgaaaccgacgtggaacacgaagaagctgcccctggcctataccggcacggcggccgtggccggcggcttcctgtacgtcgccatcgccggctttgccggggctgacccggccatcgtccgcgcgctctgctggattctgctggggtgcgtggccttctcggccgtcttctctgtggcgtggcttcgccatttgggagccgaccgcgtgcgccagaacctcgctctgtgccgttggggcatcgtggtttgcggccttgttattcccgtcgctgctgccgtggccttggcgatcatgcccatcaatgcgctcttcggggttgttgcgggcttcggtctcgtcacagcgtttgcgggtggcatcgccctgcgcgttctcatgtgggtcgtgggtgctgggttcctctttttcttcgaggaagctcaggccaatcggtcggccattttgaatgtctaaccatcggtaatggagccatcggagacatctgctgagatggtctcctttaaggaagagagaaacggcaatgatttcactagaggaattcgcaaagatcgaggccaaccgcgctgcgctctatcgcttcgtagccaagctgttccgcgcccccctcacgtccgaggatatcgagatgcttgcggcgtccgatctcgctacccgcgccggcgatgaggcgggaataggccatggcctgaaggtgatgggccgctacctcgcgaagcgcaacaccggcacgcgggagatgctcgggcgcgactatacgtgtgcttttctcggggtgcaggaagcggagggcaaggtggcccttcccttcgagagtgcattcacaagcgatcatcagcgatacatgggtgaggcgcgcggcaaggtttacaacatttacaagcggtgctctttaaggctggcagatggcatcgaccttcccgaagatcacctttcgttcatgtgcgactttatggccgccatgatcgaccggacggtaacgcttttcgaggagaaggacgatgcgtccctgcgccagaatctgcttctgcagcgcgcattcctcgaccgccatattcgcaactggttccccgaatttgctcgcatcgcctcggctatcgtgcaagagcgattctataagggcgctctggagtacgcccacggtgtgttcgatctggacgcgaaagtcctgaagaacctgttagcagaggtgggagccgctcgcacttccttcgatctttcgctgtgggagctgtcccatccggccaaggacgcgagcgctcttgcctatccgaaggtggatgcgaagcgctgcctccaaaagaagggcatggagtgctcggcttgcgcctcagcgtgccccgaggacatcaatcctttggcagacctacgcaagcatccccagaacggctgcactcattgcggcgtgtgcgtggcagtgtgcccggcagatgcgctcacgttgccccggggataggagggagggtgcctgccgtcggtagttcggcgtgatttcgatggccgcagattttgacggcgcatcgtcggtaagacttcttaggcgttcggcctggaagaagagcccttcgcgaatgagggcgcagaaacacaaaaaggaggaacaagtcatgagagaagacggcggatacgcaatcgcggataaggtaccgctggggaaaaccctgctgtattccctgcagcatttgatggcattcgttggtggcggcgccattgtccccgccatgatcatggggctcgatcctgcgctcgcggtgttttgcaccggcatcggcaccatcatctacttgatttgcacccgcaatcgggtacccagttatttcggcgtgtcttttagcttcattacccctatggccgtcgttatggcgaccgatggcgtaggtggcgccttgtgcggcatcattgcggcaggtttggtaatggttgtcggcgcaggggtagttaaagccatcggtacgggctggatcgacaaggtgcttccgcctgttgtcactggatgcatcatcgtggtgatcggcgtgggcctttcggcaacggccataaactccgtgatgttcgacggtggggcatccgagaccttcgacgccgtaggctgtctcatcggtttcgtcacgttcatcgccgccgttatcgcctccagctggttcaagggcttcttgaagatgatccccgtgctcatcggcatcgtcgtgggctatctggtggcggtgcctttcggctatgtggacttcacgcccgtgcttgaggccgcctggatcgggttgcccagcatcacgctgcccacctggagcctgaacggtatcctggtcatcgcccccatcgcgcttgtgctgctcgtcgagcatatcggtcacctgatgacggtcaccaacttgtccggcgaggactgcaaccagtacctctcctcctcgcttctgggcaacggcctcggcattatggcctccggcgctctgggcggtccggccttgacgtccatcgccgagaacatcggtgtcatggggctgtcgaagtgctactccacccgcgtgttctggtggacggcggccttcgcgcttatcatcggcggcttctgtccgaaactcgccatgctgttctactccattcccacctgcgtgctgggcggcgtgtccctcatgttgttcggcctcatcgctggcaatggcctgtccctgctcgtcagcgagaaggtggacttcaacgagaaccgcaacctcatgatcgttgcctcctcgctcatcgtgggtatcggcatgatgaccacgggcgtctccgtgcccctgggctccttcgaaatccccggtcttcttctggccgccattctctcggtggtactgaatttggtgcttccgaaggagaaggaagagctggtgcagtgctagctctgtgagattcgctcctgcgaattctcttcggcaatccgcggacgccgagtgctttgaacgtccttcgctcggcgtccgctctcatgggaggttgcgatcatgagcagaaaaaccatcggcgtggaggagaagcttccgccgatccaggcgttacctttagggctccagcattttctttccatgttcggtgccacggtgctggttcccatgcttatggggttctcgccctcggtgtcggtcatgtgctcgggcattggcacggcattgtacctgctggtaacgagggggaagattcccagctatctggggccttcgttcagcttcatcggccccgtcgttatggcgagtgccacagcgggggcgtcgggggtgggctcggccatcgtgggtgccggccttatctttatcctgtgcgcccttgtcgtgcgcgtggtgggaaccgattggatcacccgtttcattcccaccgttgtaatggccgagatcattttcgtcatcgggtgcggtctggccaacactgccataaacgacgtgttcctctgcgacgggcacgaagcgtcgtggccagcattggtggtgggactcgtggcactgctcgttgtcattttttgcagctgtttcggcaagcgcattctcagcaccatccccgttctcatgggcgccgtggtggcctacctgctttcctgggctttcggcatggtggattttacgcccgtgatggaagcggcttggatcggcctgcctgatatcacgtttcccaccttcgacctcggggccatcgttcttgtgagccccattgcgctcgtggtggttatcgagcacatcggccatcttttcgtcatcggaagcatgacgggtcgcaactacaacccgctgctgtggcgctcgcttttgggcgacggccttgctacgacggtggccggatttctcggggcgcccccggcgacgacctttgccgaaaacatcggcgtgctgagcgtgacccgcgtctttgccacccaggtgttctggtacgcggcagcggcggcatttattgtcggcggcttttgccccaagctcggggcgctggtgggcaccattcccgactccgttatcggcggcgtgtccatcgtcattttcgggctcattgcctgcaatgcgctcaagatgctcgtggataaccagatcgacatgaatagcatgcgcaacatcatcgtcttcggcggtccagccatcgttggtatcggtatgcaggccctcggggctggaattcccgtaggggactattctatccctggcttggcggttgcggcgcttacgggcattgcgctgaatctggtgctcccgaattgctcaaatagccgtgcggattgatttgattgattttggtaactttgggccattgcgtaggcaataggttagacgactgtatctgatctcttgtatatgcatgtaaaagtaggtataatgcatgcaatgattgctcccgagaagaggagaagagatgccggcgcttcaggtgagggattttccagcgacgctttacgatgagttgaaggaatgtgcggcgcgcaaccatcgctccatcgcccagcagacgatcatcgccgtggaggagatgctgtccgaagcttcggcgccgtcctccgctcgtgctgggcgtgggttatcgcgagattccgaatgtgcgccttccggcggagcgggcaacgagttctctgctccgttcgataggggggtggtcggtttgcgcgaaggacgcgcggcacgagcggcacggtcgaggaagcgccagcagcttttcgaagagtgcgatgaaataccttggaaaggcggtggcctttcaacggaagatatcgtcgcgatggttcgcgaggggcgtgacaggctttcggatcgcgattggctcgcgctagatccgttcagctcgcaggaggagtcagcgaaggcggtgacgctatgatagtgctcgacgtcaacgcggccattacgattgcgaaaggcaccgaagaaggcaggactctgagagagttgatgatggaaggcgaagaggtcgttgcccctcacttctttttgacggaactgggaaacgttgtctggcagatcgtgcgtgctggagaattggatgaagaggactttcctgggttgtttgagcgagccgccggcttcgtcgatcgatttgttcccgctgagggcattctcttagaagcgatccatgcggccattcagaataaccaccctgtctacgacatgctctatttcattgttacgcggcgcaatgctgctacgctcttcacgttcgacaagaagctgcgagctgtctgcgaggctaatggtgtgaattgcctcgggacggcgagcttgtaggggacgattttggcgagaatcccaggagcggactgacgcgtcgggccactctcttcctgggccgttaacatcccgttgccaaatttcgggcaatcgtccaaagaatggtaaaatacataagtcgcgcatgttccggtgcgcggcttgattttttcggccagcgactatatagagggagaaggctaggcccatgaatgcacaggcagcaaaggacaccgcaacgacgaccatcgtgaagcctccttatatgcaaaaccgcgagctttcctggctcgatttcaacaagcgcgtgctcgaccagggcgccgatcccacggtgccgcttctggagcgtctgaacttcatctccatcttctggagcaacctgcaggagttcttcatggtgcgcgtcggttcgctcaccgacctctcgctgctgaagaagtccatcatcgatccgaaatccggcatgacgccagctcagcagctggaggccatctacgctcgctgccacgagctgtacccctactacgaggaaacctacgagagcgtgcgcgcgctcctcgccgagcaggatatccgcaacctgcgcaaggaggagctcacggatgagcagctcgattatctgcgcggctacatgcaggataacgtgctcccgttcctctctcctcagatcatcaacgcccgccatcccttcccgcatttggaaaacggcggcctgtacatcgtggtgcgcctcgacgaggaggcggctcccaaggcgaagaaatcgaaggaggagcgcgcccgcgaaaaggccgagggcaaggccaaggccacgaagaacctcggggcggagggcgtgacgctgggcatcatcccccttcctcgccagacgagccgcgtgatcgagctgcccggcagtggtttgccgttcatgctcgtcgagcacgcgattgagatgttcgccgccgaggtcttctcaatgtacaccgtcaagcacaccaacgtcatctgcgtgacgcgcaacgccgacctcgatgcgacggaaggtgccgaggagcagggcgaggactaccgcgagcacatgaagcgcattttgaagaagcgcagccgcctggccccggtgcgcctggaaagcgaacggccgctctcgcgcacggtgaaggggcttctgctggaaaagctcggcctggcggagcaccagctgttcgtcacgcgcgtaccgctgaacatggggtacacctggggcctcggcagccgcctgggggccgagaagcgcgccacgctcactcaggcaccgttcacgccccagtggcccgcccgcctcgatcgcaagcgctccatcatcgagcaggtgagcgagcacgaggtgctgctgtcgtacccctaccagtccatggacgctttcgtgcagcttctgcgcgaggcctcggtggatccggccgtcgtttccatcaagatcacgctgtaccgcctggcgagtcagtcgcatctggccgaggcgctcattaacgccgccgagaacggcaaggaggtcacggcgctcttcgagctgcgtgcccgcttcgacgagtccaacaacatcgagtggtcccagcgcttcgaggccgctggctgccacgtcatctacggcttccgcaacttcaaggtgcactcgaagatctgcaccatcacgcgccagacggaaaacggcctgcagcacatcacccagctgggcacgggcaactacaacgagaagacggcgaagctctacaccgacttctcgttcatcacctgcgattcccagatcggccacgacgccgccgacttcttccgcaacatggcgctggagaacacctcggacaactacgacatcctgtgggtggcgccgctcatgatcaagcagaacatcctgcgcaacatcgacgtgcagatcgagcgcgcgcgccgcggtgagaagtgcgggctgttcttcaagacgaattccatcaccgacaaggaggtcatcgacaaactggtcgaggcgtcccaggcgggcgtgcccatcgatctgttcgtgcgcggcatctcctgcatcctgccgggggtggaaggctacaccgatcgggtgcgcgaggtgtccatcgtcggccagctgctcgagcacagccgcgtgtacggcttcggcccgcgcgaggattgcaagctgtacctgtccagcgccgacctcatgacgcgcaacatggacaagcgcatcgaaatcgcctggcctatcctgaacgagacgctgcgcaaccaggtgctcgggtatttgggcatctgctattccgacacggccaagctgcgcgagcttctgcccgacggctcctacacggcgctcggtgccttcgctgagcgcaacgagaacggggaagtggagctgttcgattcccagaagtacctcatcgccgaggctcagcgcatgcgcctggccgctgccgagctggccgctcgcaaggaggccaatctgggagggagtgcgcgcgtggtgttccccctgggggatgtcgccgcggaggacggcgccgaggtcggtgccaatgaggtggtaaccgaggaggagtccgagtttgtggcccatcgctcaccggagctggaggcggccgaggccaaggccgtgcgcgatgccgccgacgccatggccgcagcggcgacggctacggcggcttcggttttggaagcggtgaccaagggcgtggcccaggaggtggccgctttgcaggctcgcgagcctcaaggggcgaccgcggcggccgaaacggctcctgccgccgactccgatccggctgcggctgatcctgctgcggtggccccggctgccgagggccccgtggccgagcgcgcggagctgggcgccgaggcggcgccggcggccgcccccgctccggcaccagcggccgaagtcgaggacgctgctcgccccgacgacggtcgcgccatcgtgccggccaccgtggtagagccaacgccagcgggcaatgccatcacgcggttctttcgtcgcctgttcggcaaataggccagcgtcgcagcgtctggtcgctacggaagacgaacgctcaaggataggggaaaggaaagccatgctcgagaaggtcaagttcaacaagaagcccatgaagaaggcagagtacaaggagcagtgggacgaacttctggccaagctcgtggtgctccagcagcaggcccacaacgagggcgtggggctcgtggtgctattcgaaggctggaacggcgccggtaagggcagtcgcatttccgacctcatgtaccacctggacgctcgctccaccggggtttacgtggggctcgacctcgatccggacaccgagcgcgagttcgtcggccgcgaatgcggcgtgacgggcttctaccccattatgcagcccttctggaaggccctgggcgagcgcaactccatcacgttctacgatcgcggctggtacacggcggtcatccagcacatgctctacaacgcgccggccaagctgctgcttcccaagaaagaggagcgccactacttggactccgtccacgacttcgagcagcagcttgtgtccgatggctacgtggtggtgaagttcttcgtgcatatgaccaagaaagcgcaggtcgagcgtttgcagcggctgcacgacgacccggtgacccgctggcgcgtgaccgagaagaagctcgaaagccatcacggttacgagactgcctacgagctgtacgaccgtctgctcgagcgcagcgactacgattttgccccgtgggtgctgctcaacggcgaggacaagcgtcgcacgaacctcaccatcgccagcacgctggtggacgccctggagcgcgcgctcgcccgcaaggaggccgacgacgtgctgaaggcgtcgctggcggcccgcgagaaggccgacgagcttttggccgaggagcgcgccgtggaggcggccgctgctgccgaggcggcgggcgcggtgccggcgccggcggcccagcccgggcgcggcatgcttgccggcgtggctctggcccgcgccgaggcccaggcggccgcggctcacgacctggctcccaagaagtcccgtttcgagatcgtgaagcactacccccaggtggacacgatcgaccacagtctggcgctcaccttggacgagtacaaagccgagcgcaagcacttgcaggatcgcctgttccgcctggagaacatcatgttccagcgccgggtgcccctcattctcatgtacgaggggtgggacgcggctggcaagggcggcaacatcaagcgcgttgcccaggcgctcgacgcccgcgcctacaccatctttccgtcgccggcgcctaccaagcccgaactcgcccatccgtttttgtggcgctactggacgcgcctgcccaaggcggggcacgtgggcatgtacgaccgtagctggtacggccgcgttctcgtggagcgcgtggagggcttcgccacgccggccgagtggtcgcgggcctacgatgagatcaacgagttcgagcacgatctggtcgactggggcgccatcctgctgaagttctgggtcgatgtgagccccgaggagcagctgcgccgcttccaagatcgcgaggacgatccggccaagcagtggaagatcaccgaggacgactggcgcaatcgcgagaagtacccccagtacaaggccgccatcgacgatatgttccgcctgacgtcgaccacgttcgccccttggatcgtgctggagtccgatgataagcgctacgctcgcatcaaggccctgcgcatcatcgtggaagccctggagaagcgcctcggcgagtgccccgcctcgtagcgcctcccggggaggcagttcgccgtcgctgtggggtttttccttgcgccaacccggggttcagggtactatgaacccaacatcagcaagctggcgggtgcgcagaggacgggcccgttgcatagaaggagtccgctatgtcattgttcggtttcgaagttcccatggaggccatttgggtcgttgtggccatcatcgtgctcgtcattgtggtgttcatcgccaagggcttcatggacgaaatgaagaagtaaatgctcgcccgttcgacggggtgagctcagggcccctgcggggccttttttgttttccgcaggccgcaaggccggggaggcgagaacgtcggtgcagggccggcaagacgtcgcagccagcgcggtcgaacgactgcccctagggccgacgctaggtagagagatcgatatcgaagggggacgcctcatggctaccgcagagaataccgataccaagaagaaaaagaagaagcgcgggtgcttctggcgcatcgtgttctggcttgcgctcgtcgtgttcatcggctcggtgggaacgctgggctatctgttctacacttattggcagggccagaacgagtacgaggagattgccagccgcgttgtcgaggtgccggaagatgggcaggtgaccaacttggccgatctggtggtcgattgggacgccctgcgtgcgataaacccggatatcgtcgcgtgggtgtacatgcccggcaccatcatcaactacccggtggctcacaaagacggcgactcggagtactacctgcaccacaacttcagcctgggcgagggctccttcggcgccgagttcggctccatcatgctttcgggcgagaacgccggcgacttctccgacgaggtgaacatcctctacggccaccatatgcgcaacggctccatgttcgccctgttcgccgagttccgcgattcggctatcttcaacgagcatcgcacgatttacctgctcacgcccgagggcaactaccgcctgcagacgttcgctgtggagcacgtccccatgacccatgcctccattgccacgccgaactatcccaccgacgaggagttcacggccttcaaggactggctcgtggaggagtccatcgtcacgcccgaccccgataccaccgataccctcgccgacgcgacgaagctcttcggtttctgtacgtgcgatggagccgacaacacctggcgctatatcaccttcgccgatgttgctgaattcgtccctatcagctatgttggcgccgatacctaccagggcgacacggcggtggaagacggcgcggccgacgagatcgccgccgatgcgcaagaacgagcggagaactagtggctgacagcgtatttcccggcgagcagccggatcggttggaagaggagtgcggcgtcttcggcgtgtacgccccgggcgaggacgtggcgcgcctgacctgctacgggctgcaggccctgcagcatcgcggccaggagagcgccggcattgccgtgggcgacggctccacggtcatcgaggcgaaggacttggggcttgtgacccaggtcttcgacgaggcgacgctggcgggtcttggcgagggcgtggtggccatcgggcacgtgcgctattccacgagcggcgggaaggcctcctgggaggcggcccagccgcacatctccgccatcgacgatacgctcatcgcgctggcccacaacggcacgctggtgaacacgaaccacctgcgggcgcagctcatcgatgagggcgagcatctgcgcgccggcaccgattccgaggtggcggccaaggccatcggccacctcacgcgccagacgcaccacctgcgcgagggtatccgctacgccatggagaacctggagggcgcctatgccatggtgctcgcgagccccgaggcgctctacgccttccgcgatccccatggcattcggcccttgtgcatcggccagttgcccgagggacgcggctgggtggtgtcgtcggaaacctgcggcctcgacatcgtcggtgccgagtacgtgcgcgacgtggaacccggcgagatggtgcgcttcaccgccgagggcatggtaagcgagcaagccgtgccgccgcgcccgcgggccgcctgcatcttcgaatacgtgtacttcgcccggcccgactccgtgcttgacgggcagtcggtttaccaggctcgccgcgccatgggccgcattctggccgacgaggcgcccgtggaggccgacctcgtgctcggcgtgcccgactccggcgtgccggcggctctgggctattcggaggcctcgggcattccgttcaccgacggcatcgtgaagaaccgctacgtgggccgcacgttcatccagcccacccaagccatgcgccagctgggcattcgcctaaagctgaacccgctgccgagcgtgatttccggcaagcgcctcgtggtcatcgatgactccatcgtgcgtggcaacacctccaagaaactcgtgcagatgctgcgcgatgccggtgcggccgaggtgcacctgcgcatcgtgagccctgaggtgctctggccctgcttctacggcatcgacaccgatacccgcgagcagctcatcgccgcgaacatgacgttggaggagatgaacgattggatcggctccgactcgctcgcgttcatcagtctggacggcctgcgcgcctcgctcgccgatgcgggccacgacggcttctgcacggcttgcttcaccggcgactacccggtgcccattcccgacgatgtggcaaagaagagctttcttacccgcaaggacttcgaggcggtgtacgccggcgaggtttcatagacactgaaaggaaccccatggaaaaccagaacagcgtgacctatgccgaggccggcgtcgatatcgtggagggcgcccgtgccgtggacgccatcaaggacacggtgcattccacctatcgccccgaagtggtgggcgacatcggcggcttcggcggcctgttctccatcgcggcggccaaggacatggccgatccgcttttggtgtcgggcaccgatggcgtgggcacgaagctcaaggtggcccagcgcctcggcgtgcacgatacggtgggcatcgatctggtggccatgtgcgtgaacgatattcttgccaccggcgcggagcctttgttcttcctcgactacgtggccgtgggcaagctggatgccgaggccatggccaagatcgtcggcggcatcggcgagggctgccgccagtccggctgcgcgctcatcggcggcgagatggccgagcatcccggcgtgatggacccggacgactacgatctgtccggtttctgcgtgggcctggtcgatcgcccgcgcatgctcgatcccgaaagcgtgcgcgaaggcgacgtgctcatcggcctcgcctcgtctggcctgcattccaacggctactcgctggcccgcaaggtgtgcatcgagggccgtaccgaggaggagctgcgcgaggctcgcgaggacttgggtggccagagcattctggaagccctgctcacgccgacacgcatttacgtgaagccggtgcgcgcggtcatggagcaggtgcccggcggcatccgcgctctggctcatatcactggcggcggcatcaccgagaacctgaaccgcgccttgcccgcaggcgtgaacgccgaggtcgatttgggcacctggcccattccgtcggtggtgcgctttgcctgcgagcaggcgaatctttcggaggcggaggcgctgaagaccttcaacatgggtctcggtatggtgctgattgttgatccggctgctgctgaggccgtagaggccgctctggccgctgctggcgaagagacctaccgtgtcggccgcattgtcgctggcgaaggcgaggtccaatacgccaacgaaggggagctgttctaatggagaagctgaagatcggcgtgctgctttccggcagcggaacgaacctgcaggccattatcgacgagatcgcgaatggcctgcctgtggaaatcgtgcacgtgctgtcatcgcgccccgatgcctacggcattgagcgggcgcgcgcggccggcattcccgtgacggtgttcgatcgctcctgctacgaggatcgcgaagcggctgacgcccgcatcgctgccatcatgcaggaagccggggccgagtacctggtcatggccggttacatgcgcaagctcaccccggtggtgctcgacgctttccccgaccatgtgctgaacctgcatccggcgttgctgccctcgttcaagggggcccatgccatccaggacgcatgggatgccggtgtgaaggtgacgggcgtgacggtgcacctggctaacgaggactacgacaagggccccatcgtggcccagcgaacagtgccggtgctggaggacgacgacatcgatgctttggaggcgcgcatccacgagacggagcacatcatctaccccgaagtgctgcgcgccatcgccgagggccgcatgaccttggacgccgaccgtaagattcacattcgctcggtcgattagggcaatctggcgttgatcgagcggccgatcccgggccaatgacaagaatttcagattttttggtcacaaagtcgagttctgggtttttcgaatggctgttgacggttgaaatagacgaaaatgggttgcattccctgttgttttggttacacataggagttttaggagcaaattgggttatcccaaaaacccaaaactcgattttgtgaccagatttgaaaaagtttttgttggaggaagcaatgaagcgcgaaactatagcaaccatcattgaagacctgcaagccggacgcactccggtgctggccgtggaggatttcccggcgttctcggaggaggcaacggcgggcgatccgcatatcggccccgagacgctgcaggccatcgccgccacgctgaccgaagccgacattcctacgtttgagcgcgctctgcgcgccatggatgagggcgatctggcttggctcggcttcaaggtcgtctacgatgcagctgccgcccagggcaacgtggacaatgaggtcacgaagaagtacggcgagcaaggttccgccgatggcgagccgctcgtgttcttctgcaacgacgccaaggagatcgtggcctcgcgtgagctttcgcctcgcgacacctttcaggcaaaggacgttacccgcggcccttcgatgcacaacgaccagttcgacggcctcacctgggccagcgagccgctcttcgggaaggtgcgtgtctggttgctcggtgcgtcggatgcggcggtcgaggtggcacagctcgccgatcacgtgggcttccatgtggtggccgtcgactacgacccggcgttcttgaacgaggagcgattcccgcaagccgagcgcatcatgctgcatggcggcaatttcgacgagttggccaacatgccggcgcgtcccgaggactatgtgtgcgtgctcacgcgcgggcatatgttcgacccggaaagctgcatctgggcgctgcagaacggggtgcactacgtgggcatgatggggtgcgcggggaagaactctacggtgcacgacctcgtcatcaacgcgggcatctccgaggccgattgggatcgcgtgaagcgccccatcgggctcaagttcggcgcaaagaccccggctgagctggccatcgccatcgtggccgagctggtcgatgtgcgttacaagcagcgctacagcgacgaggctcgcaaccgccacgagaagagcctgggtcgggagtagccgctcttcctgtgcgcgagccgccgacggaaaagccgtgggaaaacggggagcgctcttcctcaggaggctctttccgtgataccctgctccctgaagcgaacgcgctgtgactgacgggtacgcgtgggaaaccacgggggagcagcgcgcttatcccgccgaccgtctgggcaagccttctcgcaggaggggcttgccctttttcattgggcgggatgcgaaaaaccgtcgacgtggctgagggccaatgcgaaaagcgtgcgggctgcagcggcgtcggagagagccccaagagaaagggaacgcctgtgcaagatctcgtcgaactgctgaagaacaacccctacccgggccgaggcatcgtggtgggcaaggatacggtgtactacttcatcatgggtcgctcggtcaacagccgcaaccgcatcttcgccatcgaacccgacggcatccgcaccgaggcccacgatcccgcgcttctggaagacccgagcctcatcatctatcacccggtgcgcacgatgggcgacgcgctcgtggtcaccaacggcgatcaaaccgacaccatcgtggaggcgggtgatttccgcgctggctgcatgcagcgcgagtacgagcccgacgcgccgaacttcacgccgcgcatctcggccatcgtaaaccccgacggctctttcgagatgtccatcttgaagcacgccgatggcgaccgctgcacccgcgagttcttcgcctacgagggcgtcgatgagggctgcggctacttcatcagcacctaccagggcgacggcaatccgctgcccaccttcgccggcgagcccatccccgtcacgctgccgacccccgatgccctgtgggccgcgctcaacgacgacaacaaggtgagcctgtatgccaacgtcggcggcgaagtgaccctctacaataagaacctcggcgactaaagatgccagcacatttcaactgcggctgagcttagcgggatgcggggcaccgctcaccaagcgagttccgcagcgaacgaactgcgcaccctcaaccatggttgagcttagcgaagatacggggtgttctgaccgagcgagttccgcagcgactggaaatgcccagtgggcatttccacaaagcgaggactgtctgagcgaatcagaataccgcgtagcttcgcccccgaggagacagaaagccatcagataggagactcatgaacgaactggaacttaaatacggctgcaacccgaaccagaagccgtcccgcatcttcatgaaggacggcagcgacctgcccattcaggtgctgaacggcaagcccggcttcatcaacttcctcgacgccttcaactcctggcagctcgtgaaggagctgaaggaggccacggggctgccggcggccgcttccttcaaacacgtgtccccggctggggccgctgtgggacatcccctcaccgagaccgaccgcgccatgtacttcgtggaagacgagggcgagctttcccccatcgcctgcgcctacattcgcgcccgcggtgccgaccgcctgtgctcctacggcgactgggcggcgctgtctgatgtgtgcgacgccgatgtggcccgctatctggcgcgtgaggtgtccgacggcatcatcgcgccgggctacaccgacgaggcgctggagattctgaagaccaagcgcaagggctcctacaacgtggtgcagatcgatcctgattacgtgccggccgaaaccgagctgaaggacgtcttcggcatcaccttcgagcagggtcacaacaacttcgagatcaacgaggcgctgctggagaacgtggtgaccgagaacaaggagattcccgaagccgcgaagatcgacatgatcgtcgcgctcatcacgctgaagtacacccagtccaattccgtgtgctacgtgaaggacggccaggccatcggcgtgggcgccggccagcagagccgcatccactgcacgcgcctggcgggcaacaaagccgaccagtggtggctgcgccagatgcccgaggtgctgaaccttcccttcaaggacgacgttcgccgtcccgatcgcgacaacgccatcgacgtgtacctgtccgacgacgagtgcgacgacgtgctgcgcgacggcgagtggcagcgcgtattcaccgagcagcccaaggcgctcacccgcgagcagaagaaagactggatcgcgaagatgagcggcgtgaccgtgggctccgacgccttcttccccttcggcgacaacgtggagcgcgcccgcaagtccggcgtcgattacatcgccgagcccggcggctccatccgcgacgacaacgtcatcgaggtggcgaacaagtacggcatcgccatggccttcaccggcatgcgcctgttccaccactaatcgggcgtttggggccttgtctggggcctaaggtgtcggttgtcgaaccctttgcggccgctctttcgggggcggccgttttgcgccataatgggtacgtcaatggcccgtcgggccgcgcgtgggagcgcggtgcgcgccgtggatgaggatgcggcaggtacgtgcctcgggaaatgcgggtggaaagcccgcgctataccagtaaccgtaaggttcgccgttgcgccgaagggcgtggcggcggcgaagtcggaacaccgagccgagcaagagggccctggaagaaaggataaggaactatgaacaaattcgacatcacgaagcttcccaagcagtggctcgtggccttggtggccctggctttcaccttcttgctggtggtgccgggctgtgccggcgaggcggccgataacggcggcagcggcagcggagagaacgcggccgagcaggcggcccaggtggccgaggaagaaggccccatcgaggccgaccaggcggcggaggacatcgtcgtgcccgtttccatcacgatgcccgaaagcgccggcgccgagcccaagaccatcgaggtgacggtagccgatggctccacggtgctgcaggcgacggaggccgccggctgggacgtgcaggtggagaacagcgactacggcaagttcgtcacgtcaatcaacggcatcgccaatggctcggaaggcgatgcttccggctgggtatacacggtgaacgacgagcaggtgatggaagcttgcgacgtgcgccagctgaccgccggcgactcggtgcagtggtcgttctacgtgggctaacccgcagctcgtgtaatccgacgggctcctccccgcgaggagcccgctttgcagctccgttgtttttcttggcgttctaaggagttccccatgatcattctcgacgagccctacgcctccgttccgctgctcgattggatggaggcctcggcccatcccgtgctcgccaacgagtttaccgggaagctgacggccggcggccgtgcgttgaacttggtggacgccgccgagtgcgcccggcgcctggaagcgggggagcgcatctacacgaactccgagaacgctctggcctggattctcgatcacgtggagaatccgacgctcactgacgccatccgcctgttcaaggacaaggcggccatgcgcgagaagctcgcgcccttaagtccgggcctgttccacgaaaccgtcgatcgtgcggggctggaagcggtgaacgtcgccgacttgccgttgccggtggtgttgaaaccctccgtggggttttgctcgatgggcgtctacgttattgaagagccggaggactgggcggccgccgtggccgatatcgctcggcgcgaggacggctggcacgagcgctatccggaaagcgtcgtcggcagcagcgagtaccttatcgagggctacctcgcgggcacggaatacgccctggacgcctacttcgatgaagacggcgcgcctcatatcctgaacatcctgcgccacgacttcgccggcccggaggatacttccgaccgcatgtacctcaccgacggtgccatcgtggacgcctgggacgaccgcttcacggcgtggctggcggccgtgaacaaggtggtgggcgcccgcagcattcccgtgcacgtggaattgcgcgtcgatgaggacacgatcgcccccatcgagttcaaccccctgcgcttcgctggcctcggcggcaccgatgtggctttctacggggtgggcctgcgcacctacgaggccttcctggaagatacgccggtcgatctggcggcgctgtacgcagcgcatccgggcaaggtgtactccatgtcgctgctgaatccggcgcccgaggccgacttggcgcgccccttcgatggtgcggcgctctgcgagcggttcagccatgtgctcgcctaccatgggttcgacccggtgacggtgggcttctacgggttcctgttcctggaaaccgatgcggaaggcacgggggccgacgagcgcgattggcttttgcgcagcgatctcatggagttcgtgggcggcgcgttataatgatgcacctacccctgtctcctaccacgacggaggtgcgctgatgcgcggcaatttgcagaaaatcatgatcggcctggtggtcgtcattgtgcttgcgttcatattcttttccggcgactcgctggtgaagctcgtcgacaccatcaagcagggcacgcccttcttcatcattgcggcggtggtggcccagctgtgcaagtacctggcccagggccgcggctttcaggcctgcttcaacacggtgaacgggcacatcagctaccgcacgggcctgtcgctcgtcttcggcaccttcttcatgaatacggtggcgccttctatgaacctggccggcacgtcgctcgtcatggccacggccacgcgcaacggcatgcaggcgggcaagggcaccacggcggcgctgctcatgcagctgtccatcgattccggcttcgtcatcatcatgctcaccaccttcggcgtgctcaccttcacggtagggctgcaaccgggctggctggcgctcgggctggtggccgtggcgctcgtgggcggccttgtgttcgtcatcgccgtgggcggcctgaagccccagctggtgctgaaggtgctgcggcccttcgtgaagctcgccgacaaaatcctcgcgaagttcaagaagccggccatcgacgagtccgtggagcgcaccatccacaacttctcgagcgccgcgcacctcatcacgaagaatccgcgcaagacggtgcagtcatttttgtggacgaccctttccagcatctgcgagatgagctgcttcgtgctcgtcggcttcgcgttcggcgtgcaccacccagaagcgctcatttgcgggtatgttgtggccacgctgttcgctatgatttcctttgtgccccagggcgtcggcgttgtggaggcggcggtaaccgtggccttcgcgctcttcggcatcgattcggccacgggccttgcggtggtcatcgtctaccgcggcattgtgttctggctgccgttcctcgtgggcgcggtggtcatccagcgcatcaaggcgtttatgccgctgggaaagcgcgatctgaaaggcaaggccgaagccatggagaacgagctgcccgacaaggtggaggccgtgaagcaggttgaagccagcggggccgccaagtgggagactgctgaggcgcggcctgagcttgagaaggtgccggcaggggcctcgggaaccgcgaccggaccagggacggtcccaaaggaaacgaagtaggcgggagccgggaagacgcctggcgcgaaaggatgcaaacgcgatgacggagacgaatctgacgggcgcggccctggaagtggcgcggaagcgcgagacgcaggggctcaaccacacgctgggcgttcacttcaccaaggtggagccgggcctcgtcgaggcggagatgcccatcactccggcgcttttgcagccttttggttttctgcacggaggcgccactatcgcgcttctggaatcggtcgcttcggccggcggcgagctggcgtgcgacttggagactgagcagcccttcggcgtggaggtgaccatccgtcacaagaagagcggtcgggaaggagacgtggctcgcggcgtggcgaaactcgccgagcgcaaaccgtcgtcgaaggccggctacaagctgtactgggatgtggccgcctacgacggggacggcgacgtcatcagcgacggcgtcatcgcggtgaaggtggtgccgaaagactacctcgcccaaaagctcgccgaacgcgggcaggcgtaaaattccgccgacttttctcttgcgctgggcgggctctgtggtatcatagcgttcgctgtccgcaaggaagcatttcgggttgtggctcagtttggtagagcgctgcgttcgggacgcagaggccgcaggttcaaatcctgtcaacccgaccatcgaattcaagagccggcctcgcgccggctcttcttatgtctgcctgcgggtgggttccaagggtcggtgaggctttggctcgcgccttcgcgtgccgtgtctgaaccagctgatttaggccccacggtctagcggggaggacacggtataatgccaggttgacgttgtgcgctctcggtgccccgaagggccgttttagtgcaaggaggagatctcatgcgcatactggttgtgaatgcgggttcgtcgtcgctgaagagtcagctcatcgagaccgacggcaaggtgtcgctcatgaagtgcctggccgagaaggtgggtacgcccgacgcctatatgaacgtgtccttcgcgccggatttccagaaggccacctatcgcgtggcggacatgaccgtggccgagtgcttgaagaagcttttggaagtgctcgtcgacgatccggagagccccatcagcgatctctcgcagatcgacgccatcggcaaccgcatcgtggccggcggcgagtacttcaccaaatccgtgatcatcgacgagccggcccgcgagaagcttgagctgtgcgaggagctggcgccgctgcataacccgccagccgacgcctgcatcgacatgatggccgcgctcatgccgaacacgccccaagtcgccgtcttcgacaccgccttccacgccacgatgccgcccaaggcctacatgtaccccctgccggcccgctactacgacgactaccgcatccgccgctacggagcccacggcacgagccaccgctacgcggctcagcaggcggcgaacctgctcggtcgcccgctgcgcgatctggggctcatcacgtgccatttgggcaacggcggctccatcacggcggtcaaccacgggaagtccatcgacaccaccatgggcttcacgccgctggagggcctcatgatgggcacgcgctccggttccatcgacccggccatcctcacctatatcatgcgccgcgagggcatttccttcgacgagatggatgccgtgctgaaccgcgagagcggcgtgctcggcgtgtcggggctgtcggccgacatgcgcgacgtgctggcggcggccgatgcgggcaacgagcaggcacggctggccatcgacatgtacgtgtaccgggtgcagaaggccatcggcggcttctacgcggccatgacccgcaccgacgccgtggtgatgaccgccggcatcggcgagaactccgccgagctgcgcgagctcatcttcgacgggctggcccacatgggcatgatcctcgaccgcgagcgcaaccacgtggtgggccagatcggcgtgaaccgcatcatctccatcgatgacagccccatcaagatttgcgtggtcaccaccgacgaggaaatgcgcatcgcccgcgaaaccgacaacttggtgagtcagctggggtagaaagcgggcgcgcgggccaccgctcagcggctccgaagacgacgaaagcgggggggggagccgaggagggtcgacttccccccgctttaggggagggttggtttgtgcgccgcgttggcgctgcacgcagcggctgggctggtgcgacgcttacttcccggcggcggcgttctcgccggcgatcttgccgtacaccatgcacatgccgcaggagagacccttcagcgagatggggtactgcaccgcgaagcggccgccctgggtggcgccggccgcgtacaggccggggatgagctcgcggtcggtgttgtacacgtggcagtcctcgtcggactccaggccgcccaggttgcccagggtgagggcgcacccgcactcagcggcgtagaaggggccgttctccagggcgaacaggcgctgggagctcttgaagaagtcggtgtcctcgccggcgcgggccagctcgttgtagcgctcgatggaggccttggcggtctcgacgtccatgccctcgatcatgccgagcagttcgtcgatggtgtcggccttaaggcagcggccctcttccacggccgcatcgatgtcggcgggggtacgcacgttgatgcgcaggccggaggcggtgtactcgggcagaggctcgtcgcggtagatgcaggccacgccgtgggcggcggggaagtacgccagctgctcgggccaggaggcgtcgaagaactggtaggccttgcgctgcggctgcagctccacctggttctccagctgctggccgggcaggtcctcgttcatgaagcgcttgccgcgcagattcagccagaggtagccgttgttgccgatgacgccgcggccgtcggcgccggcaccgccgcccatgtggtggatcatcggggcgtgccactgctcgatggcggcaccggcccaggctcccatcttgtggccctcaccgacattggtgtagttgccttcgtcatcaaggtcgatgctcaggatgttgatgccgttttccacgcattccggcgcgtagaacttcatcatgtcctcgttgcccaggtaatcgcccgtggccagaatgacgctgggcgcggtgatcttgaggtagccgtcggagccggcggcctgggcgtagatgcccgcgacggcgccctcgtcattcaggatcagctcgacgcccttggtggagtagcgcacctcggcgccggcgtccacggcggcctgcaggttgtcggccatgacggtggccaggctggaaaagccgacggaagtgggatagcagggcagatcctctttggtgtagtcgtaggtctccggcaccgggtacatgtaggggaacatatagttggcctgggcgtccgtcggaatttcagcatagctttcgggcgccatgtacaggttcttgctggcaccgacgaaccagtcgagcgcagcgccgggctcgtcgtagtaacggctgatgatgctctggctcacatggtggctgcactcctccatgtgcatgttcacgaccatcttcttatcgaggaagccgtcgccgcggccccactgggcctgggtctggccgccgaagatggccatgtcgctggccacgctgttgaggtgcgaggaagactccaggcacaccaccttcgcgccggcctcggccgcggcacgggccgccggcacgccggccgcgcccaggcccaccacgaccacgtcggcggtcagctcttcttccacctgatcgtcgctgattgcgggcgcctcgccgagccagggcagcatgcccgtgccgtcgaagccgacggtggaattggctgcgcccgtggcgccaagcgcctcgcccgcgctgctcgaagaggcggccggtgcggccgattgcggcgcgcagccggcgagtccggcccccgcgatggcggcgctgacgagcgcggctccggagaggaagttgcggcgagtgacgttcatttcagacatgagaacctccctgtttcccgtggggcgcttccgtgctgccccgtggcgtccccggcggttccgggggcgtttcttcgtcggcgccgtggccgacctgctggggctatcatggcccgtgcggcggcggcgcgcatcaaccgccggggtcgaatcggggttgaatgcgagccgcaacggcgcttcttcgacgggtggaaaaggcgaaatcacggttgaatgagcggcaaaaccccagatggagtatcgtccgttagggttgaatggccgtttgtgcccggtatttcgacggggtcgcgcccaggtggtctttcttgtgccataatgcccctggaagggaggatcgtgaccaaacgcaacgccatagggatacgtccggagcatatccgctttgcggtgggctacggaagcgtcagcgcctggggcgttatgatgctctatgtgccgtgggccgcgtcgcctggcttctcgttgcaggcgcttctgtccatggtgcccgggctcgttgtgtgcctggcatgcctgcttctcttccggcagcacctgtcgctttcgggacgcacgccgcttgtggccggggcggctcttcttacgagcttggggacccttgcgtgtacctatccgaccctggccgccataccgggcgcttttgtgacaggcatggcactttcgggtgggttcgccatcttgctcatcatggcgtggttcgacgccttcgcgcatattggcccgcgcggcatcatcgttctctccggctgcagcatcgtcgtgacggcactgggaagctggttcttcgtccaatgcgacgacgccttggccagtgtgctcacctcgcttctgcccatgctgtccttcgtgcttctgcctttggcgtctgcgaaggcgccgaagagcggggaaggggaggagacgccaggggccttgcaaggtagcgcgacggccgttgatcgggaagaagagcgcggggagcgtgcccccgagcgcttgctggtgcgaacgccgggacttgccgatgtgctgtcggcggcggtgcccctgcgcacgctggccggcttcgctatcaccttcttcgtgctcagctccattactaccattgtcgtcggtcgcgataatctctcgcagctcggtgcgccttcgctcgtcattccgctggcagcggcgctcttctccgtggtcagcggctttttcgcccgcgggaagatcgatccctccattctctacaaagtgctgctgtgcgcgtctgcggccttcgttttcttttcgttctacctgggggatgtcaacggcgcgctcacgctgcacgcccacaacatcatcgaggccatggcctgggtcgtgctggccttgggtgcgaagaagacgccggtggcgccgcatctggtctttgccgtgggctggatcgccgaatgcgtcggcaagacgctgggccagctggtggcgcctttgctcgccggagacccgctcgtgcttatggccgtcgtcgtcatgctggtgcttttgggcgtcggcttcgccttcagcgagggctacaacctgcttgacatcgatgacgaagaggggaaggccgaagccctcgcaaccgagcgcgtcgagactgccgaaggtgcgagtgcgaacgctcgccgcgaggcccttcccgtcgcggtcggggaggacggagctcctgcggctgcatctgaaacagcagcttctcccccgtgtcgttccgagcgcagcgtcgcaggcgcggagtcgaaggatcgtcccgctgacggcgagagcaccggcgagcattcttgcggtgagcgcccggatctctacgccgccttctgcgccgagtacgacctctcgcctcgcgaaagcgaggtcttccgcctgtgggtcacgggccacggtctgaagtacatccagaacgcgctgttcgtctcggagtccacggtgaagtcgcacctgcgcagcatctaccgcaaatgcgacacccacaatcgcgacgagatcatcgccctcttcgaacgcgagacgtcggagttcggttgacgcgtccggcgcggctggttgcgagcctgcggccggcttctgcggcgagggctacaccgatgctggcgagccctctttcgtgagtgctgccgagcagccgctttccacgctttctgccgatgcggacacggcctcctatgccaacctgcgccgcctcgtgaggtcgggcgccggtttgggaacgattgatccgggtgtcgtgcgcatcgaggagatgctgaactactacgactacgactacgctgcgcccgcagagggcgaggatttcgcgctgaccgcccgcgccggggcgtgcccctggaacgccgaaagcgagctggtcgtgctcgggcttacggtaggacaggcggccacggaggcaccgccgacgaatctcgtgctgctggtggatgtgtcgggttccatgggggacgccgagaagcttccgcttctgaaggagtccatggcgcgtatcgtgaaagggctgcgggcggaggatcgggtctcgatcgtcacctactccggcgtggaagaggtggtgctcaagggggcgtgaaccgcatcgtcatggcctcggacggcgatttgaacgtgggcatttcctccgaggatgagctgaacgccttcgtcagcgagaagcgcggccagggcatctacctctccgtgctgggcttcgggtcgggaaattatcaggacgccaagatggagacgctggccgatcacggcaacggttcctgtcattacatcgattccgccgacgaggcagcccgcgtctacgagcgttttctggccgtcggggcggttcctgtggccgacgatgtgaagctgcaagtggaattcgatccgcggatggtggagagctatcggcccatcggctacgcgaaccgcaccatggccgatgaggacttccgcaacgacggggccgacgcgggagaattgtgcgctggtgccgagctgaccgtcgcctacgaggtagtgctcaccgacgagggacggcgtcgcgaaggggatgagccgtggctcacgtgcgcggtgcgctaccagccggccggcgagcgagcgggggaggcgccggcagagcagcggttcgctgtgggccgcgagagctggtctgccgagcccggcgacgactggtcgttggccgcggcggtcgtcgagtttggcatgctcgcccgggactccgagttcgtcgacacggccacggccgatgatgcagctgctttggccgaaagctccgcaagctcgctggatgccaccgaccgcgccgctcgccgcgagctaaccgacctcatccgccaagcgcagcgcaacgccgccttcgatggcgtcgttgctgctagctgagggttctcgttggaggattcctgctaaattatgcttctgcctcgagggagctacttgtccgctgccagggcgtacctactcgtaccccatggcagccagttggtcttcgctcaggccgaaataatggcccagctcgtggataatggtcttgccgacctcttctacgatttcctcgcggctgtcgaagcagcgctcgtggggtcccttgaaaacggtgatgacgtcggggatatcgtcgtcgtagccgttggcccgttccacgatggaaagcccgtcgaacagccctaaaaggtcgtcgaattcatcttcgccttccgcatcccgcatctccgcgccccattcctcgtcgtgtcccaaatggtaggcgctcggctcctcttcccatacgatggccacgttccgcaatgcttccatgaaccgctcgggcatcgcatcgagcgcctcggcgacggcgacttcgaattcctcatcggtcatgcgatacatgggaacctccacgtggttggacactgttcgcgtcaaatggtgacagtgtgcgcgattgcaattattgtagtgtagcagctgtcacttccttggcgtacgctgtgtcttagctctatggggaattcgacatatctcggcactcctatgccaggatcacaggtttggtattgcgcggggcgcagcgctggcgagatcggaggtttggtaccgcgctgcgggaaaatactggcgaaatcgtgcgtttggtatcttttcgtggcaaaatcttaagtttggtacccgctcttgggcgaatctcgaggtttggtacctgcgaaagccgcgcgagagaatcgcgaccaggcatttcttcgggcgcagggaaccaaatcgccgaagtcggcagaaatcagggaaccaaacttcgatttctgccagggccacgcctccagaggagccaaacggcctgatttgccaaagttgccgtcatcgtcgggcgtcgttgaagtatttgtgcgaaacacggcgcggtgagggggtttgtgttaccattgcccgcgcattcaaaggcgcgcggagggtccgggcgcactgctcgtcggaagtgacgcgccgacggcaattatcgacaggcaaggtgaccccttgcccgaccttatggaggaattgcatgaagattctgggcatgggagttcccgagctcctcatcatcctggtcgttatcctgctcatcttcggcccgaagaacctgcccaaactcggcagcgcgctcggcaagacggtgaagaacctgcgcgagggcatgggcgccggcgaaaaggacgtcgaggaagccgccgacgacgaggaagtcgtcgaagtggtggaagaggtcgtggaagagcctgctgccgctccgaagaagacggtgaagaaggtcgtcaagaagaaggccgagtaacctcgctccttcgacaacatcaggtaagaacggtggtgcgcccgctgcgttaggcgggcgcaccaccgatgtataagagagaaaacaggaatcatcatggctaacgacaactacgtgctgaccgaagaaggcaagaagaagctcgaggaggagctgcactacctcgagaacgagaagcgcgccgaaatcggcgagcgcatcaaggtcgctcgcgagttcggcgacatctccgagaactccgagtacgacgacgccaaaaacgagcagggcatgatggaggcgcgcatcgccgagatcagccgcatcctctccgaggccaccgtcgtgaacgcgccgaagcgctcgagcaaggtgaatatcggctccacggtgaccgtggacatgaacggccgcgagcgcgtgttcaccatcgtgggcggcgccgagtccgacgcccacgagggcaagatctccaacgaatcgccggtgggtcaggcgctgctcggctgcaagaagggcgacgaagtgacgacgaccggccccactggtcgcgacatcaagctgaccgttatcaagatcgagcactaggagaccggaatggccgaagcggtagaaatcatcgaagacgatcccatcgaggtgcgccgcgccaagcgcgaggcgctgattgccgcgggcatcgatccctatgggcactcggtcaagcgcagccattcggtaggcgagctgaacgagaagtacgcgcacttggaggacggcgagtccactgaggatacggtgctcatcgccggccgcgtcatggccaagcgcgtccagggcaaaatcgcgtttctggagctgcgcgagtccggctgcgacattcagctgttctgccgcatcaatgcgcttggcgaggaggccttcgcggcgctgtgcgatttggacgtgggcgactggattgccgtgcatggcaccatgatgcgcacgaagcgcgggcagctgtccgtggcggtggattccttcgagctgatgagcaagtcgctgcgacctctgcctgagaagttccacggcctgacggacaaggagacccgctatcgccagcgctacgtggatctcgtcatgaaccccgaggtgcgcaccaccttcgagcgccgtttcaagatcgtctcggctatccgccgctacatggagggccagggctactacgaggtggagacgccgtttctgcatgccatcatcggcggggcgaacgcgaagcccttcatcacgcacttcaacgcgctcgatcgcgactactacctgcgcatcgccacggagctgccgctgaagcgtctgctcgtgggcggtttcgagaaggtgttcgagatcggtcgccagttccgcaacgagggcatggatccgtaccacaaccccgagttcaccaccatggaggcctacgaggccttcggcgacctcgactccatgatggacctcactgagggctgcatcaaggccgcggccgaggcggcctgcggcacccttaagatcgagtaccagggaacgccggtggatctgtccggcgactggcgccgcgcctccatgatggagctggccagcgagcacgccggcgaggaggtgtccttcgaccgcacccgcgacgagctggtggccattctggaaaaaaacggcggccatgccgaggcggcctggggcaagggcaagctcatctccgagatcttcgaggccgtggcggaggagaagctcatccagcccaccttcgtcatcgaccatccgctggagatctcgcctctggcgaagaagcatccggagaaccccgaactcacccagcgcttcgagctgttcatcctgggccacgagtacggcaacgccttcaccgagctgaacgacccggtggatcaggccgagcgcttccgcgcccaggtggcggccaaggatatgggcgacgacgaggccatgggcttcgacgccgactacatccgcgcgctggagtacggcatgccgccggccggtggcgtgggcatcggcatcgaccgcttggtcatgctgctcaccgatgcgccgtccattcgcgacgtgctgctgttcccgcacatgaaggacgaggtgctcggggacgggaggccggtgtgcgcgactgagaaggcgccggccgagggtgcgccggctgcaacttgcgcggctgaggccgccagtgccgagccctccaagcccatcgacttctccagcgtcgtcatcgagcccctcttcgaggacgaggtggacttcgacaccttcagcaagtcggacttccgcgccgtgaaggtgaaggagtgcatcgcggtgccgaagtcgaagaagctgctgcagttcaccctggacgacggcacgggtaccgaccgcaccattctgtcgggcatccacgcctactacgagccggaggagctcgtgggcaagacgctcatcgccatcaccaacttgccgccgcgcaagatgatgggcgtggcctccgagggcatgctcatgtctgcgattcacgaagtgcccggcgacgatggcgagcccgaggagcgcctgaacctcctcatggtggacgaccgcatccccgccggcgccaagctgtactaggcgctcgcgctgacgactccaggacggcccccttcgcaactgcggcgaagggggccgtcctttgtatccagcttcttgacggctggtgaatgacgacgcgttgtggggcgccctctgcttagaatgggaggggagaggaggtgccccatgagcgccacggatgacgaacagcaacgcgacgaagacgacgagcgcgccgcccgcgagcggcgagagcgccgcgaggagcgccggcggcgcaaggagcgcacgcgccgcgagggcctgcgtcggcgcttgggcgactcctccgcgttcaaacgcgagaccttctacgctctggagaacctgaatcgggcgaactggccggcgaagatcgtcggaggtgcgctgttcgcgctcatcctcctgaatgccgtggtggtgttcgtctccgctcagccggggctcgatccggtagcggccaatattatccagggcttctaccggttctcgactgtgtgcttcttcgtggagtatatcgctcgcatctggattgccgatttggcctacggcaactgtacgccggctcgcgcgcggctgcgctatatcttctcgccgtggggcatcatcgacttcttgtccttcgggccgaatatggcggcgtggttcctgcccgtcacgcccgcgctgcagaacatcatcagcgtggtgcggttggtgcgcctgataaagatctcccgctacatgcggggtctgcgcaccatcggtcgcgtcatttcgaaacactatcacgagatcgtagcatcgtttctggtcatcgccatgctcgtggtagtggccagtgtcgtgatgtacgagatcgagcacccggctcagcccgacaagttcaacaacttgctgtcgggcatctactgggccgtgaccacggtgaccggcaccggctacggcgacttggtgcccatcacgccggcggggcgcattgtgggctcggtcatcatgtttctctcggtggcgctcgtggccattcccggcggcatcttctcggccggcttcgtggccgagttccaaaatgccaacctgcgcaagatcgagcgcgacgtccgccgcgaggacgcccgtcaagacaaccgcgacgaggaggagcgcgccgccgacgaagaaaccgagcatgacacgcctcctccctcacaacgtgcccacaaatgacggcttctcggggtggaggtttagcaattcaagatagggagtgctaaactgcacgggaactatttaccgtgcccgacgtgtcagttttaccagagagaaagcattcgcagaagggcaccaacccaaggaacgaggcaaccatgtcattcgagaaattcacggacaaggcgcgtaaagtgcttgtcctggctcaggatgaggcgcgctcgcttcaccagccctacgtgggcaccgagcatatcctgctcggcctcatccaggagaaggacggtcttgccgcccaggcgctcgaccgcttgaacgtcagctacgacggcgtcgttcaggccatccgccaggtggtcaccatcgacgaggacaccgacgtctccggacatctctccttcacgccgcgcgtcaagcgcgtgctggagaactcgctgcgcgaggccatgcagatggggcagtcctacatctccacggagcacttgctgctcggcatcgtgcgcgagggcgagggcacggcgctcgaggtgctgggacgcctgaacgtctccggcgacgatgtgcgcggggcgctgaacgatcttgtgggccaatcgccggtctacgccgggcgcgcgggcttcgatggcccggcgagctcgtcggattccatgctcaccgagttcggcaccgatctcaccaagaaggcccgcgagggcaagctggatccggtcatcggccgcgcgtcggaaatcgagcgcgtcatgcagatcctctcgcgccgccagaagaacaacccgctcattctgggcgagcccggcgtgggcaaaaccgccatcgccgagggcttggcgcagctcatcgtggccaaccaggtgcccgacatcctgcgcaacaagcgcctcatcacactggacgtctccgcgcttgtggccggctcgaagtaccgcggtgagttcgaggaacgcctgaagaaggtcatcaaggaggtcatggacgccggcgacgtgctgctgttcatcgacgagatccacaccatcatcggcgccggctccgcggaaggctccatcgatgcggccgctatcttaaagcctccgctgtcccgcggtgagattcagatcatcggcgccaccaccctggaggagttccgcaaacacctggagaaggactccgcgttggagcgccgcttccaaccgctcaccatcaacgagcccaacgaggaacaggccgtgcgcatcatggagggcctgcgcgacaagtacgaggcgcaccacggtgtgcacttcaccgatgaggcgctgaccgccgccgtgcagctggccaaccgctacatccaggatcgctacctgcccgacaaggccatcgacgtcatggacgaggccggcgcccgcatgcgcatccgcaacatgacgctgcccaaggagctgcgcgacttggacgagaagctgcggaaggtgcgcgccgacaaggatcgcgccatcggcgagcagcagttcgagcgcgccgccgagctacgcgacgaggaagaggccctgaagcaggagcgcgaagaggccgagaagaagtgggaggaggacacctccaagaccgtgcagaacgtcacggttgaggacatcgcggatgtggtgtccatgtccaccggcgtgcccgtgagcaacctcaccgaggccgagaccgagaagctgcttcgcatggagggcgtcctgcacgagcgcatcatcggccaggacgaggccgtgaccgccctttccaaggccatccgccgctcccgctcgggcttgaaggatccgaagcgccccgctggttcgttcatcttcctgggcccgtcgggcgtgggcaagaccgagctttccaaggcgctggcggagttcctgttcaactccgaggacgcgcttctgtccttcgacatgtccgagtacatggagaagcacacggtgagccgcctggtgggttcgcctccgggctacgtgggcttcgacgagggcggccagctcaccaaggccgtgcggcagcgcccgtactcggtggtgctcttcgacgagattgagaaggcgcatccggatgtgttcaacatcctgctgcaaattctggaggaggggcgcctgaccgacgcccagggccgcaccgtggacttccgcaacaccgtcatcatcatgacctcgaacgtgggcgcccgcgacatcaccaccacgaccacgctgggcttctcgaactcggggcagaacgggctttccgacaaggagatcaagagccgcgtcatgcacgagctgaagaacgccttcaggccggagtttttgaaccgcatcgacgagatcatcgtgttcaagagcctgaccgaggacgagatcgtgcagatcgtcgacctcatggtggccgagctgcgcgagcgcatgatcgcccagaacatgaccatcaacctggacgacgccgccaagcgtctcgtggccaaagagggtactgacaccgctttcggcgcgcgccccttgcgccgtgccatccagcgcatgctggaggatccgctgtccgagcagattctcgagggccgctggacgagcgggtcggtggtagacgtcaccgtgtccgaggacggtgaggaactggtgttctccgagggaaccggttccatcccggcgcctcgcaagcgcgactccatcgcccgtgacgccgagcttttgctgacgaactacgacctcggccacgctggtgtgggaagtggccgcggcgccggtacccccgccggttccctggccggtggcgagtagggtcgttttcggctaccggcgcttgcccgagcgtattgccgggcggccgcgatttgctcggtgcacttgtggctcgcctcgcaggctgggtcttgacgagcgcactgcgctccggttgcgcagcatgtgcggattttgctgtatggcaggaggctctccggagcctcctttttacgtgctggcgttgccgtcccagcattgccgcctcggcgttgtctcggcgcgctgtttccggaaacgctgcggtaaatgccagttcgaccccgaaatggccgacacttcgcttcagaaaagggccccaattcggccatttcgcccttcaactggcatttttgctcatggttgaaggccatttcgcccttcaactggcattcaggtgagaaaattcgaaaatccctctgatacttgcttatactataagcaagtatcagagcgtgccctcgtggtcttgcgctcgaacgccacgctatcgccatgggaggatttatgccgaacatcatcgatcccgtcaccgagccctcggttcttcgcgagccgtctttttgcatggatgagctcgatttcgatgccctgagctcgccgcttctgcagctgcaaggcaaagtggacaaaaagccccagacggcggccatcattctggccggtggcacaggggagcgcttcggcaaagaaggtggcaagcagctggtggagattgccggcaagcccatcctcacgtggtcggccgaggccttcgacgcggtaggcgatgtggggctcatcgtcatcgtgtgccccgaggagcgcatgcacgagtacttgtcccgcgccatcgacccgtttcccttcgtcacgcccgtggtgctcgcgccctcgggggccattcgtcaggagtcggcgttttcggggctcgagatggtgggcgacgagtacgagtacgtggtgctgcacgatggcgcccggccgctcgtgtcgccggatctcatcgagcacaccatcaacatggtgaagggcaacttcgatgccgacggcgccattgtggcacatccggcggtggatacgctgaaggtcgtggaagacggcgtggtggtgggcacccccgaccggtcggtcttctggaatgcccagacgccccaggtcttccgcgcgggcatctaccgccgtgcccatgcgagcgcgctgtccgacggcttcgtgggaactgacgactcgtcgctcatcgagcggcttggcggcaaagtgctgatcgtggaagggaagcgcgacaatatcaagcttacggtgcccgaggactacgtgcttctcgccagtgccgtccgcactatgcttttgaactccgagcataggtaacggtcgacgaagacggcattttctgcagcaaatcgcgagttataagcgtctggagcttgtttcgttcgagacattcaaaagctgcgaatttctgacctggggttttgctgggcggaaaacctggaatgcggcgaagcgcatcgcgcagacgcttataactcgcgatttgctgcaaaatcggacccttccaatgaccgagagggaaatgggaagggttctcaacggcgatatacatgatggaggaaggcggaaggagccggtatgaacgacctgcgtaatcttcggacggggctgggaatggatgtgcacgcctttgctccgggccgcaagctcatcttgggcggggtggacatcccgcaccatcaggggctcgacgggcactccgatgccgacgtgctggcccatgccatctccgacgcgctgctcggtgctgtgcgcgggggcgacatcgggaagctgttccccgacaccgacccggcctacaaggatgccgactcgctcaagctgctcgccgaggtggtccgcttcgtgcgcgagcgcggtttcgagatcatcgacgtggacagcgtcatcgccgcccaggccccgaagctctctccctaccgcgagcaaatgcgcgagaacctggcagcggccatgggagtgcccgtggaaaacgtcggcgtaaaggccaccaccaccgagcacttgggccacgagggtcgcgaagaaggcatcaccgcctacgccacctgcctcgtgtgccgcatttaacgaccatcagaacctaacctgaaccttcgactacgcaccggagaaggcggccttctacgtcctgcgcgtccgctgggtgagcgacgtcggcgaggtgagccccgcgagcgtcttcgctgagctgcaggcgggcgagtgggaagacgctcgctcggccgcctcgttgccgacacgactgaagcgccagcgcgagctgtgcagcttgacccaggaggagttggctgagcgatcggggataagcttgcgctccatccaaatgtacgagcagcggcagaagaacaccaatcgtgcctccgctgaggcggtctaccgcctcgcctgtgccttgcgctgctccatggaagggctgctgcagttttaggttgattctcgcaatcccaaaatctctcccaagcgtcgcacatttctccgctctcaagcgtattgtctgtgaaaggccttttgtggaaggtggcgacggtgcggcaagctagcggccgcgctgtcgccgctttctcgacggacgagaaggaaacccgtggacaaccgccagtaccgacagatcgtcgacgactacgccgacatggtgtaccgcatcgcgctcaaccagacgcggcgcgtgcccgatgccgaggacgtgatgcaggcggtgttcctgaagctctacgagaagcagccagcgtggcttcgcgacggggccgagcgcgatagcgggcgagccatggcggtcgaggccgagcgcggagtcgctcgcgatgagcgcctgcgcgcgtggctcattcgcgtcacggtgaacgagtgcaaaagcctctggcgcagtctgtggcgccagcgagtcgagctgcgggacattcgcgacggcgctgcccctcccttcgaggagcccgctttcgccgacacgtcccacgaggcgctgtacgcggcgttgggcgcgctacccgagaagtgccgcatcgtggtgcacctgttctacttcgaggacatgggtacccgcgagatcgccgaggtgctgggcatcaaggagcccacggtgcgcacccgactcgtccgagcaaggaaactactgaagcagtcactgaaggaggcgtgggaagatgagcaactcgagccagtacaaagccatgatgggcgaggtccatgcctctgctgacctgataggaaaggttaagggcattcccatggagaagacgaagaagcgcacggcggccctgaagttcgtgaccgccacctgcgcggcgctgctcggcgcgttcgtggtcaccaacggcgtctgctacgccgccacgggtgagacctgggtggagaaggccacggtctacgtcaacggcgagccggtggagatggacgtgcagatgacccagaacggcgagacgaccatcggcgaggtcacctataccgtggaagacgccgacggcgagggcggcgatattcagatgaccatgatctcggaaggtggggatttcgacgacaccacctacgaagtccatgactacaccgtggaaggcgccgagggcggttccccgaacgccaccaacatggtgcttgaatctgccgacggccacgtggttctggcccccgagggcgtcgagcccatcgatctgactgaccagctcaaggccaacggcaccgccacgggcacctacgacaaggacggcgccacctacgtctaccaggtgagcggcactttcggcaactggcacgcctccgtgcaccttgaaggcggcgacgccgaagccgttccggccgccgctgcggaggcacggtagagttccgatagaacggttgtagagttccgccgcgcatcgtgcgcgtcccctataatctcccgcacgggccttgtcccggcgggagatttttgcgtggaaggaaacggctatggcgaagttgacggatcgtgccttcgatcatgcggtagtgcgtctgcgcgatggccagagtgcgctggacgcgcttcacgagcatcgcgaggagctggcaagtcagatgctcgcgcggctggcgggcagtgacgagttcgctgctatgctggagcgcaacttctcgccctatcggcgactcatgacctactacgagtgcgccatgatggaagttgagacgaagttccgcgtgctagatgccgagttcggcttgcagcacgaccgcaatcccattgagtccatcaaatcgcgcttgaagagcaccgacagcttggcgaagaagctcgcccgcaagggcttccccatgtcggtggactccatcgagcagaacatctacgatgttgccggcgtgcgcgtcgtctgcaccttccccgaagatatgttctccctggccgagtcgctgctctcccaggatgacgtgcgacttatcgagcggcgcgactatgtggcctccccgaaaccgagcgggtaccgcagtttgcatctcattatcgaggtgcccattttcctcgagcgcgagaaacgctcggtgaaggtggaagtgcagctgcgcaccatctccatgaatttctgggcatcgttggagcatcagctgcgctacaagaagaacctccccgacgaggaggccgcggcagtggccgcagaactcgccgacttggccgagactgctgccgatcttgatcgccgcatgcaggcgctgcgcaactacttggacgacggggaagagtaggggcagacagtgctcgtgctcaccttgtagcctgaaagtctcgcactccatatcattcccgatcggtaatagaactgcccaaattttcttttcattcccgatcggtaatgatatagttctcgatcggcagatattcccgataagtaatgagagcatcatgcgcattaactcgatgaaggtcctggggcaagccattcgtgcgcgtcgcaaagagctcggctattcgcagcaagagatggccgagtattgcgggtgcggtacgcgcttcgtttccgatctggagaacggcaaggagaccattcagtttggcaaggccctcgtcgtcgcttccatgctcgggctcgatctgagcatagacgtgagagggggagcgcggtgagtgacttgctcagagtgtataaagggggtgtcttagttggcgttctcgacaagggcgatggcgagccgttttatggctttacctatgatgaggcctatctgaaaatgtcatctgccatgccgctgtccctatcgttgccgctttcggctcgccgctacacaggtcatgaggcgatgccgttctttgaaggccttcttcccgaaggcgatgttcgcgaggcggtggcgcggcagttccacgtgtcggccctgcggcccatggagctcattcgcgtgctcggcaaggattgcgccggcgatgtcgttgtgttgggagaggacgatagctgcgatttgccggaggaggcggcttacgttccgcttcccaacgcccttgaggaaatcgcccgctacccttacggcgctatctcccggcttcgtgcggagtaccgcctatcccttgctggtggtcaggagaagattgcgcttttccatgatgatcgcgcgtctcttgtcgaaggctggtttgcgccattggcgggagcgccgtcgagccatattatcaagccccaggtaaccgatcgttttccgtttctggccctcaacgagttcatgtgcatggaagcagcccgggccatggggttcgatgttcccgatgcggccattgtcccgggcgagcatcctcttttcgttgtccgccgttacgatcgcgaaagggcggaggaatccggtgaaggcgcaccccagatgttacagcgggtgcaccaggaagacttctgccaagctatcggcctcacttcgggggagaagtacgagacgcaaaaaacccatcacgctcaggatatggcagccattttggtaggctatgctgtatgccccattgaggcgctcggcgagttgttcaggagaatcgccctgaactacctcatcggaaactgcgacgcgcatctgaagaactactcgctcttcattcgcgaaggtgcagcggtttctcttgctcccgtctacgacttggtgtgcgcgacgatctacgacgggcgctttgggggcgagttgagtaaaagcatgggggttcgcattggcgatcacctcaatatagacagggtgacgcccagcgatttcatcctgcttgctcgggatatgcgccagccgaagcgagtagctacaacgattcttgaggaattggccggttcgttggaagcagcattcgatgcggctgctgccgaatcggcgaagtttggcgcgaacaacgacgcctacgccatggcgcaacgcatcgtagagggcgcagccaagcgcaaggacgtcatgctaaaggccgttggcttgttgagctgatgttcgtgctttaatcgcctgtgtcgcaaaggtgagggtgctttcttgcgctacaatggctctcattctgaatgaacgcccgaaggagcttttatgatcaagctgtacgatacgcgccgccgccagaaggtggacttcgaacccgtcgagcccgggaaggtctccatgtacgtttgcgggccgacggtgtacaaccgcatccacatcggcaacgcgcgcacgttcatctccttcgatatgatccgccgctaccttgcttggcgcggcttcgacgtcaccttcgtgcagaacgtgaccgacgttgacgacaagatcatccgccgggctgccgaggaggcgcgcacggccgccgaagtggccgaggagtacacgcgcctgttcatcgaggacatgcacgcggccggcgtgcaagatccggacatccgcccgaaggccaccgaggagatcggcaccatgatcgcgctcattgagcgcttgatagagcgcggccacgcctacgtgtcggagggcgacgtgtacttcgacgtgcgctcctacccgggctatggccagctttcgggccgcgacgtggacgaggccgaaagcggtcaccgcgagctgcgcgccgacggccagggcctggaggagcgcaagcgcgacgagctggacttcgccctgtggaaggcggccaagcccggcgagccggcgtgggaatccccctggggcgagggccgtccgggctggcacatcgagtgctcggccatgtccgagaagtacctgggactgcccttcgacatccacggcggcggggccgacctggtgttcccgcaccacgagaacgagcgcgcccagtccgagtgcgcctgcgacagcacgttcgccaactactggatgcattccggtatgctgcagatcgccaacgccgagaccggcgagaccgagaagatgtcgaagtcgctgaacaacttcctgctgctgcacgaggtgctggagcaggtgcgtccggcggccctgcgcatgctcatgctgcagagccactaccgcagcccgctcgtgttcggcgagcagcgcgttgccgaggccgacgcggccctcacgcgtatcgagaacgccgtgaaggccctggactggctgctggagacgggcacgccccgcggcgaggcggccctcgagccggagacggcggcggaggtgctcgcggccacgttggatgccgcggccctttccgatctcgtggccgttctgcgcgacggtttcaccgaggccatggacgacgacttcaacgcgccggcggccctgggcgagatcttctccttcgtgagcgacgtgaatgcgctcgtggccgacgcgaagacccttgcggccgaagaggctgcttctgtgcgcgaggcgcgcgacgccattgtggagctcatggacgtgctcggcatcgacgtggcggccgccgaggtaggggaggcctatccggtggaagtggtggcgctggccgccgatctggctggctacgacggcgacgatccggagatcgccgtggtgcgcctcctggaggcccgcgcaacggcccgcgccgagaagaactgggccgtggccgacggcgtccgcaacggcctggccgacttgggcttcatcatcgaggacaccccgcaaggcgcccgcgttacctacgaggggtaagcggcacgcgacaagaacagcgcaaaagaggggccgggcgccatggctgcccggcccctctctgctctttcttgcaggcgctcatgtatggcataatgagcgcctgctaaggaaagagagttgaaacgagggctccatgtccatgtaccagcgcgtcttgaaggcgctctgcattctgttagtcgcgtacgccggatgcctggccatcgccggcttggcgcttatcggggtggccgttgcggggacgagcctcgatttgcaaattgacggggcggccgtgacgggcgcggaggcgatagcgctttgtgcggcggcgggcacgatattcctcgttgtcggcttgctcgatgtgattgtggccatcctcgggttgcgcggggtgaggcgccccgaggctctcaagcccttcatcgtatgctcttcgatcattctggccctcaacgttgccaatacggcgtacagcgcggccacgggtgcgctttcgggtaacaatctcctcaacttgctgctgccgcttttcgttcaggtgctcgcgcttttgtgcgccggtcacatccgcaaagagcatgccgctggcacgatggccgcgtcgcagccgatcgattgcgggccctccctcggcttcatgcgcgtcatccaggtgctgttcgcaattaacatcatagccgtgctggtcagttgcgccactctgcgctcgggtacctataccttgggcttcagcgaagtgctcgatatggtgaacctcgtgttcgacggcgtgagcttctggctcatcatgcagcgctcgcgaggcgcccgctactggatcattggtttctcggcattcaacatcgtggcaggtacgatatacaatgcggtcactggccagttcaatgtgctcgatcagctgggggcgtcggccttcgatatcgtgcttctgctgtacttcctgttcgcgaagcgtccgcgccaggtgctgaccgttgagttcacggcgcgccgctgcaaggagctggtggtgcgggcatgggatttgtggcagccgcgcacttggtcgttctggcgcagcatgatcatctacttctgcctgttcagcatcgtgggccactggatggaggcgggtttctgcctgttcattaaatggggaatcgtgccgggcatttacgatccgaattccggcatttggcacgactacctgaatccgttccccgtgtacggcgccggtatggtggcctgcgccgtgctgctgttccctatcaaaaatctgctcgaggaaaagctcggcggcatcgttaagccgctcgtggccagcttcatagtgaatgcgctcgtctgcgcggtcatcgagcttgtcttggggctcacgtcgaacatgcccgacgccaacggagtgtaccctctgtgggattactccactatgcccttcaacttcatggggcagatctgtccgcagaacaccctcctgttcggcgtggtggccacgctcatgacctgggtggtatacccggcgctgcagcgggagtacctgaagcttcccgagcccatgcggcagacgttcttcgtggccgtgctggcgttctacgccattgtggtctgcctgtacgtcatcaatatcacgctgccggtgtaagcgcgagagctgtaatccgagtcgcgcgatgggccacgcttgagggcgacggtgcaagtgttgcggttcaatctggaggcggctattggcgcgaacctttcgatccggggccttccggacgtattgctgcgcttttcgggtgaagcggcctgctatcgcgtagaatggacgcatggacgaacgaattcatatggagcttttggcgccggcgggcggtatggagcagctgcgggccgccgtgcagttcggggccgatgcggtatatttggcggccgaccggttcggcatgcgggcccgggcggcgaatttccgcttggacgaaattcccgctgcggtggctttcgcccacgaccacggcgtgaaggtgcacgtcacttgcaacatcctcatgcatcctgacgacatcgacgagttgccggcgttcttccgcgccctggacacagccggagtggacgccttcatcatcggcgatttgggcgccttcgccgtagccggcgaggtggctccgagggtggagcgccatgtgagcacccaggcctcggtggccaatgcggcggcagctcgggtgtggcattccctcggcgcgagccgggtggtgtgcgcccgcgagatgtcgctcgccgatatcgcccgcctgcgtcaggacgcgccgccggacctggagatagaggccttcgcccacggcgccatgtgcatggccgtctcgggccggtgcctcatcagcagctatctcaccggccgctcgggcaacaagggccactgcacccagccctgccgctggagctatcagctcggcaccgctgcttttgaggagttcgcgccgccggaagctcctacgggattccttctggaagaggagaagcgccccggcgagttcttccccatcgaggaggacgaccgcggcaccttcatcatgaacgcgaaggacatgaacatgctcgcgcatctgcgcgagctggcccgcgcgggagttgattccatcaagatcgagggccgcaacaagaaggccttctacgtggccagcgtcgtgggcgcttaccgccgcgtgctcgacggcgagccgccggcggcggtggccgacgagttattggccgtgtcccaccgtccctatggcaccggcttctacttttccgaggccgagcaggctcccgcttacgacggttacgaacaagagaccatgcacgttgccgatgttgcagcgtgccgggacggttttctctatgtgctgtgccgcaaccgctttgcggaaggagacgagctggagatcctcgcgccgcacgaaccgagccgtccgctcatcgtgcgcgacctatactggctttccatcttcggtcccgacaatcacgacgaggacgcccccgctactgcgggggaggccctttctcgcgctaccgccgccgattgggaagccgccgccgtggccaaccgctcctgcaacctctaccgcattcgcttggccgcagcatccgatggggctgcatccggcacgtccgacacgtccagcgcgtccgacatgcgcgacgcgtccaacgtctccgtcgcgtccgacatgcgcgacgcgtccaacgtctccgtcatgtccgacacgtgcggcgcttccggtggttccgcgccatgcgccccttctctcagcgctcacgtgtccgaaggctccttccttcgcaagcgcaccttccgccgttccgcccgccacggctaggccgtcagcaatttcttcttcgtctcggagagaaaaaagcgagttgttagggtttgcctatgggaagcgaagggccgttgagaatcaaataaatgtaatcattttaataataaatgaaattcgtttttcaagacgaatagatccgacagggttccggcagcaaaccctaacaactcgaaaatatcgtcctcggacgggtgaaaaattgttggggctcaaacgagtgaaaaatttcccgggcccgtgatcaatcgcgaagttggcggcgccgcgcgcaagagccgactccgatggcgagggccatcgcggtgacgagcaccgccgccccgacggctcgatcgccggtctctgccaggcggtgtgggcccttgctggtctcctcgctcggggcttcgccgtcctcctcgcgccgggatttcgccgcacccgaaggcttatatcccactgcgagccctcctcgctttcgcggactatttcctctactgcggcgtagcgctggtccgccggaagtttcaccgggtctttcagttccaaggtgcggcagccgggttgctccaggacaaaggactcttcggctgcgagtttgccgtcagcgggcacctcgtcgccatcgtcgaggagatacacgcgcacggttgctacgaccggtgcgtacattgtgaagagcgtggtggcccgcaagagttccggccccttggcggtaaagacgttggccgccgctgcgggctcatttgagttggggatcaggcccgcttctgcccagcccaggtaagtcgtactggtgattgaagtcgtagctctcctcgacgggcgtgacgtgccatgaggcgaaattgccaagggatcggtcgtaataggacacccaaaaaagccggagccgttcttgtcgggatcaatgtcgccatcggaaagcggcattctccaggaggaggcccagtaactgtgatatcccctatctgcggcgtacatttgggccgagccccagctgttcttcacaagccatgcaccgtttccgtcgggtgcgcccgcttggccggagaagttggacgccggatagtcgtcgtcccagcccacgatggtcacgacatgattggcctggtagggatcggtgctgttgtactggcaccattcgttgtagttcgtgaactcgccggtgcctgcatcgtccggaaggctctgctcggccgcgattcctacctcgacggcccccgtttcgatgagcatccgcttgatgtcgtcgttggcctcggcgtcgaaatggtcgaatgtcagttggctctcaccgtcgacgatctcctcgcgaaacactgagggctcgtcgagccatataaaatcgctcacgcggtagcccgtgtcctcgaaagctcgcgagacgttcccgtccaggccccaattggcctcataggtgatgtcgaaatccgaccagtcgtcgttgtcggtggcgaaggcgaggcctcctccctcaagggggcgctggaatgtgtaggggatcttttcctcggtcgtcaagctctgccacgcgaacatctgcacgggcagcgtgatggaattggcgcccgttagctgattcgcgcccgttcgggggctcgatgtagagcccctctcccgcctgcccgggtgccgacgcctcgctttggcgcgcgaaggcgtaccacgcgaaggcatgctccgagagatcgggcttagagggcaggtcgtacagctgaggagtagcgtgctcttgcggcgctggcagcgtaccggcggttcgtttctggtgcttcaagatggaactctcgatggcgctggctgaggcaaaggcccagcagacgggaaaagccgcctggtctttcggatacgtgaccgttccttcattggtgaggtaataggccgagggcaggggatctgctgcggctatcttctcatggatgacgtgcgctggtaagcgggatgtcggtttttctcgtcatccccgagcatccatgctaggatgcttgaaaagcggcaggaacgggaagggatgcgatgatcaccgtcggcgatgtcatgaatatgagggccttcgacagcatttggctggcgactccctgcgacggggcggccgcgcgcgaggtcacgggcgtgggcaccctcgaccacgagccgttcacgggcggctacgaggtgttcacccagggcgaattcgtgttcaccacgctgggtttcgccggcgtgcaccccgatctggccgaagaggcgctgctcgcgctcatcgagtgcggcgtggcggcggtggccgtgaagcccgtggtgctgaaggagctgtcgcccacggtggtgcaggcttcggctgcgcggggcgtgcccgtgttcttctacgaggggcgctatatggaacgggtcatcgccgacctcatgaacctgctcgacgacgatgccgccgagtgggagcgcaaccacctgatcgacctcattctggcgccctccgacgagcacgccgtgcgctccacgttcttcaccatcgcaggggtcacgggagccaccatccagtgtttggccatacgccccgtcaccgacgacggggcatcgctgcgcgcattgcagaaggtggtggaaggggtgcttaccggctatggtgagcgctgggacgacgtcgagcgcacgttcgtgtgccgctaccgcgagatgcttctggggttcgtctccttcaagaggcccccgctgaaggccatcgctatctccgatgccgacctggcgaaatgcatcgccacggccggccccttggtatgcggcatcagccaggaggtgagcctgggggagggggatctggcggtgcggcaggccatggccgccctgcgcacggccgagcgtgaggacgcgggcatcgtgcggtggacgaccctgcgcttcgacgccttccgcgcggcggcccgaagcgaccgcctgtacgcgcgtgccgccgaccttctgcgctcgcttctgttcgattacgatgctgagcacgacgccgacttgggtgcgacggccgaggcgttcgctgccgcctatggcgaggtgagccgcacggccgaggcgctgttccagcacccgaacaccgtgcgctaccgcctgaagaagataaaggaggtcctctccgtgcaggacgcgaccgaccgcgaactggcggcgttgctcgcgctggcgtacctgacatagctcggctcccgcatcattggggctatcggcgcgagggagggggcatgctgtttctttcatcgtcgcgaagccgatcttgcagacgataatcttgtgcaactgcacaaatagaagcgcacgggttcatccgatcgaccaaacgatgacctttatcgtgggcctaaactaggcgccgtcgaaaggagaaccatcatgaaactgttcaacgaccaggccgcagccgccgttgcttcccttgattccgccgacgccgcctactgcgccaagctggagcagcgcttcgcccatatgggcatcagctcaaaggcagcctccagcgccgtgcaatcgctcgtcgaggccgatgccgtgccccaggttggcgtctgggccgccctgccctccgcgttcaagggcctcttccagaagaaaaccgaggtgaagcctgtcgcctccgaggcgttcgaggcttctctgtccgaagcgctcgcctagattcgtcgcagcagacgtctccgcttcgccgcatggtgccacctcttcgttggccccgtgctgccgcgcttgcatctgccgcgcgatcgcctggtgcgctgagtcaccgactctcaagccttgccggctgccaatttcccacccagggcagcctcggttttcccaaacgcaaagcgaccccgccaaagtcggcggggtcgcttcaggtaagttcaagtaagttcaggtaagtaagagtaggtcgggagttggcggagggggtgccgcgcgcagttcattgaagtgcattaggaaatgccggaacccccgacgagccctgcacttcaatgctgtttgagcacggcgccccctccgccaactcccgaccggacaaccagggttagtcttcaacctcgacgagctcgatgtcgaagttcaggtcctttcccgccagctcgtgattcatgtcgaaggtgacgatgccgtcttcgatggactgtacgaacacggggaagggctggccgcccgggcccatcatgtagacggtctggccgacgggcagctggtcggcgttggggatctgatccacgggcaccttctgcaccatggcgtcgtcgcgctcgccgtaggcctcggcggcggggatgtgcacggtcttcttctcgccgacggccatgtcctccacggcggcgtcgaagccggggatcatctggccggccatgcagacaaactcgatgggctcgccgcggtccacggacgaatcgaacttggtgccgtcgtccagcgtgccggtgtagtgaaccttgaccttcttgcctttgttgctcatgagagctcctttccaaaagatgtgcgcctaagtctagcggaaggggccgtgcggggcggggaaggggcgcaacctgctccaagttgtcataaacggagctttttgcctttgggatggctccagtgggggtatgatgaaaacaacaacgaaaaagctcaactttgtgcatatgctcaagaaagagccgaatacgcaacgggcatagaggaaggaagtttctatgggctatcgagcgggagttgtgggagcggccggtttcgccggcatcgagctggtgcgcctgctgtcgcgccatcctgagttcgatctggcggcggcgacctccgacgcgctggcgggaacccctatcgcgaaggcctaccccgcgttcaccggcgtgaccgatttggcgttctctacccacgaggacaccgacttctctgccttcgacgtggtgtttctggcggtgccccacaaggcagccatgggcatggcgcccgaccttatggccgccggcgtcacggtcgtcgacctgtcggccgatttccgcctgaaggatccggccatttacgagaagtggtacgcgcctcatacggccaccgatcttctggcccaggccgccttcggactgcccgagctcacgggcgacgagttggccgccgcggccgagcgccgcgctgccggcgaggccgtgctcgtgggctgcgccggctgctacccgacggccacctcgctcgctgcggcgcccgctatccgcgcggggctcgtggacgcggcggcgccggtggtggccgatgccgtctcgggcgtgaccggcgcgggcaagaaggccaccgagcgcacccattactgcttcgccaacgagaacctggaggcctacggcgtgggcacccatcgccacacccccgagatcgagcagatcttagggctggagggccggctcgtgttcactccgcatcttgccccgctcaaccgcggactgctgtccacggtgacgctgccgctggcttcgggggctgcccccactaccgaggagctcgtggagctgtatcgcgacttctacgcggcaagcccgctcgtgtccgtcatggacgccggcgtgcagccgcgcacggcgtcggtggcgggaacctgccgcgcccaagtgggcgtggcggtacaccccgccggcatgattgtggccaccggcgccatcgacaacctggggaagggcgcggccggccagggcgtgcagtgcgccaacatcgtgttcggtctgcccgagacttgcggtttggaagagatcgccaaccccgtgtaggactggaaggggacgagggccgtgtcggcgccgtcccgtgggaaagagaggacctatgaccgagaacgacactttcgctttcgatcctgagggcaatgcagccagcgcgctcggcttttccgctgtgggcgtgcacgcgggctttagggccgacccggagcgtctcgacatggcgctcgtcgtggccgacgagccctgtgcggcggcggccaccttcacgaccaatgtgttctgcgcggcgcccgtgcgcgtgtcccgcgagcacctgaacgaaggaggcgccggatctcccgcctacgggtgcgcccgggccgtcgtcgtcaactctggcatcgcgaacgccgccacgggcgagatcggtttggaaaacgcccgcaagaccgccaagctcgtcggtgaggccgtgggctgcccggccgacgaggtgctcgtggcctctacaggcgtcatcggccagcacctgcgccttgcgcccttcgcggagggcgtgccggcggcgcttgcggccatggcgaaagtggccgacgatctcgccggccgcacatcccagggcctgacggcggcccgcgccatcatgaccaccgacacctgccccaagcacggctcggtcagcttctccggcgacggcatcggatacccgggcgtcaccttcacggtgggcggtatgtgcaagggcgcgggcatgatcatgccgaacatggccactatgatcgccgtcatcaccacggatgtgcccatcgcggcgcccgatctgtcgcaggccctcacggcggcggtgaacaagagcttcaacaaagtcacggtggactccgacacctccaccaacgacacctgcttcgccctggcctccggcgctgccgcgcccgacggccccgccttcgcgccgggcaccccggccttcgacgccttccagcgcgccctcgatcagcttgcgacgacgctcgcccgcaagatggccgccgacggcgagggggccacgcgcctcatcaccgtcaccgtgcgtggggccgccacggctgacgacgccgatgcggctgctcgtacggtggcgaattcgccgctcgtgaagaccgccgtctacggacacgatgccaactggggccgtgttgccgccgccctcggacggtccggtgctcgtttcaatcaggaggacgtggatatcgatatactgggcctgcccgtgtgccgtgccggtctggtggtcgatttcgacgaagaagaggccctgcggcgcttcgaagaacccgaagtggccatcgaggtggatctgcacgcgggggaggagtcggccacgatgtggacctgcgacttctcgcacgagtacgtgacgatcaatggagactaccgctcatgaaatacgctaacgaagcccgtgctgagggcgtgcccgtacgcaccggcgagatcctctacgaggccatgccatggctcaagcaggtgacgggcaagaccatcgtcatcaagtacggcggctcggccatggagaacccccagctggctgccgaggtcatggccgacatcgtgcttttgaagatcttgggcgtgaacccggtgctcgtccatgggggcggcaaggccatcaaccgcgccttcgccaagttcgatctgccggtggagtttgtcgacggccagcgcgtcaccaccgacgatgccatggatcttgtgcgcatggtgctcacgggcgaagtgaaccagcagctggtggaggccatgaacgcccatggcaacatgggcgtgggcgtgtcgggcaccgacgccggcatcatcgtggccgagcaggccgatccgcggctggggcgtgtgggcaagatcacgcgcatcaacacgccgctcatcgaggacttggtggccgacgactacattcccatcatcgcctccatcgccattggcgaggacggtggctgctacaacgtgaacgccgacgtcgctgccggctacatcgccgcggccatcggcgcccacaagatcatcttcctcaccgatgtggacggcctctacgagaactaccccgaccccgactcgcttatcgccgagatgtcgctgggggaggccgaggccatggtgcgcggcgacaagctggcctcgggcatgattccgaagctggcgagctgcgtgcgcgccctcgattccggcgtcagcgcggcccatatcatcaacggcacggtgccccatgcgcttctgctggaaatgctcaccgactccggcatgggaaccatggtgggcggcctcgcttccgcccagttcctgaacgtctcgccggtgagcaaattcgccgccaaactcattgaaaaccgttaggagcatcccatgactctcgcccgcgaaatggctttggaatccgaatacgtgatgggcaccttcgcccgcaagcccgtggaattcgtcgaaggccacggcatgacgctcatcgacgatgccggcaacgagtacctcgatttcctctccggcatcggtgtctgcagcctcggccactgccacccctccatcgtgcaggccgtgagcgatcaggcggccaagctcatccacgtgagcaactactactacatcgagcaccgcggggaagtggcccagctgctgtcgaacatgctgaacgcctacgtcgatgagccgagccccgagacgtggaagaccttcttcgcgaactccggcgccgaggccaacgagtgcgccatcaagctggcgcgcctgtacgcccgtcgccgcacggaagccgccggcaaagatgccgagctggccccgcgcctcatcgtcacgctggccaagagctttcacggccgcaccttggcgacgcttgcggccacggcccagccggccaagcaggaggccttccagccgctgccggccgggttcacggccacgcccatcaacgatgtggaagcgctcgagcgcctgttcgagacccagggcgaccgcatctgcgccgtcatgatcgagtgcatccagggcgagagcggcgtacatccctgcaccgaggagttcgtcggcgccatccgccgcctcaccgaagagtacggtgcgctcatgatctgcgacgaggtgcagagcggcatcttccgcacggggctgccctacgggttccagaacttcggggtgctgcccgacatcgtcaccatggccaagggcatcgcctctggtgtggtggccggcgcctgcgcggccaaaagctccatcgcggcggcgttcgcgccgggcgatcacggcaccaccttcggcggctcgaacatcgccatggccgcggcccatgtgacgctgtccacgctgctcgccccgggtatgggggcgcagatcgagtcggtcggcgcctatatgcgcgagcggctggcccggttgccccacgtgcaggaggtgcgcggcttcggccttatgaacggcatcgatctcacccatgaggcgccgtcggctcccgatgtggtggccgccggcctggaagcgggcctcgtcctgaacgccaccggcccccatacgctgcgtttcctgcccccgctcatctgcacggaagccgacgtggacgtgctggttcagaagctggagcagttgctgtaaaacgccatcacatcgagccctcatcgagcgacccttgcacaaaaagcttgggtcgctcttgtatataagcgcacaatttcccaggtagaataagcaaatttttgtgcaactgcacagcacagtgcacaattaaattgcgccgtttccgcaaaaattttgaaattcggggttgacgactcataaattagggcataatgccgtcaaccgcacagccgagggcttacggcgcaaggcgccagggctccataactcggacggctgcgcgtacttgaaaggaattgtcacgatgcaggcagcagctctcatagcttccaagcacagcggaatcgctgctgctgccccgtgccctcagttcctcgccacggcttacgtcgaccgacgccgacgtacctcttctctgcgacgccgacgcgcgtagcagatcttttcgcgcgctcagcgcaccgccgcgcggccccgcccgggtccgccaaaggccgtggcctcccgaagttcctcttcgaaacctcaagcaccatcgcgcaggaaccctgcgcatcgtcccagacgcgacttcacgccacgcctttccatcgcaaagcgagccgggcaccccataaggaaacccaaaagcagctcccgacacgaaaggcaactcccatgaccacgacgaactcatcccttcacgacgccccgcagatctccgccaagccggcccccggcgagaaggaacggtgcgtgctcgcctactccggcggcctcgacacctccgtgtgcatcaaatggctgcaagaggaatacgatctcgacgtcatcgccgtcgtgggtgatctcggccaggagcacgagggcctcgaggccatcaaggccaaggcgctcgccaccggtgccatcggctgcgcggtcatcgacatgcggaagaccttcgccaacgagtacctcgcctgcgccatggccgccaacgccatgtacgagaacaagtacccgctcgtgagcgcgctctcgcggccgctcatcgccaagcacctcgtggcggtggcccatcagttcggcgccaagtacgtggcccatggctgcacgggcaagggcaacgaccaggtgcgcttcgagtcctcggtgctcatgctggatccggcgctcaccatcatcgccccggtgcgcaactgggatctcggctgccgggccgacgaaatcgagtgggcggcggcccatggcgtgccggtgaaggccacgaccgacaagccctattccatcgacgacaacctgtggggccgggccatcgagtgcggcgtgctggaggatccctggtgcgagccgccggcggatatttggacgatgacgtgcgatccggcctgcgcgcccgacgagcccacctacgtggaaatcgagttcgatcagggcgttccctgtgcgcttgacggcactccgatgagcttcctcgacatcatctacgccatgaacgatatcgccggcaccaacggctacggccgcatcgatatggtggagaaccggctcgtgggcgtgaagagccgcgagtgctacgaggtgccgggcggtctggccctcatccaggctcacaaggccctggaggatctgtgcctggagcggggcgtgctgcaccacaaactcgccatcgagcagacctgggccgagcaggtgtacaacggcctgtggttctcgccgctgaaggaggccttcgacgccttcctcgcccacacccagcaatgcgtgtccggcacggtgaagctgaagttcttcaagggttcctgcaccgtggtgggacgcaagagcacctactcgctgtatgatttcggcctggccacctacgatgccgacgacgctttcgaccaccaggccgccaagggcttcatcgacatccacggcctgtcctgcaaggtgtgggcgaaaaaccggctcgccacgggcgcgcgcatgccctcctacgacgacgtgaacctcgcgaacactgcttacggcaagatgagcgccgtggtggaggaagccgaggagattctggaaggcgccgacgccgtcacggcctagggacgctcaacgagcacgacaacgaggggagcgggcggtcttaagggccgcccgcctggcttaccgatttaccgaggagacactatggcactgtggtctggaagattcaccgaaggcgccgatgcctttacccagcgcttcggggcgtcgctgcccgtggatcagcgactctacgccgaggacatcgccggctctatcgcccatgctaacatgctggccgcccagggcatcatcgcgaccgccgatgccgaagccattgcggaagggctccagggcattctggccgacatcacctccggcgcgctcacgttcgacgtgatggaaagcgaggacatccacatggccatcgaggcggagctgacccgccgcgtgggggatgccggggcgcggctgcacacgggccgctcgcgcaacgaccaggtggccacggacacgcgcctgtacgccaagcgtcgcgccggcgagctcatggccgccaacgtcgccctgcgcgaggtgctcatcgcccaggccgaagcgaacttcgacgtcatcctgccgggctacacgcacctgcagcatgcccagccggtgctgttctcgcaccatatgctcgcctacgtgcagatgctcgcgcgcgattacgagcgcctcgccgccgcccgcgacgccgccgacgcgtgccccttgggagccgccgctttggccggaaccacctacccgctcgaccgcttcgccaccgcagaggcgctcggcttcgaccatcccatcccgaactcgctcgatgctgtgtccgaccgcgacttcttgctcgacctcatctacgcctgtagcgtgtcgtgcttgcacctgtcgcgtttgtgcgaggagatcgtgctgtggtcgtcggcggagttcggcttcatcacgctgtcggacgcctactccaccggttcctctatcatgccccagaagaagaatcccgatttcgcggagctcatccgcggcaagtcgggccgggtcgtgggcgatctggtggccctcatgatgacgttgaagtcgctgccgcttgcctacaacaaggatctgcaggaggacaaggaaggcgccatggacgccgccgacaccctggagggctgctacgtatgcgccgccggcatgatcgccaccatgacggtgaacgccgacgccatggccgcccaagcgaagaagggatatctggccgcgacggatgtggccgattacctggccaagaagggcctgccattccgtcgggcccacgagatcgtggggcatctggtgcttctgtgcgaccagcgcggctgcgatttggaagacctcacgctggacgatttcaaggcggagagcgatctcttcgaatccgatatcgtggagtgcctgaacctgcccgccatcgttgccgcccgcaccaccttcggcggcacggcccccgaagcggtgcgcacccagctcgccgccgccaaggcgcagctggaaggtgcttgcgcatagctcgctttcaaagggctgaggctcggcctgttccatagctgcaaataagatgctcgtgattattataatcacgagcatcttacgttcggggggcagactgctgcgctgtcctctgtgcatttcctggtggcggctccatcttatgaaccctccataactcattggtaaaatggccagacctataactgatggaggttaattcgtgggttctcgcgcaatgaagggccgtaagggcacgaaagtaaagaataagaaggtcattgtcctgtcggtgttgggcctcatggtggcctttatcgcggcgggcgtgttcggcgtggtgacgctgtgcaactcctggctggaggatctgcccgactaccagaacgccgacgcttacaacacggcgcagccaaccatggtttacgcatcggacggcacgacgctgctcgccgagttccagctggagaatcgcgacccggtggctctcgaccagattagcgagtacgtgctgaagggcaccgtcgccaccgaggacgagcgcttctacacccactccggcgtcgattacctcggtgtggcccgcgcgctcgtgaacaacctcatgggcggcgagctggagggcgcctccaccatcactcagcagttcgtgcgcaacacgattctttccgacgagatgcgcgacatctccttcaagcgcaagatccgcgagatgtacatttcccagaagctggaagagcagtactccaaagacgagatcctgctcatgtacctgaacactatcaactacggttccggtgcctacggtatcgaggccgccgccgagcgctacttctccaaggacgcgaaggacctcacgttgaacgaggcggccacgctcgtgggcattccccagtcgcccacctacaacaaccccatcgattatccggacaactgcctgaagcgccgcaacaccgtgctcgaccgcatggtgtccaacggggttatcacggcggaggaggccgacgcggtgaaggccgagcccatcgagctgaacccctccgagccctccatgacgggcattctggcctacccctacttcacgagctacgtgcgcaaccagctgaccaaccccgagggcaagtacgcctattccacctccgagctgttcaagggcgggttgaaggtgatcacgacgctggatatcgaggcccagaccgccgccgaagaggctgcggccgaaaaggaagaggaggccggcgatcccttcgaggtggccatggccgttgtgaaccccgagaacggctacatcgacgcgctggtgggcggtcgcgattacgagagctctcaggtgaacatggccacgggcgagggcggcgcgggccgtcaggccggatcgtcgttcaagctgttcacgcttttggcggctatcaacgagggcatcgacccggaaacgctcatcgatgccggctacaaggttgatttggagggcggcgagcctgtctacaacaacgataaggccgattacggcacgcgcaccatcaagagcgctttcggcgtgtcgtcgaacacggcgtttattcgcttgcttctctccgtgggcgtcgataaggtgatcgagatggcccacgccatgggcatcacctccgatttgccggcggtggcgggccttaccctgggcatcggttcggtcacgccgctcgaaatggctgacgcctatgccacggtggccaacggcggcgtccactacgatccggagtgcatcatctccatcgaggacaagaacggcaacgtcatcgtggacaacaccgaccccacgggcgagcgggtgttctctcgcgaagtggctcgggcggcgctcgactgcatggaagtggtcatcgacaacggcactggcaaggcggctcgtcccgataacggccaggaggccggaggcaagaccggtaccaccgacgacaagaaggacagctggttctgcggtgtgaccccgcagtacgccgtggccatctggctgggtgaccgctccgactattccgaggcccaggcgacgactacgacggcggccagcgtcttcggcgatttcatcgacaagatgatctccccgacgcagacggtgaagttcttcgaggcggagaagcccgagtacaagaaggattaccgcgacgaggacaaccatatcggcggctactactcttccaagaaaaagaaggacgacaccgaggtgaccacgaagcaggatgacgaagagacgcccgagggcgacggcgacgagaacggcggcaacgaaggcggagggggcaacgagggcggcggcaacgccgagccgacgccgacaccgacgccggagcctaccccggagcccgaaccgacgccggagccgacaccggagccgacgcccgacccagccccggacggcggtggcggcgagggtgcctaaagcagcgtagccgcgacataattgttgcgataccgtgacggcggtacgggcccgggggcgcggactgctatcatagcgaacgagaaaccaaagcctcgctcgacgaggctgccctgagcaagcaaccggtgcctcaaggcaccgaagacgggagaaatcatgaggaaacgtaccatcgcgcgggttttggctgtggcccttggcgcggctttggccctcggcactcttgccggttgtcagtcgccggccaccggagccaccgaccagcagcaggccaatcgcacctacatgaccaaggtcaaccaggcggtggaggagctgaacacgcgcctcggcgaattcgacgaggcggtggctcaggagagcgtcgtcaatatgcgcaacaaggccaacagcgccttcgaggccattgacgctctggcggccatcgatacgccggacgccatgaaagacctgcagacgaactacgtcgacggctgcaacaagctgaaggatgccctgaacagctacatcgatttgtacacggagatcagcagcgcaaccgaggaggcgcccttcgacttcagcgcctacgacgggcgcgtgaaggaaatccaagacgcctacaacgagggcatcgacaaactgaaggccgccgacgaagaggctttgaagctgaatgaagactaatcaagtagaactgctggcgccggccggcaatatggcggcgctgcatgcggcggtggctggtggggccgatgcggtgtatctggggctcgagaccttcaatgcgcggcgcggggccgacaacttcaccctggagacgctgcgggaggcctgcgacttcgcgcatctgcgcggggtttccatctacgtcaccatgaacaccatcatcctgcccgacgaggtaggggaggccttggaatgcgtgcgccaagcttaccgcgccggcgccgatggcttcatcgtgcaggacatcggcctggccgcggagatctcccgcacgctccccgaagcgtcgctgcacctttccacgcagatgaacacccacaacctcgccggcgtgcgcgcggcggcccgcttaggggccgagcgcattacgctcgcccgcgaggtgtcgctggacgagatcgcccttctgtgcgcggcggcggccgaagaggggatggaagtggaggtgttcgcccacggcgcgttgtgcgtgtgctactcgggccagtgcttcatgtcctccatgatcggcggccgctcggccaaccgggggatgtgcgcgcaagcatgtcgacttccctatgagctgcagaacaaggctctgcagaagagccttccctcgccgggcgatcacttgctttcgccccaggatctgtgcacggtggatcgcgtggacgacctcgtggccgccggcgtggcgtcgcttaaaatcgagggccgcatgaagtcgcccgagtacgtcttcgccgtgacctccgtctaccgtaaagctctcgatgctgctttggcgaaggagaacgcggctatcaccgatgccgatcgcgaccgcctcaccgacgctttctcccgcgggtttaccacggcctatctggacggcaaacgcggcaacgatatcatgagttaccagcgtcccaacaaccgcggcctgttcctcggccgcgtcgacgaggtgcgcgatggcgctgcctatttgaagagcgcccatgccctgacagaaggcgacgtcctggagttctggacgcgcaagggcaacggcacgctgacgctggggccggtgcgcaccgacaagaagggccgctaccatttgccgctggaaggcaaaacgcgcacggtgaaggccggcgaccgcgttttccgcgtccgcagtgccgaggccgccttcgaagacgacgcccgtgagccccgcgtgcccctcgtcggcaccgccaccctccacatcggcgagcctcttcgcatggaattccaccccgccgccgaggccgatatcgaaggcgctccccgcaccaccctcgccgttgcccgtcgcctgcaagctgccttccccgatggggtttccggtgtcgccgaaggcgcgcccgtagaggcggctcgcacccgcgccgtctccttcgacgacgtcgccgcccacatcgaccgccttggcaacacgccctaccagctggtgaaccttactatcgatatggacgacggcgtcggcatcggcttctcggccctgcatggcgtgcgcgcggcggcgctggacgtcctcaccgaagcgcttaccgccgagggccacgggcgcactctgccccgcactactccgcgcgagcctctgcccgcagcgcgtcccaccggctgccgcgtggccgtcacggtcacgaaccccgcttgcgctcgcgccgccaagcgcgccggcgcgcacctcatctacgtgccggctctgaactaccggcgcggcgaggcggttatcgccggccagaagaacgccgctgccgagcaggccggctaccccaagggctgcattcccatcatgcctgtggccgatcacgaggccgttggcggcgcgcgcgaagcggtcgtcgatgccgacgtgtggaagtatgctgccgagggcaagccgcttctggccgaaagcctcggtgctatggaacgggcttccgaagagggggcgctgctcgatgtcggctcccatgtgcccattaccaacgggctctcgctggctgtcgctagcgagttcggggccgcgcgcgtgtggctctcgccggagctcacgctgcggcaaatcgaagaggttgccaaagatgccccggtggagctgggcgtgctgctcatcggcgcccaggaactcatggtcaccgagcactgcatgctcatgagccagggcccctgcgacgagaactgcgccgaatgcccgcgtcgcaagagtccccacgtgctgaaggatcgcaagggctacgagttcccggtcgtcaccgacgccatgggccgcagccacctctacaacgcggtggaactggatatcgcctcgtcgatgcccgagttgctcgcggctggtatctcctcctatatggtggacgccaccctcatgaacgccgaggagacggcccacgccgtgggacgcgccattcgtgccctgcatgtggcccaaaacgacggcaacgccatcgcgaagatgcccaacaccacctccggccacctctaccgcggcgtctcgtagcggctgtgctagaatttccagcacttgtataaaggtatcgcgatattaaagaaaagcggaggcatcatgcttactcctgaggaacaactgcacattatcaaatccggtacggcgcagatcgtgcccgaatcggcgctcctggagaagctcaagcgcggcgtgccgctgaacgtgaagctcggcgtcgacccgacggcccccgatatccatctgggccacgcggtgcccctgcgcaagctgcgccagttccaggatctggggcatcaagtgacgctcatcatcggcgacggcacggcgctcatcggcgacccgtccgggcgcaacaccacgcgcccgcagctctcgcgcgaaaagatccaggagaacgcgcagacttatgtggatcaggcattcaagatcctcgatcccgagaagaccgtgctgcgctacaactccgagtggattctcgatttgaacatggagtcgctgctgaagcttctcgcgaacttcacggtggcccgcatcttggagcgcgacgacttccacaaccgttacacgtcgggccagtccatcagcttgcacgagttcctctacccggtcatgcaggcctacgactccgtggtcatcaaggccgatgtggagctcggcggcaccgaccagctgttcaacctgctcgccggtcgcgagctcatggagaagatgggcatggagccccaggtctgcctcacgctgcccttgctcgagggcaccgatggcgtgaagaagatgtcgaagagctacggcaactacatcgggctcactgacgaggcggccgacatgttcggtaaggtcatgtccattcccgacgagctcatggtgaagtactaccgcctcgcctccaccgaggctgtggacgaaatcgaccgtatcgaggcagggctggctgctgacgagctgcatcccaacaaggtgaagcgcgcgctcgcccgcaacatcgtggccgcctactacgacgacgtggccgccgaggccgccgaggccgacttcgacctcaagttcaaggagcacggcttcccggccgacgcccccatcttcgcgcccgatctgacgccggatgagaacggcctggtatatgtggcgaagattctggtagatgccggcgtggctggcaccgcctccgaggcgcgtcgccttatcgacggcggcggcgtgaaggtcaacggcgaggcgcttgcccccaaagcctacaacgtggctcccgaggttctcgccggcgccgaggtgcaggtggggaagaagaagttcgtgcgcttcgagtagcttttgaggccggcgtaagtgtgctgaggtttgccggctgagtgccagcggcgttttccgcttagaggagttttttccagaaatgaaaaaagttgcaaggattcgcgtggctgaatcgtgttacttgcagagacggaagaaaactcaaggaggaacctgaattatgaagaagtctaccttcgttgttgtcgtggtgctcgcgttggcgctttgcgtgccggcggtggctttcgccgccctttccccgtcgtcgccgatggcgatcggctcccgttcggctgcggcgacgtgtccgaattacgccgaccgcaatgccaacggtgcgtgcgaccggcatgagaatggtgcgtgccccggctacactgatgccgacggcgatggcgtctgcgacaactaccaagacggcgcgtgctctgggtatgtggatgccgacggcgacggcatatgcgacaactgcgccggtgctggagcgaactgcccgggctacgtggatgccgacggtgatggcgtctgcgacaactacggcagcgggaacggccagggtcatggccatggccgtcaccatggcggcggtcacggctgcgctcgctaaacaaaccctgcgagtgcgtgagatctgcccctgacatagaagagactatggcgcgtcatggcgataccgtgtggcgcgtttgccttacggcgctttgtcgccatgcggatgccgaggacgcgttccagaattcatttctgaaatacgcactcgcagatgatgttcagtttcgcgaagaggaacatcgcaaggcgtggttgattcgcgttgcttcgaacacgtgccgcgatatgcggcgggcggctgcgagtaagaatgtgccgcttgatgagacctcattcgaatcgctcatgtcccgcgatgaggaggctcagcccgattcgcgtgtgaaagaagtgctcgatgccatgagcgacctcgatgaccctccccgcactcccgtgtatcttgccctgtacgagggctacacggctccggagatcgcctcgatgctcgacgcccccgtgaataccgtgtattcctggattgcccgcggcaaaaagacgctgaaggaggccctctcatgaccgatcttgagcagcgtatccgtgaggcctacgatgcccagcatgcttccgatgagcttcgcggacgcacgctggcccttctcgaggaagagcggaagaggcggccggacgctccttctgttgaggtgcatcgcgcctccctgcggcgtcgcccgcgagcgcgtgtcgtcactgcttgggccgcatgccttttgcttgcgctggccctcgtcggtgcctatggcgtgtatcgtgcgccgtctgctttcgtggacattgaggtgaatccctctcttgagcttacggttaatacgttcggtatcgtgattgaagccgaagcgctcaatgatgacggcgctgtcgtgctcggcgctgttgatatgctgaatcgcccttacggcgacgtcatcggcgcgctgctgtcgagtgacgcattcggctcttatgcggagaaagatgcgtttattgacgtcaacgtggtttctgagaacaatcgcttgggggagagccttgttgctcaaagcgacgaggcgctgtcctctgcatcctgtgaacatgcttgtcgccgtgccgatagcgccactcgcgatgcggcagctgcggcgggtttgggcgttggtcgctatcaggctgcccaagagctgatgagcctcgatccctcatatacgctcgaggagtgtgcttctatgactatgcgtcagctgcgtgatcgcatcgacgcatgccacagcggccaggagggcgattcctacgagggccacggacatggccaaggggctggtaagggatatggccacggccgccatggcaattaaacgaggcgacgcataacgtattgcgacggagtttcggctgtctcaggggccattcgtgcggatgaaagatttttcaaattccccccttgcgcgaaatcccgggagctgtatcatatgcgagctgcctttttcggaagtgcggaaggcggcgcccccggcggtccgggcggcccgtcgggcgggaaagcgaagttgtcgagatttcgtgaaccgcttgacgggggatgcgagtccctgtaaagtatttccttgcgccgctcgcgagggcggcggggcgggaagcctcccgcggaaccttgacaaccggatactgaggatggaattcgagagacggaacaaacgtcttctcggatgtcagacggacattcgagagagcaagctttaactttttccctgtcaggggcccgaggccccgacggagagttttaaaaacagaatcacactcacatgatctgtcggcggcggagacgccgccttcgaacggagagtttgatcctggctcaggatgaacgctggcggcgtgcttaacacatgcaagtcgaacgattaagacggcttcggcc

SEQ ID NO: 10574 - DNA, 6662 bp, Unknown
  gut microbiota DNA sequence
ttattccaattatcttttctcaattttggcttcctgtccgataaatacctttgtatgctaaaagcacgaatttcttctgggtatcagcggaggcgctcgagcaccggggagccgcacacgagcggccgggcgcctccgtggcaaaagggttttaggttctttagaaaggaaggcctatgatcaccgatctcaagatcaacgaggagaagaagaaagagtactacgaaaaggggtattggacgcacgacaccatccgcgacgtctgggagcgccaggcgcaggcgaacgccgacaaggaatacgtcgccgacgaccagggctgccgcatgacctacggggaagtggacgacgcagcaagccgtctggccgcgtggctcgtgtcccagggcataaagcccggcgacgtggtcaccctgcagttcccgaactgggccgagttcaccatcgcctacgtggcctgcttcaaggccggcgccgtcatccagtcgctcgcccgcaacttcaacggggccgacctcacctacgccatgaacctcgtggagagccgcgcctacatcgggcccacctccttccacggcgtcgattacgagcagcagatcctcgacatcgccggcgacatccctaccctgaaggtcatcgcgctggtggataagaaggcccccaagcagaccgacctgcccaccgtggccgagatcgttgccactaccgagcccctcgccgagaaggtggccgtcgaatccgaccaggtggcgtgcctgctctccacctccggcaccacgggcaagcccaaggaggtcatgctcacccacaacaatatcctgttctccgagcgcgtcttcgtggagggtctcgagcgcaccgccgacgacgtcatgtggatgccggcaccgctgaaccacgccgtgggcttcttccacggtctcgtggcgccgatgcttctgggcggccgatccgtgctcatgcaggacttcgccgtgaaggacgccatcgacctcatcaacgccgagggcgccacctggtccatgtgctccacgccgttcatctacgacatcgtgaagtacctggacgcccacccggacgagtcgctgcccacctacgtgctgcactcctgcggcggcgcgccggtgcccggggcgctcatcgaccgcgcccacaaccacgacatcctgctctgcgagatcttcggctccacggagagctgcccgcacgtgttcgtgcccccgagcaaatgcgtggaatggaacggcgactggtccggcatccccttccccggcatcgaggtgcgctacatcgatgagcagggaaacgatgtggccccgggcgtccagggcgagcacatctcccgtggcccgcaccagttcgtcggctacctgaacgagccggagcgcaccgaccgcgcgctcaccgacgacggctggtggttctcgggcgacctgggctacatggacgaggacggccgcattcgcatcaacggccggcgcaaggagatcatcatccgcggcggcgagaacctgtcggcccgcgagatcgacgacaacctggtgggctgccccggcgtgggcgagtcggccaccatcggcatgcccgacgaccgcctgggcgagcgcatctgcaccttcgtggcgcctttgggcgatacagtgccgaccctggagtcgatcacggcctacctggaaggcgagggcgtgcccaagcgcctgtggcccgagcgcatcgagatcatcgacgagatcccgaagaccctcatgggcaaggtgcgccgcaacgtcctcaccgacgagctcgcggctcgcatggcctaaagcagccggcacgtcaagctggcacgatatcaatagggcattcctatgaaggccctctttcttactatgaccatttcgacacggtcgtttgtatgatagtaactacaaggttcgtggccgcctggggagcgatagcggccggtcagaaaagcagaaggggctgacatgatcgacgacctgaagatcaacgaggcgcttaagaagcgttggtacgacaaggggtattggacgcacgacaccatcgccgacatctgggagcgaacgagtgccgctcaccccgaccgcgaatacgtctgcgacgacacgggaagccgcctcacctacggggaggttgacgacaaagccgggcgtgtggccgcatggcttgtcgccgagggcgtggaagccggcgacgttgtcaccctgcagttccccacctgggccgagtttaccatcgcctatgtggccgtgctgaaagtcggcggcgtggtgcacccggtgccgcgcaactacaacgacgtggatctggaatacgccatgaacctcgtcggctcccgagcctacctctcccccaccttctcccacaacaccgactacgaggcgcagatcctctctgttcgcgacgccataccgagcctggccgccatcgccgtgctggacaagcaggcgccgagccactcggagcttcccaccttcgacgacatctacgggcgcttcgagcccttgcgcgagcccgtcgccgtgtccgccgattccgtggcctgcattctgcccacctcgggcaccacgggcaagccgaagcaatccatgctcacccacaacaacatcctgttctccgagcgcgtcttcacgagcgagctcgggcgcgcacaaggcgacgtcatgttcatgccctcgcccttgaaccatgctaccggcttcttccacgggctcatctcgccgcttctgctcggcggacgggccgtgctgcagcaggacttccgcccgcgcgaggccatcgagctcatgaacgccgagggcgtcacctggtccatgtcggccacgccgttcatctacgacatgctgaacgtgctggatgccgaggacggcctggccttcgacaccctgcggctgttctgctgcggcggcgcgcccttgcccccggcgctcatcgagcgcgcggcccgctacggggtgctcctctgcgagatctacggctccacggagagctgcccgcacgtgttcgtgcccccggagaagtgcgccgaatggaacggcgcctggtcgggcgtgcccttcgcgggcatcgaggtcaaggtcatcgacgaggccggcaacgaggtgccccggggcgcccagggcgaggagatctcgcgggggccgcacatgttcgtggggtatctgaacgagcgcgaccgcaccgatcgcgccctggacgatgagggatggttctatagcggcgatttatgctacatggatggggaggggcgcatccgcatcaacgggcgcaagaaggaggtcatcatccgcggcggcgagaacatctcggcccgggagatcgacgacgacctcatcggcgcgccggggttggccaactcggccaccatcggcatgccggacgcgcgcctcggcgagcgcatctgcaccttcgtcgtaccgagcgaccccgccgcgccccccacccaggacgatctcatcgcctacctgagggagcgccacgtggccaagcgcctgtggcccgagcgcatcgagatcatcgacgagatccccgtcaccgccactggcaaggtgaagcgcttcatcctcgcgcaaatcttgaaggagcgcatggaagcggagtgatctcttcaccgtcggtagagtaggctgccgctgggaggcgtgcctccacgcgcagttccgcagcgaacgaaagtgcccagtgggcactttcgccgagcgaggactgtttgagcatggaggtatacctcccagcggcagccggacaagcagcaaaaagcccgagcaccgctgatcgcgctcgggctttttgatagagacttcttttaacttatcggtactcccggtcgagctccttggcgatggtcatgcgctggatctggttcgatccctcgaagatctggaagatcttggcgtcgcgcatgagcttctcaacgggatactcctcggaatagccgtagccgccgagcacctgcacggcgttgctcaccacctcctgcatggcgtcggtgacgaaggtcttcacgatggcgccgtccttgcgcaccatctcgccggcgtccatctggcgcatgcagttgttcacgaggacgcgcgccgcctcggtcttgatggccatgtcggccagcatagcctgcaccatctcgaagtcgatgaggcgccgcccgaactgcttgcgctgcttggcgtgggccacggcctcgtcgagcgcccgctgcatgatgcccacggcaagcgtcgagatgaaggcccgggagaggttcagcgcgttcagcgcgatggacatgccgcatccgacttccccgatgacggcgcttctcggtacgcgcacgttctcgagaacgacctccgtggtgtccgacaggcggaagcccatcttgtgctccttggcgccggcagcaaggcccggggtgtcgccgtcgatgaggaagcccgtgatgccgtgggcgccggcttccggatcggtcttggcgaacaccacgtagatgtcggagatggagccattggtgatgaaggtcttcgtcccgttcaggacgtactcgtcgccgtcgagcaccgccgtggtgcgcatggcggcgacgtccgacccagcgttcgcctcggtgaggcagaaggcggcgaatccgttgttctcggtcttttccacgaagtggcgcgcctgctcctcggtgccgttcagaaggatgttgcggaaggcgacgaagttcgtgacgaaggtgtcggcgtaggcggcgtcaacccaggccagctcctcgaacatcatggcgcaggtctcgtagcttaagcccatgccgccgaactgctcggggatctccaccatgtgcagtcccaaatcgaagccccactggtacagctcgcgggggcactcccctgccttgtcggccgcggccacgtacggcatgacctcgttgcgggcgacgtcgcgcacaagcttcacgagctcgcgctgctcctcggtgtaggtgatggccataggtttcctctctctttcagccccgcggggcacttgcatgcggctctatcgcgtgccgggcggaacggggccgccggcgctagcggttctcctgcaggatgccctcgtcgaaggcatagcgcagctgggcgttcaccgagcgaacggcaccgtcgtgcagctcgggccgcacgtcgttgtacacagcctccactaaggcctcggcatcggcggggatgccgctgcgaaccgcggacaccacctgctgcagccgctggaggcggtgacggcgcgcctgctcgatgcgctcggaggggttctcgatcaccggcccgtggcccgtcagcaggcgctccacgccgcgctcggccaccaggcgcccgagcacgtccaaactcgccagatagtcgcccatgcgcccgtcgggccagcagaccatcgtggggctctgggcgaacaccacatcccccgtcaccacgagcgcgccctcttccacaagaaagcccaccgaatcgctggagtggccgggcagcggcacgacctcgatggccagcgacactccgggcaattcaaggggcccagggcccagcgtgcccgacgccacgcccagcaccggcgcgccgaagacccgacccgcctcctcggcgcactcggcgtggtcgaaatgatcgtgggtcaccgccacggcggccacggtgaggccgcgccgagcgcaggcctcggcgatgcgcccgatgcaggcggcgtcgtcgggacccggatccaccaccaggcaggccccgtcgttcggagcggcgagaatccagctgttggtgccgtgataggtgagcggcgtggcgttgggatgtcgcacgcactgggcgaaaggccccaccatggcctcgttgtccggaggcgtgaagcgcgcactcatgtctcgctcacctcgcagccgagcaccacctcgccgcacgcccgcgccaccggatgcggccgcacgtgcccgtcgaagggagcgttccacgcctcgtccaccgacgtcgctgccacgatggaggtgaggttggaaatggtcggaggcacgagcttgagcaggcccgcatcgaagcgcgccagggcctcgcccggggcgatccaggccgcctccacggcctcgctcgtgcggccgtcggcgtgctgcccctcgggcagccgcgccaggaagaaataggtatcgtaacgccgcgcctcgctttcgggagtgacccaatggctgcgcaggcgcatcagatcactgcgcagcacgagcccccgctcgcgaaggaattccccgaaggagacgcgccgcgtggccacggcttcacgttcggcagcccaatggtcttcgcgctcgtcgacgggcgcgcctccgtcgggagcagaggccagaagcacgccgctctcctcgaagacctcccgggccgccgccgtaatgacgccttttgccacggacacgggacagctcatgagacaggcccactgctccggagaaggcccggcccagggcacggcacattccacatcccgcacgtccatgccgccgccgggaaacaccacggcgtccggcgtgaaggccatggtggaggcgcggcgcagcatgaagacatccaccggagccgcatccacggtctcctcgatgggcgctccccccgccagcgggctctcgaaacgacgataatggggcttgccctcgctcaccagcataaccgtggcggccatgcgcggggccaccg

SEQ ID NO: 10575 - DNA, 30830 bp, Unknown
  gut microbiota DNA sequence
acgccgtccctccgccgcgcccgcagccgtcgcgcccaccgccttcgccgtcttctcggctccgtgcctcatcttgcccgcgctctcgctcatttttccgctcctgccaacagctcggcgatgtccctcacgggcacatcggaatctgccgataccataccatcggcgagcatggtcagacagaacgggcacgaagtcgccacgagatcggggtcggtgtcaagcgcctgggcgcagcgcgcctcgttgatgcgcgcaccggcgctctcctcgagccacatgcgaccgccgccggctccgcagcagaagctcgtcttgcgggcgcgctccatctccgccacgcttccgccggcggcacggaccacctcgcgcggtgcctcgtagatgtcctgatagcggcccagatagcacgagtcgtggaagcacacgcgcccgagcgcctctctcgcgcggggcaggcgcccctcgcgcacgagccgtgccaaaagctcgctgtggtggatcacctcgaaatgcccgcccagctgcgggtagtcccgggccagggcctggtagcaatgggggcactgcacgatgatcttcttgaccccgtaggcctgaagcgtggcgatgttctcgctggccagcatgaagtagacgaactcgttgcccattctccgcgccgcgtccccgcagcacttctcctcgttgcccaagatggcgaagctcacacccgcctccgcgagcagcgacaccaaggccgcggacaccttgcgattgcgtgcgtcgaaggccccggagcagccgggccagtagaggtactcggcatcgggggcctcggcgatggtgggcacatccagcccctcggcccacttggcgcgggtctgccagcccagcccccacgggttgccgttgttctccatgttgcggaaggtggcctgggcctccggcgggaacgcgctttccatggacacctggtaggtgcgcatcttcaccaccttcggcacgtgctccacgaaggccgggcacgcctccatgcaggcgccgcaggtggtgcaggcccacagggtctcgggcgcgatgaccgcacccacgagcgggcgatcgacgatggcgcgctcggcgtcggcgagatcggcgttctcaaggagcgcctcggacgccggcagctcgggaaccgccttcgcccccttcccgccctcgtcggcggccgcgccgttcttctccagggccgcctccttctgcaagcggtagattatgggcccccgctgctctagctcggcgcccaaatcctggatgaaagacttggggcttaggggcttacccgtggcaaaggccgggcagaggtcctggcagcggttgcagcgcacgcaggcctgggtgtcgaacagatccttccacgtgagctcctccaagcggccgcaaccgaaggagagcaggccctcgtcctccatgtcgatgaagggcagctcgcctttgggtttcagatcgcgccagtagacgccggccggcacgagcagcacgtgaacgagcttggaataggtccagtaggcgatgagcgcgaaggcgagcgccatgtggaaccaccacagcacgcggtgggcaagctcgatctgaccctggtcccagctgacgaagagccctgcgaagaggctccccaccggcgaccaggcgctccagggatcgcccgtgccggcgatgcgcaggccctccagcacgaatcccgtgacgccgatggccagcagcaggcccaaaacgacgatgtcgccgggcttggtgtcaagcgcgcggttcgcgatgcgacgcacgatgcaagccaccatggcgatgcaaaaggcagcgccggcgatgtcgacggtgagcgagaggaagtacaggtagaagtcgccttggacgagagggagccccaaatcggcctgggcggccacggtggcggtggcgataagcaggatgatcatggcgacgtacatggccacgtgcacgagcccgggcccgcgccgctcggccaccttcacctgcagaagggcgtcgcgcaccgcgccgcgcagacgctcgccgcgcctatcggagcgattctcgggctcgccgatcttccacaggcgccagcgccgcacgaagaagacgacggctacggccagcgccgcgatgaagcaggggtagattagccagtggcccgtgatgttccacagaacctcgcgtgccggcacctcgcccatgacgcacctcccctatttgcgctcgcggacggcggcctccagcagcggcaccgcctcgaagagatccgcgacgatgccgtagtcggcgccggcgaagatctccgcctcgggatccttgttgatggccacgacgcacttcgaggcgcccatgccggccatgtgctggatggagccggaaatgccgcaggcgatgtacagcgagggcgccacggtcttgcccgtctggcccacctggtactggatgtcgacccagccctcgtccacggccgggcgcgaggcgcccacggcggcccccagggcatcggccagagactcgatgaccgcgaagccctcaggccccttgcagccgcggccgccggccacgacgatgtccgcctcggccagatcgacgcgctcggaggcggcacgggccacggactgcacgatgcgggcgaggtcggctgcgtcggccggggccgcgacgacctcggcggtgcgggaggcgtcggcctcgggcaccggaagcgccttcggacgcaccgtggacaccacggtgggggcggctgcggttgcgcgctcgatcaccttggcggtgtagggcaggcgcgtgaagacgacctcgtcgccggcctcgatatccaccacgtccgagaacagcggcgcatccagggcctcggccagaagaggggccgccacgcgagattcggcgccgtcggcgagcaataccacggccggggcgctctcggcggccagccgggccagcgtgcgggccacggcctcgggggccggtgcggcctcgctttccacaatcaccacacggtcggcgccccacgaggcgagcgccttggcgtggcctgcggcggacgcgccccacacgatggcgacgaccgtcgcacccgcctggtcggccagcgcccgggcaccacccagcatctcggcatttacctggcgcaacacctcatcggcaccgttgacccctacccatatatcagccatgagaaaacctttccctaaaaaacctgcgcgaacgttggaagcgaatgagcggcgacctagaggaccttcgcctcctcggccagaaggcgcaccgtctcggccacggcctcgggcgcctctcccgccacgatgaggccaccggagcgacccggcttcagctcccgggagacgacggtcaccgttgtcggctcggacgccgcggcaaggtcggccacgggacgcacctcagcgccacgtcgccgcgcctgcatgacgtcgcgcaccgaggggtagcgcggctcggccagcccctgctgggcggccacgacggcgggcagaggaaggcgcgcggtctccacgccgtcgtccacctcgcattccgcgacgatggcgtcgccttccacggaaagacccgtggccatattcgccaagggaagccccatgatggccgccatgcgccccatgacctgggccgccgccgtgtcgccggacttccagccgcccatgacgaggtcggcgcccatcgtggaggccgcctcggcgagcagggccgcggcctgggcggcgtcgcgggccgtccactggtcgtcctcgatgagcacggccgcatcggcgcccatggccagcccgtggcgcacggcggccaggcagtcctgagagccaagcgtcagcaaggtaacggtgccgcccagctcttctttcagctgcacggcgcgctccacggcgaactcgctgtagggatcgatgaccatggtctggcccgttagctccacctctccggccccgtcaagcgctatgacggcctcggtgtccaccacctgcttcacgcaaacgacgatgttcatctcatccctttcacccgtatacggtctcttaagggtaattttacggaaggtcctttacgcgcaacaccactactcccccgcttttgtccgcaccatacggacgtatctttctatctgtcccaaaatgcacaaagccccgatcgtccgcaatgggacagatcagggctttctgggagttattggaagttcttatgcccttataagggacgttctgtccctcagggcgcggttacagcccgcaaccaatggccgccagagcgcggctcggccgagcgaccggatctactgggccgcgtgcagctcggcgtagcgcttgacgagggcctcgttcacgcagggcggcacgaactgggacacatccccgccgagagaggcgatctcgcgcacgatggaagacgacaggtacatatgctgcggcgtcgacatgatgaaaagcgtctccagctccttgtccagctggtagttgagcgccgtcatctggaactcgtactcgaagtcggtgatggcgcgcaatcccttcaccacggcctgggcgcccatgcggcgggcgaagtcgacgagcagctcgtcgaaaggctcgacgcgcacgttgggcaaatcgcgcgtgacctccttcacaagggccactcgctcctcgagggagaagagcggctttttcttcgcagagacagccacggcaacgatgacctcgtcgacaagctgggcggcacggctgataacgtcgagatgtccggcggtgatggggtcgaaggtgccgggggtaagcgcacgtttcacggcggctccctttctcttaacggcggccgcgcaaggcggctcgaacgacttggctccgacgcgcgggggcatcggacggtagcggcaccgacgcatgggcgcgccagatgctccttggaagtttacacgatgcgcagcgccccttctcctaggattcgaaaaagggccggcgcaccgctcgagagccattgtagaaaagaccgctgcggcattatatagacatattcgtaaatctgtcccattaattcgtccgaaatacgatcaatcttaccaatacttgtccaatagcatcccaattcatcggattcattgatagaatagtcccagaaaagagataccgcttgaatcattggaagaatcgaggcggccatgcaagtacacgtcatccatgaaatcgactgctccgtcgagcgcatcgaccctgccgtcgtcgaggctttcctcgacgccgagctctccgacgatcccatgctcgccgactccatctgtgccatggcggacgccatgagcgccgagctgcatccgcgcggggtctacaagctgttcaatcccgccatctgcaccctgccgccgaagtacaccgagccggctatcaagctcgtgggcacgctcgcggtcctctacggcagcgccgcctacgagcgcatgagcgaggcggagcacacggccatggtggtctccaccgtgggcaccgacgaggagatcgcccgccttcgcgagcgcctcgtgaaaagcgacatggacgccttgcttttcgacgcctgcctggaggccatggcctccctggctgctgacaagctggccgaggccgtggccgacgacgcccacgagcgcgggctccaccggggcagcaccttggagaccggcgtcgaggacttccccctcaccatgaacacgacgctcgccttcttcacccaaaccgagaagcgcttggggctcaccgccgccgaggacggcacgccgtcggatcgctggagcacctggggcgtcatcggcctgtacaacgagacccagaagaagcgccgaggctgcgcctactgccacaacgtgcgcacctgcaccatccgcaagatcggcatgacctgccacggccgccgcacccgcaagaaggcaaagcccaccccttccgctgaccagcagtaatcgacctcacgaaccttaaagggcaccgacaggtgccctttttccgcatctcatttcactggttcaaagcactcgggatgctgctcgccgccctctgcgcgcgctccggaaggtgctgatcgacgacctctgcgcgcctccaggagacgtcgctcaccgccccctgcacgcgctccggaaggtgctgatcgacgacctctgcgcgccctccggagaacgcggccgttaagaaatagcttccacttcagcagcaacgatgccgggacggtaccgactgatgtgcgtcatcttcgctatttcttttgccgcgttcgcaggaggaaaaagcgcgcagcgggcggcgagcagcaccttccggagcgcttcccccaggtcgattccaagcacaagaaaagggacccgctttcgcaggccccttccatcaaagccgtatcgcggtcgcgatttagatggtccagaggtaatccggatcctcggcagccttggcgtactccttgaggatgccgcggccggagatgtgcaccatgatctcgacggtgccgccaccgatctggaagccgcggcagtcgagcatgaggcgggagacgcgggtctcgtcggtgaagccgaggccgcccatgagctgcagggcgcgggagcagcagtcggtgagcgccggggcgccgtagcgcttcagcattgcggcgtcgttgttcaccgggatgccgttgtccatcttccagcaggtgcggtacaggaagttacgggtgttggtgagctcgatctgcatctcgacgatgtgctcctgcacgagctggaaggtcttgatgcccttgccgaactgctgacgctcgttaacccaagcgcaggcgtcgtccatggcggcctgggcctcgccgagcagctccgccagaagcacgcagcgctcccactcgaagttcttcatgagctgcaggaagcccttgcccttgatgccgagcagagcggactcgtcaaccacgacgtcgtcgaagatgatcttggagaagggcatgatctgcatgccgatcttgttcagcggctcgatggtgacgcccttggagttggcgggcaccaggtacatggacatctccttgttctcggcggaggggtcctcgtccttgcacaccacgatgaagccgtcggagttctcgccggaggtcacccaggtcttcgtgccgttgatgtggatcttgccatcggcgtccttggtggcggtggtggtcatccactggttggcggagccggcctcgggctcggagatggccaggcagtacggcgggtagccgttctccttgtagtagtcgatggcgtactggatctgctccggggtgccgaactcgaccatgtcgaacatgatgagcaggttgggagccatggggatgttgccgccgcagtggttcagctcttcgatgatcatggccatggtctgatggtcgacgggctttccaccgtactcctcgggcaggccgtacattccccaaccgtcgtcgacccacgccttggcgatctcgggggcgatgccgcggttcttatagccggcggcgatggcctcctcggtcaggtgcttcttgccccactcgcgaatgccgcgcttgatctcgagctgctgctgggaatagctgaaatccatttcttcctcctttaaggaacgttgcctttattcaaaacgcctgcgcgtttgaaccaaattgagagagcgggcgccgcgccgtttgaacacggcgcccgcaaccggggataagcccgatttagatggccatggaggcctggtagccgcccttgacggcctcgagcgtgcggtacaccttgccgtcgggggtggtggcgtcgccgatgagcttcgcgtgcggccacaccttcacgatctcgtcgtacagatcggtgttctgctccacgccgagggaggtcagcacggtgtcgcactcgataagctgctcctcgccggtttcgacgttcttcaccttggcgcccttcttggtcacctcgatgagctcggtgaggggcatcaggtgcacgcccttcttcttgagcaggttgatggtggggttcttgtcgatgatgccgatgccgttgccaagcttcttggccggatcgatcacccagatctcgcggccgtcgcacatggcctcggccacttccaggccggcgaagccgccgcccacgaccaccacgcgcttgcccacgatggcggtcgggccgctcttcatgttcaggcccatgcgcatgaacccgacggtgccgccctgggccttgatggccgccacggccgccttccagatcatgcccttgccctcgggcacgatgccgttgcacatggccttgatgtcctcggacttcacgacgttcttgccgtcgatgccgggcacgtcgatggggatgatgccgccgccgggcgagacgatgacctggtcgggattcagggcgcgcagggtgtccacgtcgaccttggtgttcagcttgatctcgatgttgggatgaagcttcatctcctcgttccagtaggacaccagaggctcgatgttggcgttgagcacctgggccatggtcagcaggccggcgagcttgtcggacttctccagcacggtcaccttgtgcccgcgctcggccgccacgcgggccgcctccaggccgcccgggccggcgcccacaacggcgatgtgctgcttctcggtggcgggcttgtcctggggcaggcccacttccacgccctcccacacgttcgcgtttaccgagcactggcagggcttgccgatgaagatgttgtccaggcagcgggagcacacgatgcagggacgcacctgctccggacggccctcctccaccttgcgggcggtgtcgggatcggcgatgaactggcgcgccatgcccaccgcgtcgccgtagccctcggtgacgaccttctcgcacatgtcgagcgtgttaatgcgggtgccggggaagacgggcttgctggtcacggtcttcacctgcttcgcgaggtcgatgaactcgccctcgggcacgatctggttggccacggggcggggcgcctcgtggaagccggcctgcacggaccaggcgtcaacgccgtgggcctcgatgatcgggatgagctcgagggtgtcggcgatgcggttgccgtcgggcatgaggtcgtcggcggagatgcgcacgagaatcggcatgtcgtcgccgcaggtcttgtgaatctcgtcgatgatctcgcagaggaagcgggcgcggttctcggccgatccgccgtactcgtcggtgcggtggttggagtacttggaaaggaagcgcatcaccatgtagccgatgcccgcgtggatctcgatgatgtcgatgccggcatccttgcagcggcgggcggcctggccgtactgcttgacgacctcggcgatctcctctttggtgtactcgcgctcgggcatgcccacgaacggtccggagggcacgtccttggaaggagcgtaggacaaaagcggatcgtcgccggaggcacgccactcgtagcacagctgcagctgggcggcaaccttggatccgtgcttgtggcacacctcggcgatgcgctggaagccgggaatgaactcatcgtcccagcatccgcaggcgccggtggtcgtgtggtacttcggctcggtgccgaagcagtcgcacacgtagcacgacccgatctcgatcagaccggcatggccctttgcgcgctgctcgtaaaagtccaccaaatcgtcggtcacgtggtagttgtccaccttctcgatggtcatcggcagcatcacgaaacggttgcgcagctcgacattgccgatcttaaacggctccaccagtttctggtacttcgccacggctaaactcctttcaattacttccccacaggtttcaagggtattaggtatgatttcaggcttttgaccatgttgccttctcatgatcctcgcatttggaaatctctacccaatttgacttgctttgtccgcctttcgaagcgccgaccgagctgaagtctcctcgtgactcttattctacggagattgttttgctttacgatggacagatttatctatctgtgtagtacttcataggcaaatcttcatcatccataggcatttgccgcataagtggccgttttgaccccgttaaataggcgcaactaaccgagtcatcggcatttccattgcacattttgatttatctgtcccatatttcttcgaaagatcctataatgagcgcaacggaagagaatcgaaggaggaatccatgaacgcgctttccaccatgttgctcatctccgacgccttcgtggagctgtgcgacgagatgcccctgcgcaaggtgtccatcagcgatatcgtcgagcgcacggggaagaaccgcaagaccttctactaccacttcgagaacaaggaccgcctcatcatctggatcttccgctacgacatgggccagtgcctaaagcagcacttctccgagtcggtgctcctctacgacgacgacccggaggatcccacctcgcgattcccctactatattgcccagaagtccggcgtgcgctcgctcgaccacgccgagttcttccagtgcttcgccgaggtgctggaggggcgccgcaacttctaccgccaggcgctcgtggacaacggcccctactcgctgcgcaactacctgtacgcgctgtaccttgaggccatgaagcgggacatcgacatcattttgtccaaccgctacctgccgaaggacaacatcgactttctggccgaattctacacctgtgccttcctctattactacatccgccgctgcgacgcccgcggcgtcgagtccatcggcggtcaggccggccccttcgccaacatcatccacagctcccttgaaaacgagatcaaggaagcccagatgcggcgcaatttgtagaagtaggccccttccatagcttttgcctattttccatcggaaattttcgggcggtttctattggacgaacttcaagacgggctgtcaaactgttcaccagggtatacgcgcccgcgcgcgacggcgcgggcgcacgatcacgaggaggctttatgggcaagttgaccgacgaggagttccgcgatttcctgaagacctgccgcgagctggcggagggccccttcgaggagatgcagcgcgaggtggaggtcaccaacaagttcccgcaggagttcatcgacctggcccgcgagaacaacctgtaccgctacgcgctgcccgaggagtacggcggatggggcttcaccgagaaggagatcctgcaggtgcaggaggagttctcccggggcccgggcggcatgcgcatgcacctgcactacgccgccgacctgaactggcgcatcctggacgactacggttgcgacgagttgaaggccgcctacatggacaaatttgccgacaagaccatcttcacctgcttcgcgctcaccgagcagactggcggcaccggcgccgacgtgcacaccaccgccaccaaggacgccgagggcaactatatcttaaacggcgagaaatggctcatctctcacaccgacgtggcccagttcgcctacgtcatcgccgtgaccgatccggacaaagagggcgacgagcgcctctccgccttcttcgtgcccatggacgccgagggcttcgagctcgtggacatgccgcatatgatgggctgccgcggcgcggggcacgccggcttcaaaatgaccgacgtgaagctcgagccgaagtacctgctcggcaaggaaggccagggcatggaagtggccatgcactcgctggccatctcccgcgtgcacatcgccgactcgaacctcggcatgtgccagcgcatgctggagatgtcgctggcccgggcgcgcgaccgcgtgaccttcggtaagaccatcaacacgcgccaggccatcaagatgaagctggccgacatggccacggccacccacgccctgcgctgcatgatcatcgatttcgccgaggactacgaccgcgacccgcacaacccctacatcgccgagaaggcggccatgtgcaagctgttctccatcgaggcagtgaagaaggtctccgacgagatgctggagatcttcggcggcgacggctacttcgaggactccccctacggccccaccgagcgcctctaccgcgactgccgggcgctgtggctggaggagggctcccccaccatccagcgcatcactatcgcccgcgagctggagcgccacgacggcgtcgtggaataccccgccctcgactggatcgccggcaccgacctgtaggcaccgaacggtagccatccccccttcacgagcaaggccctgcgacgcaaatcgcagggccttttgcatgaaaacgattgcttgatccgattttcccgtaggggctgacctcggtcagccctcctctggcgagtcgaccccacttgaggaggggcgaccaaggtcgccccctacgggatcggccggatggggtgcagcctcgcggggcgaagtggaacccccgcgcgtttcgccattcccctactgccccgacttcaccagctcttcggccatttcgcggagcttgaacttctgcaccttcatggagggggtcatggggaaatcgtccacgaagaagacgcgcttgggcaccttgtagcgggcgatgcgcgggatggcgtaggcgcgcacgtcgtcctcggtcatgtcctcgtatcccgggcgcgtgcggatgaaggcgccgacgatctcgccgagcttcgcgtcggggatgcccaccacctgggcgtccagcacgccgggcatggtgagcaggaagttctccacctcgagcgggtagatgttctcgccgccgcgaatgatcatgtccttgatgcggcccgtgacgcggaaatagccgtcctcgtccacggtgcccatgtcgccggaatgcagaaagccgttcgcgtcgatggccttggccgtctcctcgggcatcttgtagtagcccttcatgacgttgtagcccttgcagcacagctccccgtgctcccccggcccgcagatgtggccgtcgttcacatcgagcacgcgcacttccaccggcggatgggcccggcccacggtctcgcacttgtgggggatgtcgtcgtccacggaggtctgggtgaacaccgggctcgtctcggtgaggccgtagcagatggtcacgtcccgcatgttcatgcgctccatgacctcgcgcatggtctccggcgggcaggggctgccggccatgatgcccgtgcgcagatgcgacaggtcgaaagagtcgaagtccgggtggttcagctcggcgatgaacatggtgggcacgccgtagaccgccgtcgccttctccttgtcgagggcctgaagcaccagctcggcgttgaactcctccacgatgagcatggtgcagcggtgggtgaggcaggccatgacccccagcacgcagccgaagcagtggaagaacggcaccggcaggcacacgcggtcttcggcaccgagcttctgtccctcgccgatgtagaagccgttgttcagaatgttgcgatgggtgagcatgacgcccttggggaagcccgtggtgccgctcgtgtactgcatcatgaccacgtcgttgttgtcgaactggccctgggcccattccagggagctgtccggcttgtgctggccgagcagcagaagttccggcacgctgtagaagccgcggtgcttctcgggccccatgtagatgaggttctcgaggaaggggtactcctcggaatggaggaagccgcgctgcacgttcagcgactcgggcaccagatcgcggatgatctgcaggtagtccacatcgcggtaggcatcgatcacgcagagcgccttcatgtccgactgcttcagcacgtagtcgagctcgtgggacttgtacaccgggttcaccgtgaccatgaccacgccgatcttcgcggaggcgtacatgaaggtgagccagtcggggatgttgcgcgcccacacgcccaaatgatcgcccggcttcatgccgatggccaggaggcccttggccaaagcatcggtgcgctcgtcgaagtccttgtaggtccagcgcaggtcgcggtccgggtacacgacgaactcgtggtcggggtcaatcgccacctgctgcttcaggtaggcgccgatggtcagctccgagtgcagcggataatcgggagacccgggaacgggagcgtcggtcgtcttgttctcttccgtcatagatccctccccggcttagaacggcgtgtaaacacaggccaagaatttagcattttgtccattgtgggcgcgcacctggtggggcacgatggaatcgtagtagatggactcgccggggccgagcacgtaggtctcgttgccgtactcgatctcgatctccccctccatgccgtagagccactcctccccctcatgggaatccagcttgtgcgttgcctcgccggtggggctcacggtgatgatgaacgggtccatatgacgggagggacggcccgcggccaggctgaagtaggacaggtcgccggcatccttggcagtctggagcgatttcacgcgctccacttcctccatctgatcggtgctgatgtaggcgggcccgtaggtctcgtcgtcatccatgagggtgcccagacgcacgccgagggcgcgggtaagcttgatcagcggcgccagggacggcggcacctcgccggcctccagcttctcgatgaccgtcacgtcgcaaccgcagcggtcggccagatcctggcaggtcagatgatgcgcctcgcgcagcgtggtgatcttgcgcccgagcttgttgtcctcagccataacgtgcctccttgaaattcgatatcgtactattttacttgaggacggaaaagggaaataaagaagccgatgagatgtcccatcggcttcggtgagcgtaacgccaggcacgctcttcggcaacgcccttagagaagaggcctcctttagcgcttctcggcgagcagtcggttgagcgcgttcaagtaggccttcgccgagctgacgatgatgtcgccatcggcccctcggcccacgtacacctcgccgccggcggccttcacgcgcacggtcacctcgccgagcgcgtcgatgccgcgggtcacggcgttcacggcgaactcggacaggtcgttgtcgacctgcacgatctgatcgatggccttgtacaccgcatcgatcgggccggcgccccaatcgcacaccgtccgcacgtcgccctcgggcccgcgcagggtcaccgtggccgtgggcttcaaggggaagccgcagctgacctgcacgccctccagcgtgtagatggcgcactcctcgcggtcgcgctcgttcacgagcgcttccagatcctcgtcgtagacttccttcttcttgtcggccacatcgaggaaggcgttgtagaggcggtcgagctcctcgccctcgtactcgtagccgagctcctccaggcggtgcttcaaggccgcatgtccgctgcgggccgtcagcacgatctggctttggcccacgcccacctcggccggatcgatgatctcgtaggtgtcgcgcttcttcagcacgccgtcctggtggatgcccgaggaatgggcgaaggcgttggcgcccacgatggccttgttggcctgcacgttcatgccggtgatggagctgaccaagcggctcgccttgatgaactcgcgggtgttgatgtcggtgtgcgcatcgagttcctcgccgtgcatgcgcatggccatgaccacttcctccatggccgtgttgcccgcgcgctcgccgaggccgttgatggtgcactcgatctgcgtggccccgttgcgcacgccggccagcgacagcgccgtggccatgcccaagtcgttgtggcagtgcaccgacacggtgacgtcgtcgatgccggccacgttgtccatgaggtacttgatgcgcgcgccgaagtcctccggcagcgagtagcccgtggtgtccgggatgttcaccaccgtggcccccgccttgatgaccgcctcgatgacccgcgcgaggaacgcgaagtccgaccggcccgcgtcctcggcgtagaactgcacgtcttccacgtacttcttggcgtagctgaccgcatgcaccgctcgttcgatgcactcgtcctcggtgatgcgcagcttgtcgcgcatgtgcgagggcgacacgccgatgccggtgtggatgcggggacgcttcgcgaacttcagcgcatcggccgccgagtcgatgtccttgtccacggcgcgggtgagcgcgcacaccacggccgcgtcgccggccagctcggagatgcggcgcaccgactcgaagtcgccgggacttgagatgggaaagccggcctcgatgacatcgacgttcaggcgaaggagctggcgggcgatgacgagcttctcctccgtgttcatagaggcgcccggcgattgctcgccgtcgcgcagcgtggtatcgaagatgtcgatcttgcgtgtcatgccgtccttctttcttcttttcttcttccgacagttcgcgcccgagacgcggacatagttgaccgaaagcatcatagcaaaaaccagcggcgcccccgttaagaggcgccgctggacacggttaaatctttctatagcccgacatcggagccgtcgatggccgctacagggtgatcttccacaggttgcgcagatcgatggccccgcgcaggcggtcgagcaccgcttcggacacgtccccctcgacattcatgtacacgagcgcgcaggactcctccggcttggtgccgatctgcatcgtggtgatgttggccgcggcgtcgcccagaatggtgccgataacgccgatgcggccgggcgcgtccacatactcgaacacaagcgacgtggtcgccggcgcgatatcgatcttgtagcccatgagcgagatgatgcggggcgtgtgctccgtgccgaacagcgtcgccgccacctccacctcgtcggccacgatgcgcaccgaggaggcgtactcgccggcatcgcgcaccgaggccgtcgtgacggaaatgccgtgctgggaggccaccgactcggcgttggccgccgagaaggccccgaggcgccggtaggacaggccgccgtcgagcaccgccgcgagcagcggcgccgggtcggcatcggccaggccgccggccagctccaccttcaggctcttcggcgtgtgaccgagaatctggctggccatcgatcccatcatcttgcaggcgtgcacgtagggcccgatggcatcgaagacctccggcggcagcggcgagaggttcaccgccgtggccaccatgccgccctccaggcccgcttccacgtactcggcgatctgggtggaggcgcgccgctgggcctcgtgggtcatgggagagagatgcggcgtcagaatggcgttctcgaactcgtgcaagggcgagtcggtgcagggctcggcctcgaaggagtccacagccacggctgcgatcttgccggcggccacgaaatcggccagggcgtccatgttgaaaatgccgccgcgggccgcgttcacgagcacgacgccgtccttcatggcggcgaactcgtcggcgccgaacatgccgagcgtgctcaccgtgcggggcaggtgcaccgtgatgaagtcggcctgggcgagcaccggcgccatgtcgtcgtaaagcgtgacgcccagatgcagggcgcgctccggcgagcagtaggggtcgtgcccgatgaggttcatgccgaaggccgcggcccgctcggccacaaggccgccgacgcgtcccaaaccgaagatggcgagcgtcttgccgaacagctcgctgcccatgaaatcggcgcgccgccactggccctcgtgcatggacgcacttgcctcgggaatgtggcgcgcggcggcaagcaggagcgccatggtgtgctcggcggccgagatgacgttcgagttcggcgcgttgcacacgatgacgccgcgctcggaggcggcctcgatatcgatgttgtccaccgtcacgcccgcgcgcccgatgatcttcaggttctccgcggcatcgagcagcgaagagtcgaccaccgtgttcggatgcacaatgagcgcgtcgtagggggcgatggcagaggcgagctcctcggccgtgggatcgatgagcatgtcaacttcatagccgtgctcggtgagcgaatcgatgccttcctgcaccaagtcctcggtaaccaggatcttcttcgtcatgagcgccaccttccgcattcgtcgccctcgcagggcttccgctttatcacggggaggctggcgcctcccccttttgtttggtcgttaaccgttgttcttctcgaactcggccatgaaggcgacgagcgcctcgacgccggccttgggcatggcattgtagatgctcgcgcgcatgccgcccaccgagcgatggcccttgatggactcgatgccgtgggacttcgcctcggccacgaacagcgcatccagctcgtcggagcccgtgacgaagggcacgttcatgagcgagcgatcctccttgcgggcggtgccgcggaacagcttgctctgatcgaggtaatcgtagaggatcgcggccttctccttgttgcgctcggccataacggacaggccgcccatctccttcagccacttgaacacgaggccgcagatgtagatgccgtaggccggcggggtgttcgacaacgacttcgccttcgcctgggtggtgtagcgcatgatggtgggcgtgaagggcagcacatcctcgcgcaccaagtcgtcgcgcacgatgacgatggtcacgccggcggggcctatgttcttctgcacgccgccatagatgagaccgaacttcgacacgtccatgggctctgagaggaacatcgagctcacatcagtgaccagcggaatgtcaccggtctcgggcagcgcgtggtacgtggtgccgtagatggtctcgttctggcagatgtacacgtagtcggcctcagggtcgaactcgaggccggccacgtcgggcacgtaggagaagttctcgtcctcggaagaggccacgcagcgcgcctcgccgtagagcttcgcctctttccaggccttcttcgaccaggagccggacacgatgtagtcggccttcttgttctgcatgaggttcatcgggatggccgcgaactgctgggtggcaccaccctgcaggaagagcacctggtagttgtcgggaatctgcagaagctcgcgcaggtcggcctcggccgtctcgatgatgctcgcgaagggcttggagcgatggctcatctccatgacggacatgccagtgccatcgtagtcgagcatctcggcggccgcctggcgcagcacctcctcgggaagcacagcgggaccggcggaaaagttgtagaccctagccatgaggcgattctccttcgtcgcacgcccgaagcccctgcggcggcgccgatgcgccccgtcctgcgtcgtgccccgagcagccgtcagttacccggccattgtaaccccatatgcgagccgcgccctcaacataagagccgagcggttcggaggcggagaatccacgcccttgcaaagattttcccgtaattggtcacaaaatcgagttctgggttttgcttttcagtggaatatacgtttttcgtttattttaacggtcactcaactagtttcgagcccgatttcgggcggatggtgaagcaattatcatgacctggaacccaaaactcgattttgtgaccaaaaaacgaaaagtctttgtcctgaggaaaggaagcctcatgtacttcgataacatggttctctactacaagcccacctgccccttctgccacaaggtgctcgactttatggagcaggaggatatcgccatgcccatgcgcgacaccctcgagccgggcgtgaaagacgacctcatccgcatcgctggcaagggccaggtgccgtgccttatcgtggacggcgtgccgatgttcgagtccgacgacatcatccgcttcctcggcgatctcatcttggagcgcgaagaggactaggcggctgcaacagacgaagcacaggacgcgccagggctcgatccgacgcgtcctgttttatggaagacttcctcaaagatagtgtgccattgacgcctcgtcagcgctacactgttctcacgcgaaaacgcgcaagcgaggacaaggagtctctatgaccaagttcaccaacgtcatcgtccgcaagccgggcaagtctctgtgcaacggcatcacgagcgccccggagctgggccagcccatctacgagcgcgccgtggaggagcacgacgattacatcgccgccctgaagcaatgcggcgtggaagtgaccgagctgccggcgctggaggagtacccggactcgtgcttcgtggaggaccccgcggtcatcacgcgctgcggcgccatcatcaccaaccccggcgccgattcccgcaacggcgagaaggacgagatcgagccgaccatccgccagttcttcgacgacgagcacgtcaagcacatcgtcgcgccgggcacgctggacggcggcgacgtcatgatggtgggcgaccacttctacgtgggtcgttccgcccgcaccaacgaggagggcatccgccagttcatcgagatcctcgagggctgggggctcgagggctccgaggtcccgctggaggaggtgctgcacctgaagaccggcgtgaactacctggaggacggcaatatgctcgtttccggcgagtttatcgagaagccggatttcgcccagtacaacaaggtaatcgtgcccgaggacgaggcctacggggccaactgcatctgggtcaacgacacggtcatcgtgcccgagggctaccccaccgtgctgaaagcggtgcaggacctcggctacaagacgcttgtggtggacacttccgagtaccgcaaggtggacggcggcctgtcctgcctgtcgctgcgcttctaagcctgcgatacatcgaatgccagaagaggcccgcgatcactcgcgggcctttttgtgtgccagctcaacctcctccccgttcttcggggaggacgacagtttctctccgacaacgaggccgcgcgctactccaccgtgccgtagacctggccccaggcatgaccggcgatggcgctgttcagctgggtgcacaggcgctggcgcgtgtagtcgccgggcggcagcagcgtgacgatgcgcagcagttcctcgggaaggtcggccgcctcggcggccaccaccacgtccagccggcgcaccttggcccctacggcctccgcgatggtggggtccaggtcgccatactgcgcgaacagggcattcacgatatcctgcagcgccccgtagtactcgctgcgctctcggttggttccagtatgttcacggctcataacgtcgcctccttctgcttgtcgattataagcgcttccagggcggacaggtcggttttctcgaagtggtacggaacgatttgcggatcgcgcgagttgtcggcagccgcgtgctcgatgcgcaggaagtgggcgtccaccgactcgtagccggcgcgcatgagcgcgtaggcgtagcagctcgcctgaaggcggtgcttctcattgagctgcttgggcgtctcgtcggcgcggccgccggtcttgtagtcgatgaggaaggcggccccgtccccgttgtcggcgaggccatcgatctcgccttcaaggaagaagccctctatcgccacagtgaagggcacttcggcgcgacgattctcgaaagcggcgaagagagcggcctcgtcgctgccgagccagcgaacgagcgccgcgcgcaagcgcgcctgctgttcctccgacaggccctccttctgaatctgcgcccggatggcttcctcgctgggagcgaagagcgatccccgctcgctccgctcgatggcctgctgcgccagacgatggaacgccgtgcccagggccgtggcggattcctgcgccccaaggacgcacacaggggacccgtcagattcacgcgaccctgaagcatcgtcaacgaacgaagattcgctctcatcactcccattcgaagtctccgaaccgagtccgctgcggccctcatgcaacagaacgacgccctcgtcagcctcaacggccggctcgtcgctatggggatgcgcgcccgaaagcgacgtgtaggagtacagcccctcccgcacgaaattgtgcggcgcgagcgccgggtcttcgccatgcgctcgccggacaactgcgaagacggcaggggcatcctcgctaaggggcgcagccgcgccaagctcctcgtcgagccgctcctcccctgtgggcgccgaggccgcaagaggctcctcgcccgtctcttccccaacctcggcgagaacccgctcgctcgccacccgggcaggcgcgcggccgccgaaatccatcattgcgacgctcgcgccgtcgtccatggcccagccaagggcgtcgaagacgtcgccggtcacccaggtgctctcgtaaccgtcctctatcttcgcgctcaccctcatagccagaagaagagatcggctcgcgcgcgtgagggccacgtacatgaggcgccgcgcctcctcgcgctcctgggcggcggaatatgcggccagcgccgcgccgaattgagctgcggaaagagcttcgaaggcgcgctcggcctcggcggaaccgtccagggaaacgtcaagatcctctgcctcctgagcccgcgcccatcctttcaatttggaggcggtcttgtcccaaggaccatggggcatccacgttgcagccacgtaggtcgtctcgccgatgttctcgacgaagaaagagggggcgcggccccctggatagccgtccttcagttcggccacggccacatggggaaactccagccccttggaggtatgaaccgtcatgatgcgcacgaaatcggcatcgagacacgccagcgcacccggcgcctccttagctagggaaaggtagtcggcgaattggcggcccacatcggcgataccgcagctctcccgcgcgagctccccaacgaccacgcacgctttgttgaagttgcccgcgcgcgccatgccgtcggccccctcaagctgaagccgatccgccagtccgctgtccacgaaaaggcgccgcagcgccaacgccggctcttcgcgaaccgcgcggcgcacgaaatcgcgcaggcagcggcgcgccagcgccaaagcggcgcgatcgttctccccgaggggaaacccatcatcttcctctcgtccgaagaagccgcgagagataggctgacgggggcgagcacggccatcgtcaccttcgccttcgccgtcgctttccgacgcccaggcgtccgttgtggcgagcgcgagaagagcatcgtcggaaagcgcgaacagatcggaggcgagcgcctggtaaagtgcctcggagtcgtcgcggttcactgccacgcgcagcagcgtagccacaagttgggcctctgcgctctggccaaaccccgatccgcccgtcacaatgctctcgaagcccgcatcgcgcagcgcctcctggtagacggaggcgcgggtcatcgttcccagcagcagggccatctccccggggcgcgcgccggcctccctcagctgcgcaaagcgctcggccacctcgcgggcgcaccgggccgacagctcctcggaagacacggtggcgcgactgccgtcgttctggaagacgctcacggcgatacgtgccgggccgtccccctcgaacaccggatcggcggccgtgttcaccgcgccggcggcctccagatgcaagaactcgtcgccgaagacctggggctggccgaagacggcatccaccaacgacaagacgtcgccgtggctgcggaagttgtggggcagctgggggaactccgcctcgggcgagagggatcgcagccggtcgcggtactcgaagaacacgttcacatcggcgccgcggaaccggtagatgctctgctgcgcgtcgcccaccgtgcacacgttggcgaagcccggctgcgccagggcggcgataacggcgacctgcagcttgtcggtatcctggaactcgtcgaccatgatgaccttgaaccgctcgcggtagcgctcggacagctccgggtgggcggaaaacgcgtccaagcaccggcgcagcaaatcgccctgatcgagtcggtcgttccccttcgctcgggcgtaggcgtcctccagaagacgcgcgagcgacacggcggcaacgctcacccgcgcccccaaggccgcttgcgcctcggagaacacgctcgcgtaggcacctcgccaggcagcgaacgcatcggcgtccggctttttggcgcggtacttgtccgaagaagggggaaacgccagaagcgcctcgagaaaaggccccgcctcgaaccgcgcatccaagaatccctcgcccgtatcggcagcgagccactgctcggcccggtcgatgccggtctctagatcggaggcgaacgtctcgtcggtggcattcgtctttccccagaccttcaccacctcctgaatctccctggcagcctccagagcctgtcgcacaaggcgcgcaggcgtggcggtcggctcggacaggcgcaggccctcgaacccctcgggcatcgcccgcacccgggccaccacctcctgggaatactccaagagcctcttgtcgaagggcccctgccccctcagcccgaactcgtcgataaccgcgcgaagaagcggatcggcccccgtttcgagatgggcgagcacctgctcggtggcttcggcccgaaggtagctcgcctccgcctcgtcgatcacctcgaacttcggatcgatgcctacctcgaaggcgttctcgcgcaggatgcgcgcggccatagagccgatggtgcacacccaggcatcatccaccttcagcgattcctccgcaagcccctcctcgcgcagaagagcgcggatgcggtcgcgcagctccgcggcggccttcacggtgaaggtaatggcgagcacctcgtcgatggattgcagaccgccgggcgcctcctcgccggcgagcagcccgtaggcgatgcgcctcgtcagggtgaaggtctttcccgagccggcgccggcggcgaccatgagggggcggtcgaaggtggtgatggtaaggcgctggccctctttgcaggtatcaagattcacgcgagcctcccggggcaatcgtaggcgggacagtattcgcaagctttcggtgcggacgggctcacggggatggccccctcggaaagcgccgccaaccgatcggccaccaaggcctcgatggcatccagataggcggagaagttcatggccaccgccgagcttctggaagacaggcccgcagggtcgaaggccgcgccgtcgtaggcccccgccaacagttccttggggctctgcgcccggtagcccaagtacagcgccccggcgcaggcgaggccgaggtcggtgcgcaaaagcgcctgggcgtagatgagcccctgcacgtgatgcggcacggacggctcgtcgccctccttcaggccggatgcgtagtccttggacgatcccttgtagtcgatcaccacgaaacgtccccgctctgcgtcggcatcgacgcggtcgacgcgcccccgcagccggacgccggcaaagtccacgccgtcggcgacctcgatgggatgctcgcagaagaccacttcgtagcccgggggcatctgggcctgcaggcgcaggctgtgaaccagttggcgcttgagctgcgccacccgctgccgctcctcgcgcgtcgtcgccgcaaggcgagagccccctcggcgctcgggctgctcgcggacaagctcgtccacgagcgcctcgaaccggggcgccatggcctcgatgttctccgcgtccacgcgtcgcacgccctcctcggcgagcctgtcgtagaagcgggcaaaggcttcatgggcgaaattgcccagctcccgcggcccgaacctctcgtcgggagcctcgggtcgaatgcacgactgcacgaaccaccgataggggcagtggaggtactgctcgatcgccgagggagagatcacgggcagaccctcgggcgtgcgcggaaggtagcgaagaagcggaagcgaccgcaggctgccccgcgacgggcggagaagctcctcgcatcccgtcaccggggcgaaggcggcgccaagcgcttgcggcaagtcgccttcgccggcgcatcgggcgctggcggccaagggctcggggagtccgaagcgcgcagggtcagggcggccccaacgcaaggccagctcctcatcgccggccgctaaggcccggtcggcgccggcccgggcctgggcgctcgcgaactcttccagcagaaaggaggggaacagctcgttttcccgctcgtcgcgccggctcacgcccaggacaaatcgccgacgggcggcgcgctgtgccgccgcgaaccgcgagcgctggcgccagagcgccgaaggctctcggggaagtccgagcgtctcggcgaggccgtccaaagccgataggctctcggagatgccgaaggtgcgcgcgctgacgtccgccaggatcaccacatcccagcttttcggcacgagcgagtccagtacggccgcaccggcgatttcgcagagggggccgcccgtcccggaggagccctcgacgctcagcgtggcatcggcaagcagcggcgtcagcgcgcaggtcgacacgcccagcccccccgccagggcaagcagaccgcagagcttgtcgaaggcggcgcgctcgacggcacgctccagcgcgtccgacgaggcggcaccgacggcgctggaaagggcgtcgagaatacgaggaggaacgctttcgccgcaagccacggcgcgcacggcgagggccagagcggaaaacgagtcgctctcccccgcgaggatctcggcggcatcggtggcagtcagtaagcggtctttgcgcagacgcccgttgagatcccgcgcctttcgctcggcgatgcccgaaaaggggttgtaggcgaaatcagtggccgcctcgagccagtgggggctcccctcctccagccgccgcgcgcattcccaagcgcgtccgaaggcggtggccctccagggcgcggtgcaccgaagcgccaccgcccaaccgctggtgcacaaaggcgctcccaacacgccgaacagctctgcagggtcggcgcccaccaccagaacgcttcttgcgcccgcacgaccggcgcgccctatctcgtcgagcagaagcccgggcatcgccgccgctcctgcggcgatcagcacgcccggctccacgtcttccggaagacaggaaaccgcggcaagagcctcatcgccttccgcggaagcgcccaaagccgtcagaaggtgccgaagcccccccgagacgtccaggcaatcgcaaacagtcacacccatggcgggaagccgcccatcctcgaccatcgaggcaaggagatcggccgcctcatccgcctcgatcagattccgcgcggccagctcatcgtagtaggagcgcaaacacgcgacaagcccgcgctgcagagaggtcaactccgcaacgggaacagctccctcgtcggcgagagcggccgcgtgctcggcggcaaaagtcgccagcaccgatggcgctccggaggcagcggcggcatcgcaagtcgaagccgcccgggccgcaagaagggagcgctcctcagcagaaacgagaacgcgcccgtcgccccacagctcccacagctcctccaccaatcccgcggccgtaagacgacgcacgccgaaagcggcaccgggagccgtcgcggttgcagcggccttggcggcagcattggcgcgctcgatggtgcggtagagctctacgggaacggttgtcggcacggcggtcctcctcaaaaatcagttccgaccattctagcgcgaccggggcgcttcggtgtcctctttatgtccctccacagccagaacgcctcttccgtcggcagctcccgtgagcatttggcaacggattgccgcccgtgcggtgacccgtcgccgacctggccttgcatcggcgcggccaggcctaccatagcgaaagaacgagtcggcaccgggcgctcccccgcccaggccggcccgctttcccgaaccgcagattacaggaggcgcatgatgacctatcaggaactggttaccaagctcatcgagattcagaagcacatgatgcccgacttggagaagttcgagcgcgaggatcggctgccccacgacctcaaggtcgccaaggccgagatcatcgagtgggagcacaccgtggacggcgacggcggcctggaagatgccccggagatctggcccgtggagaagttcgcccgggccctgcgcgatcactacgacgacttcaacgacttcatgcgccgcaacatcgccgagtatgaggtgctcgccggccagctgcccgaggccttcgcccacccgctcggccagtaggctccgcagcacctccggccacgcgccccgcttcgccctcgcccagaagacgagcgtcgaatgccagccggtcaatccaatccagccgctatcttcgagagccgccttaacgggcggctctcgccgtctgcggccgcgttgcccttagtaagtgcccgcgatctcctgggccatgcgggcgacgccgcggcgggcctcgatgcgctcgcgcttgaagtgccactgaccggcgtcgaaggcggcgccgaggccaatggcggccagccggtaccaggtgcgcgcccggcggaagtcctgctcgcagccgcgtcccagctcgaaggcgcgggcgaggcgcagcgcggcgttgcccgtactcgcacggtcctcgtcgatgcgcccgctctccaaatcgaaggctcgccggtacagcgagaaagcccgagccgccgaggaagcgcatccccgacccgcggccaccagatcgcccaaacgccagcagcactcgccgtgaccatgataggcgccgaaggagaagtgcaggtaggcgcgctcgtcgcagggggtgtccgccttgtggagcgcctggcgatcggccagaccgtcccagtacgccccctcgcacagatcgccctcgtagatgacgccgagacggcagtgggcgccgatactgccccgggccgccgcatgcagaaggagcatctcggccgcgcggtagcagtcgacgcggcggcgccgatgctcctcgcccggcaggcccagagcctcgctgaaatagacctccgccagctccagggcgcgccagccgccacggtcggcgccgcagggataggaggcgacgaacgtgcgccctctcccgtcgggcgccggctcgctcacccagatgcggggcagaccgccctcgccggcgcctcccttgcgatccacggcgaacaccgagcccgtctcgcgccgacgccgccacttctcgttgcgcagcactttcggcgtgaagctcgtctccgcgccgccgcaggcccgccgcgcactgggcgcgccaaagagcacgttggcggcccgctgggcccagcccacttcccgcgcacgggctggagcggcaaccgaggaggcgacatcctcagcgggaagggccaaggcgcaggcgacggaagggtcggccacggccgcaacggcgctagtcattgagcaccacctccatcacgagccgcgtccacgagccgatctgctccttgtccgtgagccgcccctccacggacttgccgccgtcgatgagccgagcgacgaactcgttgcactcgcaggagacgtagccaatccggcggtcggcgccgtcgcgcacctccacggcccagccgtcgtgggggttggccgcgtcccgcacgagggagagccgatccccctttccgtagccttccgcaatggccgccatcgcgggcacgtggcgcgttcccgccacagtagtgttttccacgacgcgaatcgattttggtgcatttgccatggttcctcctgaccgataaccttatgatcgatcatgataaagaaccgcttgcgatcaagtgtcccttattcggtacagcgagccaccgaagatcgcccttgctgagcagatcgatcatggttgtcgcagctgcacgattatgttagagtccgctaacacgaaatccgcttccccgaaagacgaggaatgacatgaaagacaagaaatcgaagaaggccgccgccgacaagaaggccgataaactcgcccgcaagaagaagcacaccggttgcaaaggcgagaagggcgccgcaggctgcaagggctgcgccaaggcgaaggcgtcgcttgcgctctcccactgcacctgctgcaagaagcgctgcccgctctccaaaccgaagtgcggcaagggccgccgcctcgccgccgccctcaagctgcgcgagaagaaggcctagggatattcgctatagacgctctgcaacaaagcgataaacatcttccactttgtgggtcatggcttcgcggtactccggtcgtgccgctgttctttccaaaaactttggtggaaggaatcgacgcatttcctcagcgaaagcggcactcccaagcgcctcccgcgcacgggaaagcccactgcgcagaagctcttgagcgttctcgcccacatggtaatcgttcagtttccggccaaccatgaccgcaacctcgtccatattcctccccggtcgcaaagcgatccagggaatgtcccataaatcgcgatagcgcggggcaagcacttgctgcgagaacgacacgattttgtccgccagaatctcatccaaagattggcaaccgataatagctcggctgcacatcccttccacttccggatagttttcctcaagaacgcgaagatcgcgagtatatgagggtatttgcgcgatctcaatcttgattttctgggaaggaagatcgggtcgcgccggcgccgtgtcgacgaccacctgccacctcttcatcgacccaccgccttcgaagtgct

SEQ ID NO: 10576 - DNA, 5037 bp, Unknown
  gut microbiota DNA sequence
caaggccgtggtgaaatcaagatcctcgctatagcggacagcgccataacacagacgcaggcatgttcctccttggaacgtgaggccgtcgagccatcgcgattcatcgagcgcacagatgatgtcgtaatgaatgagctctttctctacaatcgggagcaacgcctccacttcgcctcgacgggcaacgttttcagcgaacttcttgaaatcaatcgccatcttccacttcctcccaatcgatgaggtaggttgatctccgcgctcgcatgagcccttggacagcatatctcttagttgcgagccgcagggcgtggccaggataatcgaccgtattcgaaatgatctcgttggcatcggcggcagtgtgaataaactcaattgtgccgaagggagtgttgaactccccttccctacccgtcgtgacaaccgttaaacgccctacgggaatctgggaaatcacgctccacagagacgccgcgctctccatgccgatgtagttgaactcaccggatctcaaggcgacggcgacttcctcaatggccggcacgtctcttcctttgaagtcgccgaaccagtagacatctcgcgccagccgcgtgatgatccccgaatcaagcagacgcttgatagagcttcgcaaagtattgccactctccccaaggacgcggccaagctcgcgcgagcggaacacgcgcttttgctcgctgaaggctctgagttttctttccgcttctataagtttcattgtcccactctacagtaatagcctaaatttggatcattactgtagagttaatacacgctcctgtcaatgatctcaatcgatctcaccttcagacacgccctccgattgctcctccttggcggcgcgggcctcgtcgagcagggccttcatggtggggttcttgcgagtgagcttcttcaccgtgaggtcctcggccttgtcgttggccaggcgcaggttgcgctcgcttcccagcaggtgctccttgatcttctgcaaatggtcgatggacttgtctatctcgtcgatggccttcgcgaagcgctcgctggcgatgcggtagttgcggccgaacctgtccttgaagtcggccagctggtcctcgaagttcgtgacgtcgatgttctgctggcgcacgagcgccagctcgcggcgggcctccatggaggagagcgccgcgttgcgcagaagcgtgatgatggggatgaagaactgggggcgcaccacgtacatcttctcgtactggtaggacacgtcggtgatgccggcgtacagctcgttgtccggctcgagcagcgacacgagcacggcgtactcgcagcccttcttgcggcggtcggcgtccagtttcttgaagtgcgactcgttggtctttctgtgggtggagtcgtcggcctcgttcttcatctcgaacatgatggagacgatctcgttgccctcctcgtcgaagtcgcggaagacgaagtcgcccttggtgccctccaccacctcgttgtccttctcgaagtaggcgcgcgggaaggccgtggggcgcaggcggttgaactcgatctcgcagtgctgttccagcgactcgccgagcatcttcgtggaaaggcgcgccctcatgtcctggatgcgctcgatctcccgctcgcggtcggcaatgagctcgtctttcgcccgcagcttctcggccagctgggcctgggcctcggcccgagcccgggccagctcggcctcggcgcgggtcttctgcgcctccagctcgtcgcgcgcccgctccactttgccgcgcaaatcgtcccgctcgcgctcgacggccacctgggcgtccttggctgcggcctcggccctctgcaccgcgatctgcgtttccatggaagcttgttgttgctggacacttagctgggccttcaggttgacgagctcgccgtcgcgctcggcgatctgggcgcgcagagcctcctcggccttggtgaccgccagcgccacctcctgctcgcggcttttctcggccagagacacgcgggcatccacctcgcgctggaactcctggtcgcgcacttggttcaaaatggcggcgtacccgctctcgtccacggtgaacgcctcgccgcaatgggggcacttgatctcgttgctcatgaaacggttccttcctgttgctcgaggaaatcatacaccgtcgccgacgcggcggctcgaagctcagctggccgggtacagcaattccagagactggatggccgaaaaggggatgcgccgacgcacgatccacagatcgcggaaggtgacatcgatctggctcacggccccttcggcctcgcgatagccgccgccctcgtagtagcggcagcgcaccacgtccccgcggtcgaggttcgcgatgagatcatccagcgcccgggcctcgtcgtcagagagcggccggcgcgattcgggaaccgcctcctttgcgtggacgagatcgtagtagccgcgcagcgccgcgaagggcatgaactggcgggcgcgatcgggatgcggccgtccgatgcccggaggcaccggcggatccaagggcgcctcggccccggcagcggtctgcgcaccgcacgggcccgcgtcgccgacctcctcccacctaagtcccgcgagcacatccacttccctagccatggtgccctcccaccatggtgttccgctcgcgaccaagcgcgtgttccttcaggctcgtgcccttgatgagggcgttcttcccgaacttccccttcacggcgagcacagcctcggcgcggcgccgctcgcgatcggcggccgcaacatcggtgaacaggtccaccgtggccagatcggcgtccaccaggttgccaaacccgatgctgatcttgcgcatggtgcgggccggatccaccgtctcccggaagagcgcctccaagtatccgtagagcttcgcgaaggagttcgtgcgctcgggaatcttacgggagccgcccccatgcggacgcgtgccgccgacgcgccgggtaccatggccgccgtcgaagagctcccccgccttctcggggccctttgcggcgtcccccccggcaccttccgccgcctcgtccccatccccgcccctcccgtagctcacgtgcagcgagatgcgatcggtcaccaggtgcttctctaccagatcgagcacagagtcgtccaccatctcgcgcagcaccatgagggtgtcgtcgaagttgtagccgcagggcaggatctgcccgttcatcgtggaggagctctccggctcgtaggccttgatctcggcgatggtgcagggctccacgccccaggcatgatcgatgaggtactcggcgttcaccccgaactcgccgtagagcacgtccggatccatctcggtcacgcccttcaaatcgaacacccggtacttcgcgagccgccgagcaatgcccggcccgatgttccaaatgtcggtgatgggccgatgccgccagatgctctcgcgaaaggagcgcgcatcgagctcgcccaccccgtccggcgcgtgcttggccgagatgtcgagcgccaccttcgcgaggaacaagttggggccgatgcccacggtggccgggatgcccgtctccgcgcgcaccgccgagcgcagcgtgtcggcgaactcgcgggccgtcaggtcgtacagctccaggtagggcgtggcgtcgatgaagcactcgtcgatggaataaggatggatgtcctcctgggacacatagcgcaggtaggtgccgtagatctccgccgacacctccatgtagctcgtcatgcgcggctgggccgtgatgtagtcgatcccctcgggaagctcgtagagccggcagcggtttttcacccccgccgccttcatggccgggctcaccgccaaacagatggtcatctccgagcgcgtcggatcggccaccaccagccgcgtgcgcatgggatccagcccccggcgcacgcactccaccgaggcgtagaagctcttcagatcgatacagacatatgtgcgctcacgttccatgccgcccagtataacatggaacgttcgttcgcgtcatactgaatcgccgcaattgcccaaccagaacgaagatgcttccgccgcacgtcccgctcacgatcgtcgcttcatggcgcgcaggcggtccttctgctcggcggggatgcggcggctctccacggccttctggatggccttgttgtgggtccactcgtcgagggcgccggaggcgatgaccgcctcggcagcggccggctgcttcgccagcgcctcggcgaagtaccacgcccgcatcatgttcacgtagtactccgggcgcgagacgccgatgacccactcgaagaactccggccggaaccgctcgtcgaggaacagctccatgagcacgccgatggcgaagcgcaccgtgtactcgtggtcgctttccagccacgctcgcgccttcgccagcgcggcatccgggttcgcggcgagcccacgacaggacagctggtcgcaggtggcccagttgtcgacgaaggggaggaagcgctcgatctcgccgacgagcttatcgaagtcgcgctcctgggcgatgacgaacgagtgcagctgattctcctcgaaggtgccgtgcggcagcgccgccagaaactctcccgcatcttcccgccgggcgagccctttcgcgaacttccgcagctcgggcgtgcgcacgcccacgatggtggccgcgtcgatgttcgggatgagcttcgcctggaacgcccggtacccctcatccgcatgggagacaagaaacgccccgacatcttcccgaatcgccaccgcttcccctttctccgccttttcgcccggcctcgtcgcaaaccagctggatacccccaacggcagaagagaaagaccgtcagccatcattgcctgctcggccacctattctctgtgttgaagcgcgggcacagcaacgaggatcttaccactcatcgatcatcgccgagccatccctctattttggaaatcgtgcttttttggtcagattcagcatgtcccgctgttaaaccaccattgacat

SEQ ID NO: 10577 - DNA, 11612 bp, Unknown
  gut microbiota DNA sequence
cgggccgccgtcagcggcgtgtcggcgagcagcgtgccctcgtgggcgttcagccacgcggccacgtcgttgatgatgaggttcgcgagcggtttggcgaacttgctgccgtctgcctcggctttcgcgagcgccatgcactcgtcgaagaagtcggccgtggcgcggtggtccaccagatggcgcgcatcgtaggaggtgagcccgaagtcggcggcgaatcgcgcggccttctggtcgggcagctcgggcagcttcgcccgcacgccttcgatgaacccgtcggacaagtcgtagggcgccaaatccggctcggggaacagccggtagtcgtcggccgtctccttcacgcgcatgacgatggtgcgcttggcggacggatcccagtggcgcgtctcctggtagatgacgccgccctcctcgagcacctcggcctgacggcagatctcgtaggccagcccgtcgtgcaggttcttgaacgagttcatgttcttcagctcggtcttggtgccgaacgcggtggtgccgcggcggcgcagcgacacgttgccgtcacagcgcaaggagccttcctccatagagcagtcggagatgcctaaggccaggtagatctggcgcagcttctgcatgaacaggcgcgcctcctcgggcgtgcgcagatcgggctcggtcaccagctcgatcaagggcgtgccggcgcggttgtagtccacgagcgattgcgtggccccggcgatgcggccctcgccgcctccgaggtgcaccatcttgccggcgtcctcttccatgtggatgcgcgtgatgcccacatgcgccacgtagccgtcctcggtgcgcgtgatgttgtcctccgtctcgccgggggcgagcgcgtccaggcggtagcgctcggtcgcgccccgaccgtccacgtccaggtcgaggtggccccgcatgcagaacgcgatggggccctgggtggtctggaagttcttggccatgtcggggtacatgtagttcttgcggtagaacatcgagtgcttctcgatgtcgcagttggtggccaggcccgccagcacgatggactcgatggcggcgcggttgggcaccggcagcgcgccgggaagccccaggcacaccgggcaggtatgggtgttgggagcggcgccgaactccagcttgcagccgcagaacatcttcgtctccagcgtggtcagctccgcgtgaatctccaggccgatgacggcctcccaggtctcgaatacctcttcgagcgtcttcatttacgcacccacctttccgtcggcgaaatcgggggcaacgggcgccgggccgtagtgctgctccaaggccgccgccgcccggaacatgttcttgtccttgaagggaggcgcgatgatctgcacgcccaccggaaggcccgtgtcggcgccgaggccgatcgggaacgacatgccgccgttgccggcgatgttgatggagatggtgaacatgtccgcgaggtacatctcggtggggtcgcagatctcgccgatcttgaacgccgtggtcggcgccaccggcgagaggatgacgtccaccttctcgaaggccgccgcatagtcgcgcgtgatgagggtgcgcacctgctgggccggatagtagtacttgtcgtagacgccggccgacagaaggtagctgccgagcatgatgcggcggcgcgcctcggggccgaagcccttcgcacggctcgcctcgtactggctggccagatccttgtggcccgggtcgcagtagccgtagcgcaccgagtcgaagcgggccaggttgctgaaggcctcgcaggggccgagcacgtagtaggcgctcatggcggcctgggcgtgcggaagctccacttccaccagttccgcgcccatatcttgaagaacagccgcggcctcttccaccttcgcccgcacctcgggcgcaagaccggccgcctccatgaacgcgggaacaatgccgatcttcatgccgcgcgcgccctcagcgaggttggccgtgaagtccacgtcgcacggctggctcgtgcagtccagctcgtcgcggccggaaagcgcgttcagcgcgagcgccgcgtcctccaccgaacgggcgaaggggcccacctggtcgagcgagctgccgaaggccaccacaccgtagcgcgacaccacgccgtaggtgggcttcacggccaccagaccgcagaacgagcccggctggcggatggagccgcccgtatccgacccgagcgacaccggcacaaagcccgccgccacggccgcggcgcttccgcccgagctgccgccgggcacgcgctcgacatcccacgggttgaaggtggggccgaaggcggaggtctcggtggagccgccgaaggcgaactcgtccatgttcagcttgccgatgggaagagcgccggcgcgcagcgtcttttccacgcaggtcgccgtgtagggggacacgtagtcgcgcagcatgttcgaggagcacgtcgtgtgcgtgcccgtgaggttcaggttgtccttgtagcccacgggaacgcccgcgagcgggcccatctcggcgaggcgcccctcggcgacggccgcgtcgatgcgagccgccgcgtcgagcgcaagttcctcagtggtttccaggaaggcatgcaccgccccgtcggcctcgccgatgcgctcgaaggtgccgcgggccacctcggcggccgagaactccttggcggcgagaccggtttgaatctcgcgaatgcccatttctccgaaggtgcgcgtcattagcgatcgcccccttcccccaggatggacgggatgaggaagctgccgtcttcctgcttgggcgcgttttccagcgccacttcctgggtgaagctcccgcgcacctcgtcatcgcgcatgacgttggacaagtcgccgatgggatggaacgtcggctcgaccccgtcgaggtcgaactcggtgataggcgccaggctgtcgatgatggcgttcaggtcggccgtcatggcgacgacctcctccgcgtcaaggccaatgcgggtgtattccgcgatgccccgcacatcggcctcggaaagatgctgcgtcatgaatcgcgctccttctctgggagcggccgcgccgtggcgatcggcactccccggttcgttaagtcaaccgctccatgatagcaaaaggcgcgccaccagcgcgccccgcgcccaccgagcgcgaagatttaacagagcgggcgactcacagtccgcgcgatcgggcggcctcccgcaaagacgcttcagtgatcgactcaccttggggcacgtagacggccaggcaggggaagctcggcttggcggacatgagcgcgccggacggcaggccgaaacgctcttccaagctggcgagcacgtggcgcacgttggccttggtcatgccggcgcggcgcaacggcgacaccaccccggcctcggccagcgccttgaagccggggcgacgctcggggtcgtcggtggcgttggtgccgtccacgatgaccgtgaacccgtcggctgcggcggcccggcgcacttcgtcgaagatgaagcgcttgcagaggtagcagcggtcggcggggttcgcgcagatgtcggcctgggcgagcacgtccgcttccaccaccgtgaggggcacttccagcgccgccgccacagttcgggcgtcatcaagctcgaagtcgggttggaaggcggtcttcaccaggtaggcatgcacctcgcaccccgccagctttgccgcggccagaagcagcgccgagtcgcagccgcccgagaaggccacggccaacttgggctcgcgcagaagatacatctccagcggctcgccgaacaggtgctggcccggccccacatcctcggtgtcctcggcgacaacgctttcggaatccaccgccgcttccgcgctcttttcctcgatctctgcgactttcgttacttccatactcgccttctgtactatatcgggcgacgcgccgaagccacacaccgcccgattcgttctcttctatgctctgcccctcaaggagcagccatccttagcgcagcgtgacgccctcgggcagttccacgttgcgccagtcctcgtcatcgccttcgcggtcgttctcgccctcggcgacaacgaccggcgcggggcgctcgggctccggggcgccgaaggcctcgcggaaggcatcggcgtgcatgcgcggcacggcgaacaccacgttcggcacggcgtcggggtgttccgcgatccagttctggatgagctcgatcacctgctcgacagggtagccgttgcgaccgcagccgaaggcgcccatgatgagcgtctcagcgccgttggccgcggcgacgcggaagatggtctcgatgcggtcggccagcgccttgtcgcactcgcgctcggagcggtggttctccagcgcgtaggcacggatgggctcggcgatgaccagcacgtcggcgcggcgcacatcgcccccgcgcgagaacagcacctcgggcacgtacagcgcacggtcggtgaacagcgagccgcgacggtagtcgcggttcttgccgtagaagtcgcgcttgtgggctacaaggatcgggtacaggttgctctcggagcacaggatctgctccgggccgaaggcgccgtcctcgtaggcgccgccggggcgggtgaaggcgccgggatccacgatcatcgtcttgcccgtggcatcgcggtagagcgcctcgggggcgaaggaggtcacgaccttgaccgtcatctccgtagcctgaggcgtcgcagcgcccgcggctccatcggagggcgtcgcctcttcggcttccgcagcctcggcggcttcctcggcgatctcggccacctcgcgagcctcgacattccccgcttgggcgccatcggcgtcggcctcggccatctccgctgcgcgcttcgccgcctcggcggccgcagcggcctcggcgccccacagaagcgagcgcccctccccttcctcgtaaatgcgcgcgctctcgatggcctcgtcggtctcgcgcccgaaggcggccttcatgagacccgtgtgtcgcgccgcctcgcgccggcgctcctcccgctgctcgtcacgattcggacgacgcgcgccgcgatcgccgcgctctccttcgcgaccgccacgcccattgcgctcgttgaactccgccataccgcgctccttccattcaaatgatccgctcgccataataatgcaattgcgcgtctcgcgcaccttttagcgtcgctgggctctcccccgcaggctccatcccagggcgatggccagcgtgcccaaggccggcacgatcatgacaagccacatgagcccgtagccgcccgtgatgccgccggccgcgggcgccagagcctcggccaccgcgcccccggccaccgggcccacaagcattcccaaatcgaggcccgtgaacatggtgttgctggccgccccgcgccgatcgatgcccaccgaggcgagtcccatggactgcagaagcggcgcgcagcagccgaaccccgccgagcctatgacggcggcgagcaagaagccaggcaagtcctgcgcgtagaagagcgccacataggaaaccgcaaagcaaatcgtcccgaaaacgagcacccggggcgttcccaccctatcggcaaggccgcccaaagccgggcgcgtcaccaccaggcacagcgcgtacaccacgaagaacagccccatatccgtcacgccccgtccgtagccgtagagcaccacataggatcccatgcacgagaacgacacggcgatgagcatgagggcggccgccttgcccacagcctcgcgggcgaacatgcgggaaagtttcagttgatagggcaagcgctcgcgatagggctcgcggatagcgaagatgccgcccatggccaccaccagaagcgccgcggccaaaaagtacgcggccgtaaatcccacggcgtccaccagatagagccccgtcgccggcccgatgacctgggcgaaggactgcgccagcgcgtaaatgctgatgccgctggcgaacttcgtcgccggcaagtactcggacacgagcgacatcgccaaaggcccgctgcacccgatgcccacgccgtggaagagccggatggcaatgagcacgcccagcgaatcgacgaacccgtaggcgaaaaacgaaaggcagatgatgccctgggcgataagcaggagccgcttgcgcgagaagctgtcgaaggcggggccggcgaaggggcgcacgagcagcgccgacaacgtgaacgagctcacgacgacgcccaccatggaagccgtcgcccccagcgagtccgcgaacaccggcagcgtggcattggccatgaacgccgccatcgactggaagaagttcaccgccataagaatgacgaaaggcacgctccagatggaatcgcgcaccttcgcttctgctttccccatcttctcttccgccatcgcaccctcgcgacggtcagccatcgcatcctcacgcgtcttggtcatcgcaccttcccgcccccgaactgtcgttgatacccccacaccatagcgcgatctccgcgcattggccaacctggtgacacggaacggccttcgaatgcacgaaatcggacttatatagccaaccgaaagatccagagggaaccagaggggcgatttttggctatataagtcccgaaatccgtatgcccgcatccccgagatgctatataagtcgatttttgtgcatcggaggggttctttttgtcaccagggcaacctggagcagcagcgctccagcagcaagcgcaagtcgcaaaacagttcgactcagcagaaacctcgctaggccagatgcggcaccaagggcaggaagcgggcggcgaagtcgtcttggaaggcgcggcaggtgtcaagcagccaaccgggctcgtcttcgtagttcgctaggccgcgatagtaaaaatgcttcctatcgtcgggcacgatgaacggcaacacaccattgcggaggcattccttgaacagcaccatgcgaccgatgcggccgttgccgtcctggaacggatgaatgcgctcgaaacggtaatggagatccactatatcctcgaaggcgcgcgggccgccttcgtagcgcccgatgagcaacgccagctgtccgggaacctcctcgggaagcgtcgtcacaaggccgcccacctcgttgggcagcaccttgaagacgccaggggcaaaaatgggatcggaggccgcttgctcggtgccctgcttcagcacctcctggaaggacaggagcaattccggggaaagcggttcctccgccgtgtccagcatggcatcgaacagacggaagtggttcgttgcatcctggatgtccgcaaggcgggcgtgaccgtcgacggtccgtgtctcgaatatctgccgggtctgctcctcggtcaggcgtgatccttcgatatggttcgagttgtaagccaactccacctgagtcttgtggtagatgtttccctcaagcttcaagcggcgctggcgacggtattcttcaagcaaatcagccattaatctcctctacgtcacctgttcgcccaaggaagtcagcgaggttctcccgacctacacgttgaacttgaagtgcatgacgtcgccgtcttggacgacgtagtccttgccctcttggcggagtttgcccgcatcgcggcagcccttctcgccgcccaaggccacgtagtcctcgaaggaggccgtctcggccttgatgaagccgcgctcgaaatcgctgtggatgacgccggcggcctggggggccttcgcgcccaccgggatggtccaggcgcgggtctcggtctcgccgctcgtgaagtagctctgcaggccgagcaggtgataggcctcgcggatgaggcgcgccagaccgctgtcggtgagccccagcgcttccatgtactccttggcctcgtccggatccatctcggccagctcagcgatgtcggcctccaccttcgccgaaatcggcaccggggtgcagccgtcgatctcgggcagctcggcgtccacggcgtcctcgtccacgttcgcgatgtagagcatcggcttcatggtgagcaggtgcagctcgtagatggccgcgacctcgtcctcggtcagccccagcgtgcgggcgcgatggccctcgttcaggccggcgagcaccttgcgcgccgcctccagcttcgccgcgccagacttatcgcgcttggcctccttttccagacgcgggatggccttctccaccgtggcgatgtcggccagaatgagctcggtcttgatagtgtccacgtccgactgcggatccaccttaccggccacgtgggtcacgtccggatcgccgaagaagcgcaccacctcggcgatggcatcggtctcgcggatgttcgcgaggaactggttgcccaggccctccccctggctcgctccggccaccaaaccggcgatgtccacgaactccaccgtggcgggcacgatcttcgccggatggtcgatttcggccagcgcctgcaggcggtcgtcgggcaccggcacgatgcccacgttgggctcgatggtggcgaacgggtagttggcggccagaccgcccttgttggtcatcgccgtgaacagcgtggacttgccgacattcggaagccccacgataccgattgagagagccattcaaattccttactagaaagagcgtttcaaagctaaaccattatagaactttattttgcaattcacaggttcgcccaaggaagacagcgagggcccgacaggtgcctgcaatcggcccgcctttgggccaagttggctttcgccaacgccgcgcccaaaacaagggtcgagtgcagatgcctgtcggacccgcagcgtcgaggtgagttagaaagccgaagctttctaactcacatggaaaagaagccgaactgagccgcgacgtaggcgaccagaatgataatcaccaacaccggggcgatgtacttgatcatgatcgtccaagcaccggcggccgagaacttcgaggagatgcgcacctcgtcgatgatggtcttgggcttcacgatccagcccacgaacacgcaggtgagcagcgccacgatgggcatgagcaccgagttggagatgaagtccgcgaaatcgaggatcgaggaaccggccccgagcggctcgatgaacgacagcccgttgtagcccgcgttgatgatggcgccggcgatgaccacgaaggcgataacgatgccgagggccttggcgcgcgtgcactgaaggccgtcgtgcacgatggagacgagcgtctccacgagcgagatggcgctcgtcagcgcggcgaacagcaccagcaggaagaacaagaagccgatgaaggtggccatgccgcccatgtcgacgaacaccgtcggcagcgtcacgaacatgagcgaggggcccgccttggcggccaccgcgtcgccggagcccatggccacgaaggccgcggacacgatgagcaggccggcgatgaaggacacgcccagatcgaagccgccgatgcgcacgaccgaggaggtgaggctgtcctgcttgcgcatataggagccgtaggtgatcatgatgcccatggccagcgacaggctgtagaacatctgccccaacgcgccgatcacgagctccggcgagaacttgctgaagtccggcgtgaggtagtacagcgcgccctccacagcacccggcatggtgagcgtgtaaatggcgatggcgacggccatgatgatgagcgccggcatcatgaacaggttcgccttctcgatgccgcccttcacgcccaggcccacgatgacgaacacgatggccatgaacacgagcatccagatgtagctctcggcgttggaggtgatgaagccggtgaagaagtcgccgccgtcggccaaggcctccggtccgttcaccaggtaggccgccgtgtacttcgtcacccagccgccgatgatgcagtagtagggcgtgatgatgaagggcaccgccgaggccaaaatgccgatgaaggcgtacttcttgccgaaggccttgaaggcaccgatagcggactgccccgtcttgcggccgagcgccgtctccagcagcaaaagcgacacaccgaaggtgaacacgagcaccacataggtgagcaggaaggtgcccccaccgtacttcgccgccagataggggaagcgccacatgtttcccaggcccaccgccgaggcggccgcggccaaaatgaacgcccacttccccgaccaggaagcgcgctgcttcttaatctctcctgccatagtcttcctttcccatttccaaggcgcccgcgcgccctcgcctagcttgaaggaacgggcgactgcatcgcgcacggtgcagccgcccgttgaaactgtgtgattatagcgtgaaattgacctgaacaccccatgtttccgagaaacggagaacgcggggcggccactactcgaacagcttcaccgcgcgctcaagctggctcacgatttcgatatgctgggggcagacgctctcgcaggcgccgcactggatgcaggcgctcgccttgccgtcgccggtgttccagttgtagttctcctgggcgcggtaggcgtcgcccatctggtcgtagatgttgagcgactgcatgatggtgttgatgtgcacgccttcgggacagcccttcacgcagtagcggcaatcggtgcacggaacgcccggcaacgcggccagggcgtcgcgcgccgcctcgatcacctcgtgctcggccggcgtcaggggcaccccatcgcgcatgatggcggcgttctcggccaccatctccggcgtgttcatgcccgagagcaccgcgatcacgttcggaagcgacccggtgaagcgcagcgcccaggaggccagaggcgcgcccggctcggcggtacgcaggatgtcggccaccgaatcgggcagcttcacgagcgtgccgcccttcaccggttccatgatgaccacgggcagcccgcgctcttggcacacctcgtagcagcggcgcgactggatgatgggactctcccaatcgatgtagttgatctgcagctggacgaaatccacctcggggtgggcatcgagcaccttctcgagctcttcggcgttgtcgtggatggagaagccgaacttcttgatcttgccctcggccttcttctcggcgcaaaagtcccacaggccgtactcctcgaagcccggtgtgagcgactcgcccaggttgtgcagcagatagtagtcgaagtagtcgatgccgcactcgcgcaacgacttgtcgaacatggcccgcgcgtgctccgcgttttcggccagccacgccggcagcttggtggcgatggtgaacgagtcgcgcggatagcgctcgaccagcgccttcctcagcgcccactccgacttgccgccgtgatagccgcgcgccgagtcgaagtaggtgaagccggcatccatgaagatgtccaccagctcgcagcacttgtcgatgtcgatggacgtcggatcgtccgcgtccttaagcggcagccgcatgaacccgaacccgagcggcgccaacttccctgcagtctccatggcactccccttttcttgtgcgcacgcgcaaaattaccgatgcgcttatcatagcaggttagtac

SEQ ID NO: 10578 - DNA, 15115 bp, Unknown
  gut microbiota DNA sequence
aaggggttttttaaaatttattaaaactttttgcccaactgcaccacgctgcatcttcttatctcgcaaaagccctgtataatagggataaaccaccgatcctaaggacaagttctatgactcccgttcaccgcaaccccaacacatcaccgcgtccttatcgcttctccaacggcacaccgcagccttcagacgcggcgaagcctgacgaaacggtcgctggccgtgctggacgtgaaaacaaatttgcttccagcgaagcggttcggagcgatcttccccaaacgctcccccttcctcttgtcgcccatgatgctctggaaatcatcgaggaggccggaggagaggcatggtgcgtgggcggcttcgttcgcgacgctctgctcgggcgacccatccacgatgtggacatcgcgacgagcctgccgtggcccgcggtgcaagaggcgttccgacgcgccggctggggcaccgtggaaaccggcgtcgcccatggcactctcaccgtggcatgcgaaggcgagccgctggagatcaccacttaccgcaccgacggcgtttacagcgacgggcgccatcccgactccgtggctccggcttcctctatagaagaggatctgcagcggcgggacttcaccataaacgccctggcctaccatcccgcgcgcgggatcatcgaccccttcgacggcctggacgacatggagcgcggcgtgctgcgctgcgtgggcgatccggcgacgcgtttttccgaagatgcactgcgcatcctgcgagcctgtcgcttcgcctcccagctcggcgtggccatcgaccctgccaccttcgacgctatggtcgccggcaagagcctcctgcggaaagtgtccggcgagcgcgtctaccgtgagctggagcgcttcgtctgcggcgactacgttcacgatgcgcttatgacctgcgtcgatgtactggccttcgtgctgccggagcttgtggccatgaagggatgcgcccaagtgacgaagtaccatatatacgatgtgctcgagcacaccgcctgggtggtgcagcgcacgccccccgagccgctgcagcgctggagcgccctgttccacgacatgggcaagcccgcggcggcgttcttcgaggagacggacgaggggccggtggagcatttctacggacacgccgtcatcagcacgcaactcgcctgcggcatcatgcaccgcctccccttccctgcctggctgcgccgggacgtgccgcctctcgtgcgggcccacgacgacgtggtgccccccaatgcccgagccgtgcgccgcatgctggggcgactcgggggacgcaccgacctcttcgcggccctctgcgatatcaaacgggccgacgccctggcccaggcgccgttctgcgctccccgagccgataccgccgacgagctgcgcgcccttatggagcagatcttggaagatgaggccgcgttcaccgtgaagcacctcgccatcgacggccgcgacatcatagctctcggcgtccccgccggtccggaggtggggcgcctgctggacgcgtgtctggacgccgtcatcgacgagcgcgtccccaacgagcacgaggcgctgctggccttcgcggaagagcttcgcaaagaggcgtcctaggccagaaggtcggtgacgaggcgaatggcgaacaggacaatgacgacgagcatgatggggcgcaagatgagcgcccctttcttgtcgaagaaggtggagccgagccaattgccggcgatgttgaaggatgcggcggcgagtcccaaggggatgagcaccgcaccgttgacgagaaacaccgccaaggcggcgacgttggtggccaggttgatcgccttggtagtgccggcggccgtgcgaacgtcctgatgagccatcgcggcgagcagcagcatgaggatggtgcccgtccccggcccgtagaacccgtcgtacacgcccaccgccaaagcgatgagggccgtggcggccagggcccggcgcggaggcagaggatgctcggcgaaacggtcgaggttcttggaacggaacacgaggaacgccaccggaggcagcgccacgagcatcaccacggtgagcacggtggcgtcagctagaagcgccaggttcgcgccgatggccgaaccgaccaggccgcaggcgacgcccgcgacaacgaagcgcttcaccatgtaaccgaacaacgcatagcgcacggtggccaccagcgtgcccaaggtgctggagagcttgttggtggcgatggcggcatggggcggtaggccggcaaagaagtaagcgggcagggagatgaggcctcccccgccggcgatggcgtccacgaaaccggcgatgagcgccaacgggcacacgatgagaaactccacgacgccttcccttcacgcctttccgccatgctcgccggacgcaaaaagagccgcccgagggcggctcgtaagttcttggtagctccgaccggattcgaaccggcgacctccgccttgagagggcggcgtcctaaaccgctagacgacggagccacgaaatgccacgcgagaaaatggctggggtggaaggagtcgaaccctcacatacggcaccagaaaccgctgtcctgccattagacgacaccccaacagaactttctcgctcacaccgcccgaaagcggcgagcgcaagtgagtatgttacggaagcgagcgccccccgtcaagccccaattttgggaattacgaaaaatgcggggagcggccaaagatccacaagactcccggcgtcgcaagggcgcggtcgcagatgggcagccatccgaaagacggtcagccgcatcacggctcaggcgtgcgccactcgcagggatcgggagccgccagcgctcgaatgccctggatgatgatctcgacaccatgggcgaaggcctcgtcggtgtaggccgccgcgacgacgcgctgccaagggagcgtatcgctacttgcgcagcccgcactgctgcccccttcagccacttgcgcacctgaagctccgcagtcgacggaggggcgactcgcccgaaccgcgatggcattgccgataaaccccgtcagataggcatccacgagggcccatgcctgggtcagcaccggctcgggcatcccctgagccagatgcaggttcacgatcttgtcggtgtgctcggccagaccgttctcccctgtttggggcaccacctcgatggtggccaattccggatgagccatttccagccgatagatggaggccatggtgcgtcgcagcgtgtcgtcccaagcctctccgggcaccggatcggtatccatggacgccatgagacgctgaaggacggccacaagaatggcatcccgggagtcgaagtggctgtagacggccatggccgacacgcccagctcgcggcccagggagcgcatggtaaacgcaccgaggccatcgcgctcgatgaggtcggaggccacggcgacaatgcgctcgcgggtgagcgccggacgcgcctcgaccactgcctttcgggccatggcccctccttcctcgctcattgcgaaccgggtttctatgctctcgtctcccagtatagagaaacgacgcgccctgccggacgcgccgccttcttcgccattcgaaatccagagccgagcgcagccctcctccagacccctagttcagcgccacgcccggaccggtttcgggattgtgcggccagctgtggcacttggtgcactgattgtcggtgagctccttatccttcgcgtggcagttcacgcaggacaccggggcaccgtggatggatccgtggggattcgagagtccatagtcggccgtggtctcggccagagcctcaaaggagcctccgtggcaggacaggcactgctcgtcggacacataggcgccagtcccgtcgccggtttcggccatctcggtagccgcatcacccgactcgtcgccggcggttttgggctcggcggccggggcgcaggcggccagggccatgcacagcgccacgatgcaggccaaaccggtcagcttgatcgcgttcttcttcatgagattactcccccttcaccgcgtgctcggcggccacgtacccgaaggtgatggcgcggccgatggacgttcccggaatatggcgcgggtagttgcccgcaaagaaattgcccgaggcgttgcccaccgcgtacaagccgccgatgaccttgtcgtcggtgtcgagtacttggcagttgccatcgatcgtgaggccgcccaccgtggccagcacgcagctgttggtggtcagcgcgaagaagcgcttgcccgtgaacggcatggtgaccgccagatcgcggttgaagtcctcgtcgacgccgccggcgaaaaagccgttgtagcgctcgatggtggcggcgaggttttccccgtcgatgccagcggcctggcccagctcctggggcgtggcgccctcgaacagccagcccttatccttgaactcctggatggtggcatcgtcgttcatgccctccatcatgttctcgtcgaacacctggaagcagccggcgccgtaaccgggctgggcattctgcgcgttggacacgccctggaacggcagatcctcgcgcacgaagcgcttgccctcgggattgatcatgaggccgaagtagatggcgttccacgtgcgggcgtcgaagaacgagtcggggttgccccaacggaagttcatgaccggctgcgggcacggatccatctgggcgcccaccttgatgcccatgaggtgaccgtcgccggtcgtgccccagccgggattccaccagctggaggtagcgtagtcctcgggacgggtccaggcctccatgagctcggggttggcatcgtagccgcccgtggcgaggatgacgcccttgccggcgttgatccggccgtagctgccatcggggttcttcacgataacgccggcgacgcggtcgccctcgcggataagctgcacggccggagtggagaagcgcagctcgagattgtcgtactgcttggccacttcctgcatttccaggcacacgtagatgcccgagtagccggagcgcacgccggcatccggcggtagacaaggactgtcgtagaagccgagctcggtatcgatgagcggggtaacggcgggcatgccgttgctggacggcgcctgctccaccttggtaatgacaaagccgttggcgcccttgtcgagcatggcctgccagaaatccgtggcctcgccggagcgatccacgtaggttcgaatcggttcggggcgcacgcgccagtaggcggcacggtgcatctcgtcaatcaggtgcaccttgttgatctcggtgccctcctggcacttggcgttgacagcgccgaagcactcgaagcagccgcgacctcgggtcatcttctccacgcagatgacgctggcgccttcctcggcgcccttaagcgccgccatgagaccggcgatgccggcaccaaccaccacaagatcgcaatcctcggtggcggccagctcgtcggcggcaatctcgcgatcctcaaagcccaccggcccgcgaggaccggggcaggccgccttccttacgggcacccaggtggtgtcgcacgcaaggccgtaggcgttctcgccggcttcggcggcctcctcggcggcaacggccacgccagcgccgccgagggcggccatggcgcccgcagcaacgccaacggtgccagcgccgcgcaggaaatcgcgccgagatacgcttctttccttcatggttcctccttctctccctgaatccgcttttcggactcaccaagttcccagcccgttcaacatgggatgttgcacgtgctttacactgtaaagtaacagtgcgtgaggaatcatagcaccttaactttacattgtaaagattgaaagacgacagactgtcaaaccgaaagcgcgttgcccgctaggaaagggccggcagggagagagcgacgcaagtagagagctagcagggcattggcgcgccgtactgccacatgtggtcgagggggcccgagccgcgccccaagttcagaccggccgccaaggcaccggccacataggctttggcgtcgcgcacggccacgtccacggcaaagccccgggccaggccgcaggcgatggccgaggagagggagcagccggtaccgtgggtgttgtcgttggtgatgcgcttgccgcgcagccacaccgattcgccgctggccatgcgcaggtagtcgtcggcggcatccggctcgcccacgccatggccgcccttgatgagaatggcggggacggaaggcgccgcgtccgcgaaagccggctcgttctcccaaacggcgatgcagcggtcggcgatcagcgaagcggccgtctccacatcctccaacgatgcgatagccatgcccgagagcacttcggcctcggggatgttgggagtgatcaccgtggaacgggggaacagctggcgcaccagcgcgtccacggcggcatcggcgatgagcgccgagcccgacgtggccaccatcacgggatcgaccacgacgttggcggctttgtgacgatcgagcccgtcggcgatggcacccacgatggccggcgacgacaccatgccgatcttcaccgcgtcgggccggatatcgtcgaaaacggcatcgatctgggtgcccacgaaaacgggatccacctcgagcacgccggtgacgccgagcgtgttctgagccgtgagcgccgtaatgacgctctccccaaacagatgatgggcggcgatggtcttcaagtcggcctggatgcccgctcccccactggaatcggatccggcaatggtgagaaccgctttcatggacgctcctttcgcaatggcggccgcctttccgcgggccgcgcgcaaagccatcatttcacacgaaaggggcgcgcccgcatggccgcccctttctggcaatcaatcgttgacgagacgggtgctacccctcgatgagcttcacggcctcgtcggtatcgacgatcttggcggcgtagcacaccttcatgtactccaagccctcctcctggttacccacaaggaacgtggccgtggcgtcgcccaccacgatgatgttgaagttgttgaaataggcgtcggccaccgtgtgcttcacgcagatattcgtgtccatgccgcagcagatgagcgtgtcgacgcccagctcattcagcagcaaaagcagccccgtctggaaaaatccgctgtagcggcgcttctccaccacgtaatcggtgggctgaggatcgagcaacggcgaggtctgggcctccggggtgccggcaatgccgtgggtgccccacaacgccagctcgcgatcgatgcccgggatatgggcgtcgttggtgaagacgacgggcataccggcggcgcgggcggccgtcgtgagcttggccgtctgctggatagcgggcagcagcaccggctcgagcgggcctcccgtggggtcgcccagctcgtcgatgacgagcagcgcgcacttcgcgcgatcgatggaactaaggtcgatgaggtcgttgttgttctcgtcgccgagcatggatgttcctttctcttgccgtccgtctccctggcacctcaaaatgtgcaaacgatgacttaaatgcctaaggtctcatcgatgatacgcgaaagctcgcgagtcgccgcttcaatatcgtcggcggcaaatatggcgctcaccacggcggcgccgtccacattcagctcggacaggcgcggcatcgtggcggcattcacgccgccgatggccacaacggggatgtccacggcggcggcgatggcgcggaactcctcgggggcgagcaccccggcctcgggcttggtggcggtgccggtgacgccgccgacgcccaggtagtcggccccggctgcctcggcggcgcgggcctgctccaccgtctgggtggacacccccacaatggcatccggaccgagcagcgcccgcgcccgctcgcaggccatgtcgtcctggcccacgtgcaccccgtcggcacccacggccaacgcacattccacgtcgtcgttcacgacgaagggcacgccggccgcgcgacagagcgcgagcagctcctccgcttcagcccgcaggtcctccgcgctcgcatgcttgtccctcaactgcacgaaggtcgtgcccccggcgagcgcctcttccacgcattccgccagcgtccgctcccccagccacgcgttgtccgtcaccgcgtacagcttcaaggcacggcgaatagcctccgccgaccactttccacgttcccgtgcaggcatgttcactccttgttccaaattaaagctcgatatttcgcaaccatttcggtcgaagacgaggaaggacgatccgcgccagatcaagttggtgcttgtttttttgaaaatatttcgattgttagcagcgccgccaaaagcaattaacgtaaacgtttagcattctcgaaatcagcccgcgcagaggcgcaagatttctccttttcctgagcgaaatcgtcccgcttgcccttttcggtgctaacaatcgcaattttcgccaaaaacggaggggtaatttgcttgctgcaccctgccccgcctgccctgcaccctgcgccctgccccgtccgccctctggcctgcaccctattctctgccagcgcccagctgagcacttttattccgcatccagatcgaccacgagcccgtccatgatgtcgttcaccgtcttcatggcgcacatcttgccgcacatggtgcaggtgccctcggtagagggaggtgcgctctcgaagacggcgcgggcgcgggccggatcgagcgacaggtcgaacatctcgtcccaggccacgcggcgacgcgcatcgctcatacggttatcgcggtcgcgggcgccgggcacacccttggcgatgtcggcggcatgggcggcgatcttcgtggccaccagtccctcgcgcacgtcgttcgcattcggcaggcgcaaatgctcggccggcgtcacgtagcagaggaagtcggcgccggaagaagccgcaatagccccgccgatggccgccgtgatgtggtcgtagcccggggcgatatcggtcacaagcggccccagcacgtagaagggcgcctggtggcacagcctcttctccagcttcatgttggcggcgatctcatcgagcgccatatgcccggggccttccaccatcacctgcacgccggcatcccaggcgcggcacgtgagcttgccgatctcgatgagctcggcgatctgcccggcgtccgtggcgtcgtagccgctgccggggcgcatggcatcaccgatggagatgcacacatcgtgctcgtgcaagatagccaacacctcgtcgtagtactcatagaaggggttctcgcgaccagtggcctccatccaggcgaagatgagcgaccctcctcgcgatacgatattggtaagtcgccccgtctctttgaacgactcgatgacccggcggttcatgccggcgtgaatggtgacgaaatcgaccccgtcctcggcgtgggcgcgcaccacttccaggaaatcctcgggcgtaatggcaatgagcgccttttcccagtagccgatggcgtcatacatgggcaccgtgccaatcatggccggcgatttctcgacgagcgcacggcggaaggcacgtgtcttgccggagttggagagatccatgatggcatcggcgcccagttccagggccacgtccaccttctcccattccagggcctcatcggccaaatcgcccgagatgccgaggttcacgttcaccttcgtggaaagcggcacgccctccaacgtggaaccgacgccggccggcgcgaggcttgcgtgatggatgttggccgggatggcgatgcggcctgcggccacggcggcgcggatggcctccggctcgcggccctcggcggcggcaacagcggccatctgcggcgtgacgatgccggcgcgagcgaaatcgatctgagtgattggccgaacgtcgcccggtgcggcgcacgcgcgagcgacgtccggcgcagcaacggcgccgacagactggcggtcagtcatggaaactcccttcgttggcattacccatatcagcttcggcgggtcggggcgtgcacggcgccccctctcagcctgcccggccgccacgcggctgcaagctccccaggtatatggttgtgcgatcagtatagaaaatcgaccggcgctacagcggcagaaacactgccagcgtgccgctttccagggcaatgcgggccggggttccgataaattcgttggaaaggccccagctcgtgcggttcgtgagggccacgccatcaaggccgtatttcaggccctcctccacgactcccgttgaaacgtcggtgagcgagaacaccgacacaatgcccgcacccgccgcatccaagcacagctcgccagggccgacgagaaatgcgacggactcgcgctcccccatcgccgtcactgtcaggccgtgctcggcgaaagaggcgagaagttgcaaattcgccaatgtatgatcgagccggccgccgagcgccccgtagacctccacggcatcggcgccgcgggcgacggcctcgccgagggccagctccatgtcggaggcgtccttctccggcgggaacacgagcacttccaccccctcgggcacgtatcccagcgagtcgaagtcgccgatggccagatcgggcgcgcagccgacatccgccagggatgtgaagcccccgtccacggcgataacggcatcgaaggcacccgccccgttgcgggcggaaaactgctcggaattgaattccgaggccccgacgagggcgtacgtggtcatcattcctcctcttccttccagggcgaaccagaaagcccaacggcagaaccgagctgagcggaaaggtttgaacgccgacggcccttctgtggaatccgcagcagcgccgctctttctgctacaataccacaggcgagcgggccagacggtcgcgtaccccctcaggggtgcgaggaaagtccgggctccgcagggcaagatgccagctaacggctgggcggggcgacccgacggaaagtgccacagaaaagaagactcccctgctcggaacatgcggtgcgagccgcatgcgcgacacaggagaaaagctgaaacggtgcggtaagagcgcaccagcgcggcggcaacgtcgcggcttggcaaaccccatctggagcaagcgcaaataggagcgccatacggtggcccgccgtgcgctcgggttgcgtgctagagacgcggggcgactcgcgttcgagataaatggccgtcctaagacagaacccggcttatcggtccgctcgcctctttgtttcgtttgcctgacggcaaacgaactacgtcgatgctgcggttccgacaggcacctcgctgacttccttgggcgaacgggtaagacaaaagatcgagtaataagaagaaccgcccaataaggcggttcttacataccagatagtttttctcggctgattaatcgatctcttcgaactcaaagtcgtcggcgtcgccgaagccggagagatccttctcgtagggagaggcaaccggggtggcggcggccacgacggcggccggagcctgaggcgtcacataggcggaaggcgccacgtactcgtcgatctcgaagttgccggtgaggccgggcaccacgtcgtactcgccgtcgagcgccgtagcggcagccggcacgttggcgccgatgtcggccagcttgcgcgaggcgtcggagatgatgtccttcagcaggtcggcgtactcctcgcgggcatcctcgcggtcgtcctgcagcttgcggatggcgtcgatgacgtcctgacgatcggtgttggcgcgatcgatgatgcgctgggcctcgtcgcgggcgtcctgaatggtctcggtggcgttcgcgttggccttggcaagaatctcgtcggccgagcgctgggcgatgatgagagcctgggcaatggcgttgtcgtcggcgcgcttgtcggaaagctggcgctccagatcggcgatgatagcgtccttctgggcgagctgagcgtcgtactcggaggtgtcgacggtcgccgcggccacctcggtgatggccaccgtggaagcggcaggcgcgtcgaagccgctgaaacgatcggcctccagctgatcctggaggtgcgcgatggtgtcgttcaaaatatcgatctcgtcggcgacatgctcgaggaacacgtccacttcatccacatcgtagcctttgcggtcgatggagaagctctgattgtggatgtcggaagcggtgattgccatgtaggtacctcagtttcttacgatgttacgtcgctgacacgtcggaatgccggccgtctgaatttagaaaatcatcaccagcaaacgtaccccgaattgtaatacaagcagagcgatgatgggagtcacgtccaccattcctccaaggggcgggatcaattttcggaacaagttcaaatacgggtcgcacaacttgcccaaagcgcgatagatgtcgccgatgatgccgctttgggtgttcggcagccaggacatcatcacgtagatgaagatgatcatggagtaggcgtcggccaatctcacgaggaggtaggtcagcatagttagcaggctcctttatcggaaggtcttgagggcgtgtcgggcgctagataatgccctgggtgcgcaggtaggagcgctcggcctcggtgagctcgtcgatgcgagtgagggcgaacaccttgttgcccacgcattccacgttggcgtccagagcgctggccacaccgaaggagaagtccaggatgcgcttggccagcgcatcgggggtcgctgccaggttcagcaccacggcattgccgagcttcagcgcggtggagacggcctcggcgtcgttataggcgccgggagccaccaccttcaacgtgcgcgacggcgtgaagcgcgagctggaagcagaggagccccgcgagctcgtcgagcgtgtatcggccggaggcgtggtggattcgaacagcgagttcaaaccctcggagcgggcgtggtgcaccgccgaggcggcggccgaggcggcggccgtgccctccggggtcatctgcggcggcagcgaggagtcgaccatggtgcggaacgagctggaggagccgcgccgggtcgcgggcgcgtcatcgtcgggcagcgtgggcaccgccgtgcgggcgcgcacatcatcgatggagacgaggcgcggcatggaggaacggctgcgagagcgctcgccgggctcgcgcgtggtcaccgagtcgtagggatcgtaggccgagccggacgtgcgctcgtaggactcgtcgtagccgtactcgccgtagtcgtcgccctcctcgaattcctcgtaatcctcgtagaactcctcgtaatcgttcttacggccgaaacccagcttcgacttgatgtcgccgaacatgctcttgccgtccatggagcctcctgcttcgtgtgggcggtgacgcccgccgtggttctcagtctaaaggggcgcttgcggccccgcagtgttctcgatcatcataccagcttgaaggctactcctgataagattcactaaagatggcccgtccaacgcgaacaatggtggcccccagaggcaccgcctcgcgccagtcgtcgctcatgcccatggagagctccgtgaaaacggcggcgtcctcggcgggaagctgagcgcgaatctgggcggccagctcggcgagtcccgcgaaggcctcgcgggccgcctgcgcgtcgccggcaggggccatggtcatgaggccgcgcacggacacgtggggcagggcggccaccgcgcgcaccaaatcggccgcctcggccggcgccaccccgctcttcgacgcctcgcccgacacgttcacctcgatgagcacgtcctgcaccttggaaagctcggcagctgcatgatcgattttctcggcatggcgcagctggtacagggagtggataagcgtggcagaggcgacgatctcggaaatgcggcgcgactggatgttgccgatgaagtgccagcgggcctcagggaacgcggcggacttcggcacgatctggtcggggcggttctcgccgaaatcccgggcgcccccctcgatcgcctcggccacgccctcgggcccaaccgtcttcgacacggccacgaggagcacgtcctcgggcgcgcggcccgcagccaccgctgcctcggccacctccgcggccaccttctgatagcgctcggcaatactcacaagctcattcctttcgaccggcgaaggcgctgtggcgtccgcagcggcccccgcttttgcgatacgagaagtaaaggtcgtcgcggcaggcggtgcactcccccgacgacgcgatgcgctccggcgcgataccggcctcggcgaggctggcgcgcacggcagcctccagatccaggtgatcggcgccgcgggcgcacgaggacccgaagcgctcgacgaaacggccgacgaggtcggggccgcactcgtagcactccgcgccgatatgcgggccgacgtaggcgttgtattcggaaggatcgacggctcgccccgcacggacatcgagggctgccagcgccgccacggccttggcgggaatgccggcgagcgccccgcgccaacccgcgtgggccacggcgtaagcccccgacggggacacgacgatgaccggagtgcagtcggcgaagcacaaaagcgccgtcacgtccggcacggccacggccacgccgtcggcaccggcggccccggcgcgcgccacctcctcccatgcggcagccgcatcgtcgtccagggcgagcacgacatcgccgtgcacctggttgagcgtaagcagccgagtactcccaaggcccgcggcgtccaggaggagcgcacggttctcagccacggccatcgggtcgtcttccacatgatcgcccaaattgagaccgtcgtaagggggctcgctcaccccgccctgacggcgagagaagcccaggcgcacgcctgtggccgcaaacagggactcgtcggttaaaaaggacaggcccgctgacgggcgggcctgcaatgtcggcttgggaagtgccatgggattcgaacgtcggcctctcccctag

SEQ ID NO: 10579 - DNA, 23094 bp, Unknown
  gut microbiota DNA sequence
aaggtgaccggcgcctgctggactggctggggcgccggctcggtggaggcgaacaggtccttgcggggcgcgaagtccatggaggactgggcggcgcccaccttgaagcccgtggcgatgaccgtgatgcgcacggcgtccttcagctcctcgtcgatgatctggccatagatgatgttggcgttctcgtcggcgcaggcctccaccgtgcgggccgcctcggagacctcggtcagcgtgaggtccgggccgccggcgatggagaacagcacgcgggaggcgccggcgatggaggactccagcaagctagaagaggtggcttgctgggcggcatccagcgcgcggttctcgcccgtggagatgccgatgcccatcatggcggtgccggcgtccttcatgaccgtgcggatgtccgcgaagtcgaggttgatgaggccggggatggtaatgaggtcggtgacgccctggatgccctggcgcagggtgtcgtcgcagatgcggaaggcgtcgatcatggacgtcttcttgtcgacgatctcgagcaggcgatcgttggggatgacgatgagggtgtcgaccttctgggagagcagatcgatgccctggtcggcctggttgcggcgaaggcgcccctcgaaggagaagggcttggtgacgacgcccacggtaagggcgccgatctcctcgcgggcgatctcggccacgatgggggccgcgccggtgcccgtgccgccgccctcgccagcggtgacgaagatcatgtcggcctcggccagcgcctcgcgaatctccgcacggctctcctcggcggcctggcagcccacctgggggttggcgccggcaccgagaccacgggtcagctcctcgccgatgtggatggtcttgtcggcatcggacatgagaagggcctgacggtcagtgttcacggcgatgaactccacgccgcgcacgccggcttccaccatgcggttcacggcgttcgtgccgccgccgccgacaccgacgaccttgatgacggccaaatgttcagagcctggaatgttcggcatttcgtcctccacacctgttgcgttttactgctgcgtttgtctcgtttccgcgcgccgttgctcgggcgcgccctgcggtccgcccaaaggcggcatttatgcaggacattgtacacgatgcccattcgtttgcaacgcaaatcaccgccaaaggagcctgcagatacacgaatacgacaagaaacccaccgcatcgcgcttcgcgaaacggcaaagcggagcctcgggctatggattcttctcgaaatcggaaggacgtgagcccccgctccaagtcattcgggctcctcggtcgacgaaggggtcattttctgcagcaaatcgcgagttatgagcgtctcgatgcgggagagaaggcccgcagaagtttccatatttgcaaaaccccaggtcacgaacattcgctgcgggggtttcaaaaagtttcgcaccccctagacgcttataactcgcgatttgctgcaaaaacgggggtgttcgccgaccgagagcctcgacacctgtacggtaggcgcggccgagaggggcgaccaaggtcgccccctacgggaaagatcgctcgcgggttcgcccaagggagtcagcgaggagccgacaggcgcctgtcggatccgcagtatcggtggggcttgtcccccgcatggcgagcggaggcacccgtcgaagaaaaagcttcagctgggcgaagcatcctcggtgcccgcgaaagggaaccctacacggcgcgccaggtggggcggtcggggacgcggacgttgatgtaggagactttgccggggttgtcggccatgatctgcaggacgatacgctccttgtcgcggatatcctcggcggtgccgaaggcgatctcgatgccgttgtccaaggtcaggcacgtggaggcggcatcagtggccgtcaccgtcttcacccggtcggcaagttccgtggaaaggccgtccagaatagccaaggcgttgttcacgttgccgtcggcgcagtaggtgcccacctcgggcgtgaggccgaagggcacgccggtgatgtgcagcacccggtcggcgtcctcgtagatctgcggggagatggtggcacccagttcggaatcacgggccggaatctccatgagccacatgccgtcggaggcgatggcccacatctgcgtgaccttcgcgttgtcggccgctacctccacgatggcggcgatctcgcgctcggtgacgttgatttccagcgtatcggggaaaatgcggttcacggacacgtcggcgacccaggcgtcgcggtcgacgctgttggccaccgaggaggtgtccacgttcagaagcgtcgtgccctggggcacggcagcgagaatggccatctcgtcgttggtgaggtggtcggcaccgttcaccttcaccgacgtgatggcgaaggccccgccgaaatagagggccgcgtaggcgatgcccagcacacaggcgagcacgagcgccacgattgcggccttgaaggctccggagcgcttcgggcgggcgatggcccgagccgctggtgcacgtcggtcgctgcgcgctgcgggcaaatcccccaggcgcaccgacgtggtcaccgtgcggggcgcgggacgggcgcccgaggcgcgaccgccggcagcgcggccgaccgtcgcggggcttgccgcgctgcggcccgagcgcgaggccgggcgcgacgatggggcctggcgggaggaggccgggcgcaccggcgccgccgcagggcgccgcgatggcgagacgccgccgcgcgcgctcccgcgcgaggtggtcccccggggcaccgaaacattacgattgccggatcttctaaccacggcgaccatcctcgccgtgctcctcgctcgcaaaggctacccggtcctcgccgtcgctgacgcgcccgcgttcgccagcaagcgtgccatcgacgccgcccgcaaagacagcattcgcctcggacggaacggcgcgcccgcgttcgccgatgcgcacgccgtctacgtccgcatcggcgcttgcatcggcagacacgtcgccagcaccacgtgcagcagccggaaaatcttcctcaaaccccagcaggcgcacctcgggcgccagctcgataccggcactcgcgagcaccgccgcgcgtacccgctccatgagcgcgcgcacgtcggcggccgaagcaccgccgcgattcacgatgaagttgccgtgcacatcggacacgcgggcgccccccacctcggcgcccttgcatcccgccgcctcgatgagacggccggccgaggctccttcggggttcttgaacacgctgccgcaggtgggttcggaaagcggctggcagcccttgcgccgggcgaggttgccctccatcttgtcgcgcacccgatagggatcggcggcctcggcggccagctcgcattccagaatcacctcgtccgccgcaaaggagctcgcgcgatagccccacgcgatctcgtcgccgcggcgccggaccagaccgcggcccggccggtaggtggtgacggaaacgacacgctgccctatccactcgtcggctgtgccggcgttcatgcgcagggcgccgcctatggtgcccggggtgcccacggcgaactcgaagccgccgatggcgcgcttgaaggcctcctgcaccaccgaggagagcgaggcgccagcgcccacgacgaagcgatccccgtcgaagcgcagggtgcggaaatcgcgtccgagggcgatggccacgccggggaagcccccgtcggccacgagcacgttggagccgcggccgagcacgacccaaggcgtgccctcggccgcgcacacatcgaccagccccgtgagcgcccccacggaattcgcgcgcacgaaaaagcgcgccgggcctccgatgcggtaggtggtgtggcgacttaagggctcatgggcgtagacgtcgccgtcgaagcggtcgtccacgagcagcgattgcacgggcgaggcgtggcgggccatgggactcccttagcggcccagctcgtccacgagctgcggcgcgatagcggtcacatctccggcgcccatggtgatgacaaggtcgccgggctcagccacttccagcatatggggcaccacgtcgatgcgccggggcacgaaaacggcatggggatggccgtgatcggtgacgacgttcaagaaggtcttgccggtaacgcccggcaccggtgcctcgccggcggagtacacgtccatgaaggtgacggtgtccgcctcgtcgaaggcgctgccgaactcgtcgcgcataatgtcggtgaacagggcaacgcgggaatagcggtgcggctggaacagcacgtgcacacggttgaaatccagggccttggccgccttgatggtggcggcgatctccgtgggatgatgagcgtagtcgtccaccacggtcactcccccggcctcgccgataaggtcgaaacggcggcgaacgccggcgaactcctgcagcttctcggccgccagatcgacatcgaggcccagaagcgagatgagcgtcagcaccgcggcgccgttggagacgttgtgcagccccgggttctgcttgatgcggctggccaccacgcgcccgtcgggcaaccgcagggtgaaacgggtgcccacgccctgagcctccgtggccaggatacgagcgtcgcaatcctcggaaaagccgtaggtggtcaccgcacgaccggtgccgcgggccacctccgccaacttcggatcatcgccgcacacgacgatggggccgtcttcgcgcactccggaaaggaaggccgcgaactgggcgtaaatctcgtcgagcccctcatagtggtccaggtgatccgcctcgatgttcgtgacgatggccgccgccggggagaggtaggtgaaggacttgtcggactcgtcggcctccaccacataagagcgcccccgaccggaatgggcgttggtgccataggcccgcacaatgccgccgatgaggaaagtgggatcgtagcccatggcatccagcgtgctggcgagcatggaagaggtcgtcgtctttccatgggtgcccgccacggccagcgtgtccagatcgcgcccgaggcgggcgagcatctgggcgcggtgcacgatgggaaggttgcgccggcgagcctcgatgagctcggggttgttctccaggatggccgtggaaacgaccaccgtcacatcgccgtcggggatgttcgcgccgtcctggccgatgaacaccgtgacgcccgcatcgcgcagctgcttggtgtagcggctctccttgatgtccgagcccgacacggccatgccctggtcgtgggcgacccgggcgatgccgctcatgccgacgccgccgaccccgataaagtgaagctgctcttgttcgctattcacgtcgcctcgcctttcgtcctcgttgcaatcccgctattgtaaagcatcagcgcgccgtggcgacgccgaccacaacatctgccaaggcggccgccgcctcgccggtcttctgggcccgggccgccgcgaccatactctcgcgcaccgacgcgtcgtcgatgagcgcgaagagcttggctttgaactcgtcgcttcccagctcgtcgtcgggcatcatgaacgcggcgcccgattccacccacgcgcgggcgttggtggtctgatggtcggccgtggcgaagggatagggcacgagcagcgccggaatggccagcgcggaaatctccgcgagcgaggtggccccggcgcgcgatacgatggcgtcggccgcggccaaagtctcccccatgtgatcctggtagcccagaaggtgccagcggcgcgcctcgtcatccgtgagcgccagcgccttggtcaccgcatccagctccttggggcccgtgatgtgcacgatgtggaggttcgggcgcgcgagcagctcgtctttcagggcgacaacggcctcgttgatgtggcgcgcgcccaacgagccgccgaagacgagcagcatgaaatcatcctcggcaaggtcgaacatcgcccggcccgcggcgcgatcggcctcgatgaccgaacggcgcacgggattgcccgtcacggtgaccggcgcggtggcgcccaggctctccgccgagcactcgtaggtcacgcagacggcgtcggcccgccgggccaggtacttgtttgccatacccgccacagaattctgctcgtgcagcaccacgggcacgccggtcttctcggccgctcggaccacgggaatgcacacgtacccgccgaagcccacgacgacgtcgggcttgatgtcggcgaaccactttttcgccttgcccgtggaggcggcgatcttcgccacgcccttcgcgagggaggccggatgcgatcggtcgaaccctgaggcctcgaaggccgtgaacgggatgccggcggcgggcacgaggcgcgactccaccccgccgggggtgccggcgaagcgcacgtcccagccgcggcttaccagctcgtcggccagggcgagggcggggttgatatgcccggcggtgcctccgccggaaagaacggccaacatggacttacctcctgtaattggaacggttagatgggcgcgcggagcgggatcgggccgaagcatcgatgcggccggatccgccgcggcccgaggcggccgcggagcgcgagcgcgaagactcccccgaccgcgcccggcccgacggcgcagggggcgccgactcccggcgcacgagccgcagatcggcccggcgctgctcgtaaacggacggggcggccggcgccgcggacacggagagcacgagccccaccaagatgaacgaggcgatcatggacgtgccgcccgacgagatgaagggcagcggctttcccgtcgtgggaaacacgccgatgacgcaggcgatgttcagaaacgcctggaacacgagcatcaccgtggcaccgccggcgatcatggcaccgatgtcgtcggaggcccgctcggcgatggcgagccccgcgtacagcacgcagaagaacagcccgatgacgaagagcgcccccacgagccccagctcctcgccgatgacggcgaagatgaagtcgctctccgaggcgaacaggtactggaacttctcgtgggagttgccgagtcccacgccgaagatgcctccctcggccagcgcgtagtaggagcggatgatgttgtagccggtgccgtagccgccctccccgtcgttccacggatccatgaacacgaggcggtctgaacggtagccggtgccgaaaatggccacgagtccgccgagcacggccacgcccaaacaggcgaagatgacccggcgcgacaccccgcccatccacatgacggcgagaatgcccacgaagcagatggccgtggtgcccaaatcggactgggtgcggtacatgagcgcgatgggggcgatgatgaagatgagcgcgcgcaccatggtggcgcggctctccacgagccccgcccaccaatcgacgacgagacgcaccgccaccagaataaaggcgatcttgcagaactccgagggctgcagcccaatgggcccgatatagagccagcgctgggcgccgtaatggtcggtaccggcgagccacacggcgaagatgagcgccacagccacggcccacacggcccacacaatcggccccacccagaagcggtagggcacgaccttccacaagaaaagggcgcaagccgcgccaaaaaccacatacaggagctggtcggtgaagaagtccgtcgccggcttgccggcatccagcgcgttgaccatggaggcggagtacaccatgacgagccccaccagcacgagcgccaagacgcacagaagcagcagaacgcgaggcccctgactggaggggcccgcggacgtctcgctatgtcgggaggagcggctcaaaggcctaggccttcccggcccggtcggccacgaggcgcttgaacacgtcgccccgctcctcgaagcagctaaactcgtcgaaggaggcgcaggccggcgagagcacgaccacgtccccgtcctcggcgatggagagggccgcgtccagcgcctcctccatcgtgccggcggagagcaccggggagaccgccgagtccgcgaaagccgctaggaaccgctcgcgcgcctcgccgaagcagaccacggcccgggcgttctcttcgcaggccgccacgagcggggccaaatcggtgcccttgtcgcggccgccgagcagcacgatggggcgcgtcggcagaaaggcggtgagcgccaccagcgtggcgtccacgttggtggccttcgagtcgttgtagcaggccacgccgttcacgagccccgccggctcgatgcggtgctccagggggcggaaggtgagcaggccctcgcccaccgccgtgtccgtggcgcccagcacgagcgcgcatgcggcggcggccagggcgttctgttggttatggccgcccttgatctgcagatcgtccacgaagacgaggtcggagacgtggccgtcccacgccacgacgagctgaccgccggcgccgcggaaggcagcggcatcagcgccgcaggtggcgcgcatgtcggcgccgagaccggcagcgcccccgatggggatgtagcggaagggaacgccgcctcgggcccgcagctcgcggatcttcgcgcgcacggcgtcgtcgcaggcatcgagcacggccacaccgccgctggcgcccagattggcgagcaccttccacttggccgcggcgtaggcctcaagactgccgtgccaggacaggtggtccggcgtgatgttgagcaccacggccacatccggcgcgaacaagcgcgtcgaggccagctgatagctggaggtctccgccacgtacacgtcggtgttcccggcggccaccgcatcgatgcaagtctcgccgatgttgcccacggcggccgcgttcgcgcccgcctcccgcagcaaatggcagatgagcgccgtcgtagtggtcttgccgttggtgccggtgatggcgacccacttcgaggaagcgtcgctctcgcgccaggcgaattccacctcgctgatcacctcggcggaggccgcagcggcgctccgatagaacggagaattctcggaaatgccggggctcgcgatacacagatcgtaggtgccctcgatggtctcgtgatcgaagagcaccacggccccgcgctcgcgggcgccctcggcccaggccagcgccgcctcgcccggcgcgccggcggccacggccagcgcctccacgcggctgcccagcacatccaggcagtactccgccgccgccgtgcccgactttcccagccctaagataagcacgcgcccgaggaacttcggggcgtgtttcttgccggcgatcatctccacgttttccatgccttccaccgtcatagcccttacgcccccaacgtcgtcgcgaagtacagcacaaagccgcaggcggccagcatgcccgaaacaatccagaagcgcacgaccaccttcgtctccgaccagcccttcttctcgaagtgatggtgcagaggcgccatgaggaagatgcgctttttggtcttcttgtagtagaacacctggatcatgaccgagagggcctcggccacgaacagaccgccgatgatgatgacgacgaactccgtcttggtcaccacggcaaggcaccccagcgccatgccgagggcgagcgagccggtgtcccccatgaagatgtcggccgggtgcgagttgaaccagaggaacccgatgcaggcgccggcgagcgccccggcgaacagggccggctccagcacgcccgcgcggaaggcgatggcggccatgacgagcatgaccaccatgaccgtgcccgcggccaaaccgtcaagcccgtcagtgaggttcacggcgttgcagagccccacgagcaggatgaggcagtaaataaggtagagccagggaatggcgatgccgtcgcccacgggcaccaccgtggtgagcacacccaaatcgagggtggccacaaacgggatctccacggtgggcttgatgccgagcaggttcaccgccaccagcacgaaaacggcggcgatgagaaactggccgatcagcttcgccttgggcgtgagcccgagcgatcgctcgtgggccaccttcgaggcatcgtcgatgagcccgaggatgccggtggccaccgtggcgccgagcagaagccacagctccgcggtaggggcgcccaccgaggcgagcagggtgaagacgatgacggcgatgagcatgatgacgccgcccatagtgggggttccctgcttcaccagatggctctgggggccgtcggcgcgcacctgctggccgatgtggctcgtcttcagaaagcggatccaggcgggcatgagcaccatggtgatcaccatggcgatggccacgccgaggaagatcatgaacgtggggtaggcggagaacagagagaacatcagttgaccaatccttcgacgatacgggtaaggcccatgaagtgcgaggccttcacgagcacggcgtcgcccggctcgagcagcgcgtccagctcctccagcacgtcggcgacggtgtcggcgcggctgatgcgcgccgcgtccatgccggcggcctcggcgcctgcagcgatatgccgcgccagctcgccgatgcagatgagcttatcgagatggtgcgaggcagcggcggcgccgacgccctcgtggcaggcgggggcgaagctgccgagctcgcccatgtcgccgagcacggcgatgcgccggccggccacatccgtggcggcgaaggtcgcaagcgaggcgcgcatggaatcggggctcgcgttgtaggcgtcgttgatgacagtgaagccgccgcgggcggcgatgatttcctggcgccccggctcgggcaccgacgcgcccagcgcgacggcgatggtggccaaatcgagccccaaggcgaaacccaccgaggcggcggcgcaggcgttgtccacgttgtgggcgccggtgagggagagcgcgcagggcacgcgttccacggtggcgaacagggcgccgtcgtcgtggtcggcggcatcgcgggcgcacagggtgaagcgggggcggccctcggcgtccagcgacacgtcctcggcccagaccgcctgatcgcaagcggcgctctcgcgctcgagcgccccgcgaagggccgcatcgggatgcccggcgaagccggagagggccacggagcgctcagacaggcgtccgcgctcggccatgaaggtggcgaaatcgtcgtccaggttggcgaaggcgcggcccacgccggcgggaagcgcctcgaagagctcggacttggcccgcgcgatgttctcccggctgcccagaagctcgatatggctctcgcccacgttggtgataaggccccacaccggccgcacgaaatcgcacagctcggcaatttgcccgcggccgcgcatgcccatctcgacgacgaccacggccgtctccggatcggcgttgagcaatgtgcggggaacgcccagctcgttgttctggttggccttggtggccaccatgctgccgtaggcggcgcacacatcgcgcgtgaggttcttggtggtggtcttgcccaccgagcccgtcagcccgatgacgcgcccgcgcaggtgggagcgccaggcccgggccagatcggtgatggccgaggcggtgttgggcacctcgatgatggcggcccccagctcccgggccagaagggcgcaggactgcgagggggcatcggtgaccagcgcgcccgcggcgccggcgcgcagggcggcctccacgaacgcgtggccgtcgacgcgctccccgggcagggccacatagagccagcccgggcgcacttcccgcgaatcccaggtgatgcccgtcatgagggcgctggcgtcgatggggtctacaaggaactggccgccggtgtatgctgcgatttgttttgcgttgaggcgcacgccgagtcctttcgcctagtccgaacacgcaccgccgaaggcgcgctccaactcctcggccgccacgacgcggtcgtcgaaggagagcacttcatcgcccacgagctggtaatcctcatggcccttgccggccacgaggatggcatcgcccgggcgtgcgagcgcgatggcggccgcgatggcactacggcgatcgggctccacggtgaagcgctcggcgtcttccatacccgccacgatatcggcgatgatggcatcgggctcctcgtgacgcgggttgtcgctcgtcaccacggcgtagtcggcgcccagcgccgcagctcccatgatggggcgcttggtggcgtcacggttgccgccgcagccgaagacgacgatggtgcgtccgcccgagagctccttgatagaggcgatggccttggcgagcgcgtcgggggtgtgggcgtaatccacgtacaccgacaccggcgcgtccaccgcagggcgcacgcgctccaggcggccgggaaccgccggcatggtggccagggcctcggcgatgatctgggtgggaatccccaaggccagcgcgcagccgaaggccgtcatgacgttctccacgttgaagcgccccacgagcgggtactccaccgcgatgcgcgtcccgcgcacctcgagcaccgccttggtgcgggcggcctcgtaggtgacctccaccggatggatctgggcggagacgtcgaagcccgtggtgatggcctcgtcgccggcggcggtgcagcggcgcagaagctcgcgcccccaggagccgtcgatggagatgacgcggcgggccgggtagtccttcgagaacagaagcgccttggcctcgaagtagtcgtcgaaggtgtggtggtagtccaggtggtcctgggtgaggttcgtgaacgccgtcacggcgaagtcggtgtcccaggtacggcgcagatccagcgcgtgcgagctcacctccatggccaccaccgtgcagcccgcgtcgcgcatccgcgcgaacagcttctgcaagtcgggcgactccggcgtggtgcgctcggcgtgttccatgacgcccgcgatcttgttgcccacggtgccgatgacgccgcagcggttgccggccacgctcgcgatgtgctccaccagataggtcgtggtggtcttgccgttggtgcccgtgatgcccacgagcgagaaggcccgggaggggttgtcgtagtagttcgccgaggcgtaggccatggccttgcgcgagtcggagacgacgacctcggtgacatcggtggcgtcggccaggtacaccttgcgctcggccaccagcgaggtggccccgcggtcgatggcgtcctgggcgaaggagtggccgtcgacgacggtgccgacgatgcagaagaacatatcgttcgggcgaacctcgtcgctgcggaacgccagccctgccacctcctcgttcccgttgccgatgatggtgcaatccatcccttggaagagctctgagcaggtcttggtcataacggtatcgttcctctaattcgacggcatcgaagtaatgttgtactgcttgacagcattctccattatatcgttgaaaatctgcgtggtctggcgcatggcgtaaacctcgttggctcctacaaaacaaactaaattgcttgacgagttgtcaatgaagccgcagaagccgatgttataaacttccttcttgtagccgccctcttccgaggcgatttccgccgtggacgtcttgccgcagacctcgtagccctcgatgtcggcggcggctcccgtgccgtcggtgaccaccgagcgcagcatcgagcgcatatcggcgagcaccgtttcatcgacgcccgtctcctcgctttcccattcggccacctccccgctctggggcttcgagatgaggaagtgcggggtcacgagcgtcccgtcgttggcgatggcgctgtagaagcgcaccatctgcagcggcgtcaccgcgatgccctggccgaagctcacgttgtagccggttatcttggcccagttgtcgaagtcgagcacgttgccgcccgcctcgccgggatagtccacgccggtgggctcggtgaagtggaagcgcttgatgttgtcgtaaagcttgtcgaagcccgcctgttccgtggccagcgagatgcccacgttcgacgagtggttcaggatctcgcgcagcgagtaggtctcgccgtcgcgctcgtgggagtcggagacgtcgtagtcgtcggcggagatggagctcgggcagaacatggtgtcctcggggcccatggtgccttgctccaggatggtgagcgccgagacggacttgaaggtggacccgggctcgtaggcctgggtgatggccttcaccgattcgctgcccacctgcgacgaggacatgtcggccgggttcatgtagggcaacgagcatgcggcgtaaatctcgccggtggcggcgtccatgacgatggacgagccctcctcggtctccaggtccttcacgccctcggcgagcgcctgttccacggtgtcctgcagcttgatgtcgagggagaccatgatgtcctggccgttgacggccggcgtctcctccttcacgccgccgggaatggggaatccctgctcgccgcgctcggcggtgtaggtgcccggcgtgccggaaaggatgtcgttgtactgcagctcgaggccggtgatgccctcgccgtcgacgttgcagtagccgatgacctggccgccgatggagccgttggggtactcgcggcgggtgtcggcgatgaagtagacgccgtccagcttgagttctttgaccttatcggccacttccacgtcggcttggcgcttgatgtagacgaaggtggtggaaggagtggacagaagctcgcggtagtcggccgcatctcccccgagcaccgaggccagagacgccgcctcggccgctgcatcggtcacctccacggggttcgcgtagatggtggtggcctccaccgaggtggccagcacgatgccgttgcggtcgtagatggtgccgcggcgcggcgtcgtctcgaagctgaccgtgcgggactcctcggccatggccgagtactgatccgatacgatgacctgcagaaacaccaagcgcaggaagaacacggccgctatggcggcgaaagccagcagcagcaccttggcgcgcccggagaccgtcggcatggccgcgtcgatggcggcgcccacgcccgggcgggccggacgagcggcgcccgcgcgccccgaggggcggccggaccggttgccgcctgcaaagccacgaccctgcgaggaggccgaggcccgacccgtgcgcgaggaggcgcgccggggctcgtcaaaggagcgtccgcggacgcgcccggtgcgcgaggcatcggcgcggccgccgcggccgcttttgtcggggtagcggtagcgttccatgggattagagccccttcatgcgcgccaccgactccgacagcgacaggctgccggcgccatcggtggcgacgatatcgggagacagcgtgatctgctcgctgtattcgggggccggggccgccatgccgagggccgtggcctgggccttgatgcgcgaggggttcgccagcacgctctgggacacctcaagctcgttgccctcggcccgggcggtctcgatgctcgtctgcagcgagcgcgtctcaagcgcgcaggaagcggcagccgaggtgatggccacgcgggccatggcgatgagcgctatgacgatgcagatgacggcgcaggccttcgccagggaaagcgcggccgtcgagatgccctcgctctgggcgcggcgaccggcaccgggcaccaccgagatggagggcgcctcttcgaaggagagttcctcggccagagacgaggagacgtagcgggcgccgcggtagccggaggcagcgccggcgcgtccggcggaggagcgaccgtaagagacgcggtcggtgcgggggcgcgacgtgcgcgaatatgatgcggcgctcatcttggccctcctcactcattctgcggctcaagcgtccattaaggcttaacaagcccgatgacagcgtcctcgggcttgcttttgttctcttgtcgggcgactcccctagcgcttgcgcgccacgcgcagcttggcactgcgcgagcgggggttccgctcgatttcctctgccgtcggcagcagaggcttgcgggtgataagatcgagtaccggctgctttccgcacacgcacaccggaatgtccggcgggcaggtgcatcggttcgcgaatgccgcgaaggcgtctttcacgatgcggtcttccaaagagtggtagctgatcaccgcgatgatgccgcccgggttgagccagcggaccgccgcgtcaaggccgcgacgcagaacggtcagctccgagttgacttcaatccgaagggcttggaaggtgcgcttggcgggatgtccccccgcgcgcctcgccgaggcgggtatggccgccttgatcacatcgaccagctgaccactctcggttatcggagcgtccgcccgcgccttcacgatgaagtccgcgatgcggctcgcccacttctcgtccgagtaactgcgaatgatccgagtgagatctgctgcgttgtaggtgttgacgatctcttctgcggttagggtttgtttccccggatccatccgcatgtcgagggggccgttctccttgaaggagaagccacgtgattgcgtgtctatctgcaccgacgagacgcccagatcgaacagtatcgcgtcgatgccggggatctcgcaactcgcgagcagctcatcgaggtcgccgaagttgccgcgcagaagcgcgagttcgggacgatcgcccgcaggtatcgtttccagcttcgcggcggcctcggtgagcgccacctcgtcctggtcgatgccgatgagcaggccgcctgggcccaattgcttggccgcctcgaaggagtgccccgcgaagccgagcgtggcgtccacgaacaccggatggtccggaaggtcgagggcgtcgatgcattcggtgagaagaacgggtatgtgccggtattcgcttgtcacggttcgctcgctttccgcctagctgtagaacagccccagatcgacttcgtcgctcatggccttgaagcggtcagcgtcccagatctcgaagcggcccgtattgcccacgaccacgacttccttgtcgatgccgacggcggcgcgcacttccggggacagcatgatgcgccccgaggcgtccacctcgacatcgcgggcgcggctcttcagcacgcggcgaagcttgacgtgctcgcggtcggactccttgtactcgccgaaccgatcgatgaacagcttctcgacccattcgttgaaatcgggcgtctcgaacacgtacacgcactcgttggtcagctccggcgtcaccacgagatctttggaaagaaccttgcggaacttcgcgggaagggccatgcgacctttgccgtcgaccttgaaatggaactcgccattgagatctaccccatgttggggcagctcgcttgtcccttcggtgtcggcagtggcggccacgtgttcctttccgtgctgcgttttgagggggatttgatttcgtttggagtgcgtttcgaaatcccgctcggtcgttttccacagcacgcatattaccccacaatgccccacttcgcaacattttctcccacttttgccctattttcgccccacttgtcatcctcaagatatggaagggtaaccaaaggaaaatgagagtatttcccatatcttgtatttgtattgaggtattgcgcacaatggccactagatatgcccgacccatggggatggtggggcgcggtggggcatgtacccgcgcacgcgccacctgtgaacgagatttgaagaggcgcgccaagacgggcgctgagcggctacaatgaggcccgcgcaccctgcgccgagtcctgcgccgccccgaccggaggcgcagcgagaagtcggaagatctcccgagagaaggagccccgtgttcgaattagagaacgccctggacgagtacttgtcccatctgcgcatcgagcgcggggcatcgccgcgcacggccgaggcctaccgacgcgatctggaggactacctcgccttcctcgacggcgagggcgtggagggcttcggcgacatcgaccgcgagaaggtggccgccttcgagcgcagcctcatggagcagaacctcgccgtcaccaccgtgcgccggcgcatctccgccgtgcgcggctaccaccggttcctcgtgcgcgaggggctcgcgcacgcgaacccggccgacgccgtggacattcccaaggccgccgaccggctgccggacgtgctttccatcgaggaagtgggcgagatgctggacgccttcgtgggcacccggccgagcgacttgcgcgaccgggcgcttctggaagtgctctacggctgcgggctgcgcgccagcgaggccgtggggctcgatatggaggccgtcaacttcgacgacggcttcctgcgcgtgttcggcaagggatccaaggagcgcatcgtgcccattgccggcgcggctgagcgcgcgctgcgccggtatttggccgaagggcgcccggccctcgcgcgcgcggccgccaacccgaccgccgatgctctggctgcggtgttcctgaaccagcggggcggccgcctcgggcgccagagcgtcttcaacctggcgcgcaaggccggccgcgtcatcggccgctacgatctgcacccccacaccctgcgccactcgtttgccacccacatgctgaagggcggcgccgatctgcgcgtgctgcaggaaattctgggccacgccgacatgtccacgctgcaggtgtacacgcacctcgaccgcacccacctccacgaggaatacgcccacgcccatccccgcgacaaaatgaatatctagaccgtcatctccccggcgagggggcgcgccacggccgcggccacctcggccgccgtgaggccctggccgaacaagtgcatgagcttggtgagggccgcctcgcaggtcaggtcgtaaccggacacgacgccggagcgcgccagagcgtcgccggtggcgtagcgtttctcctccacaccgcccgcagggcactgagtcacgttcacgaccacctttcccgcgcgcaccgtatcggccataagctcggtgaaccacgactcggtgggcgcgttgccggcgccgaacgtgcgcagcacgacggccttcacggccttcgattccagctggggccgcagcaccgcctcggtgatgccgggatacagaaacaccaccgacaccgcatcgtccatggaaagcgccagcgccagcgtccctcccgcagcgggccgggcgagcaggcgctcgcggaacacaatgtgcaggtccatgtcggccaagggcggataattgaacgattggaaggcgccgaagttcgtggagctgaccttcgtcgcgcggttgccgcgccacagatggcgcccgaaggagatggccacctcctgcaccatgggcgcgccggcctcggtgcgggccgcggcgatctgcagcgccgtgatgaggttctcggtgccgtcctcgcggatctcgccgatgggcagctggcttcccgtgagcaccaccggtttggccagaccgggcagcatgaacgagagcgccgaggcggtgtaggccatggtgtcggtgccgtgcagcacgacgaagccgtcgaagtcctcgtagcggtcggcgatcacggacgctatccgggcccagcaggccgggttcatgttcgaggaatcgataggcgggttcatctccacgtgatcgagattgaagccgaggcgcccgatcttcggcacgttcttcatcagatgatcgaagctgaagggcacgagcgcgccggtggagagatcctcggtcatgccgatggtgcccccggtgtacacgatgagaatgcgcggttgcataagttaatcctttcgatggcgaaaccacgaggcgcgggtagcgggctccttcttgcgatgcagggtggcgcggcgaaacagctcggcgcagaagtgcttggccgttcgcgcgccacgggccaccttcggcgtgaggtcggcctcgtcggaagtcttccaatcgtagtacaccgacaggtagcgcaggaacaccacggtgaacacgcaggccgccgccgccagcacaagcggcgccttcgcgaaagccatggccgcgaacacgaacgcgccgccgaatccggccaccgcgtagaagttcgagcgctggaacacgcccggcgtctcccccaccgagatatcgcgcagagcgccgccgcccacactggtaagcgcgcccaaaatgaccgccatcacgaagccctccccgcaagcgaaggccttgttggccccggccagggcgaacagggccaccgagagcgcgtcggcgaagaacagcacctggcccgtgtggcgaaacagcccccggaagtagaacacgaacaccgccaggcagatgcatatgaggatgacctcgggatattccatgaagtagaccccgtgatcctgcagcagcagatcgcggatgatgccgccgccgtaggccgtcacgaggcccagcacaatggtgcccacgatgtccagcttgcggtcgcaggcgaagatggccccggtgagaacgcccacggcgacgctgaaaaagtcggccccgaagggcacctgcagggcgcctcccccggcgaagagctgctccatggcttacttgtggtagtagcgatgctgctcgtacttcggctcgcagcacacgttgatgccgagcgtgcggtagagcttctcgtcggccgccgaaatgatgaccgagaagtaggcatcgcagccgcgcagcttgtccacgttgtcgatgagcctctccgccagcgggttgtgcaccgaggagatggacagcgccagcagcgtctcgtcggagtgcaggcgcggattgtggctgcgcagatgggcggtcttcaagtggcagatgggctccagcacgtcgtcggagatgacgtacagctcgtcgtcgacccccgagacacccttgagcgcattcatgagcagagccgacgccgcgccgagcaaattgcccgtcttgcccgtgaccacgcgcccgtcgggcagcaccatggcgccggcggggcctccggtggtctcctccttcagcagcgctgcggagcgggccggcgagaggttctggttgatgcccgcctggttcatcagaagctcgatcttcttcagggccgcctcgcccacgcccgtgcgcttgatctcctcggccgtttggaaatagcggcgcacgatctcgttgttgcccgcctcgcggcacacggcgtcgtcggagatggcgagccccgccatgttcacgcccatgtccgtgggcgactggtacgggcatgcgccggagatgcgctccatcgtggcgcgcagcaccgggaagatctccacgtcgcggttgtagttcaccgtggtctcgccataggcctccagatggaagggatcgatgatgttatcgtcgtccagatcggccgtggccgcctcataggcgatgttcaccggatgggtgagcggcaaattccaaatggggaacgtctcgtacttcgcatagccggcggtgaccccgcgcttgtgctcgtgatagagctgcgagaggcaggtggccatcttgcccgagcccggaccgggagccgtcaccaccacgagcggacgttcagtctcgatgtactcgttcttgccgaagccctcatccgaaacgatgtgatcgatgtcgttggggtaccccggaatgggatagtgcagatagctcgtgatgcccatggccgtaagacgacggcggaacaggtcggcgttgggctggttggcatagcgggtgatgacgaccgagcccaccttgaatcccatggagcggaagatgtccatgagacgcagcacgtcctcatcgtaggtgatacccaagtccccgcgcaccttcgagcgctcgatatcgttggcgttgatggcgatgacaatctccacctcgtccttcatcgactgcagcatggagatcttcgtgtcaggcttgaagccgggcaacacgcgggaggcatggtagtcgtcgaagagcttgccgccgaattccaggtacagcttgccaccgaactggttgatgcgctcgcggatgcgctccgcctgcaactcgatgtacttgtcgttgtcgaaaccttcgcgcatgggcgacactcctttgacgaccgagatcccaccaccggcgccactcgctggcagcgccccgataaccgattcagtatagcgcagggcccatcgccgtcgccgcgaaatcaccacgttcgccgcttctgcacagacaccgcagagaggccccggccgggcacatacaaagagcgccggcacagggccggcgcatcgaatcaacgattcacgcggaaggaagtggttagcacttgcccagctcgcacttgagttcttcctcgtccttgatggaaagagaagtctgcagcacgtcgccgccgaaggggcgcatggcgtcgacgaacttgtcctcggtcatctcgttcaccaccatgaacacggcggcctcgtccttttcggtcagcagattgcgcacgcggttctggaaatcctcgtccacgccgcgcttcacgaagaacccggtgatggctcccagcccggcgccgatggccgcgccccagaagggaataaggaagatgaggccgaacagcatgccccagaacagtccccacacggtggagttgccaatgggctggccgggcgtgaccacatcgaacttgccgttgtcgcgcttggccaccacggcgaccgactgcaggttcacgataagatcgttgtcgagattcaagacttcctggtaggcctgcttggccttatcctccgtggggtaccccagaacaagcaaagttgacatgagcgcgtcctttctctgatgtatcagcgactccctcactgtaaagaaagcccgctcgcctttttcgcgcggagggctcgccgttgccgcccctcccccattcagtcaacgccgcgtcacctatccctccatgccccgcggctctaaaccccgagagcggagctcacccttcgttcgagccgttttcgaatttccgtgagcccgctgttaaaccaccattgacatat

SEQ ID NO: 10580 - DNA, 42609 bp, Unknown
  gut microbiota DNA sequence
tcatcgggggcgacgacgaccatggccgtggccgccatgacgttgtcctccagctgcgtgtcgtacagaggaacagccagcgcgtactccttgccggcgatggtcacggtaggggcggcctccagcacggcgcgggccaagggctccacgatttccatgttgttcgccagcgcgcaggtgcccgcctcgagggtcacaggctcttggccctgcagcgcgcgggcgccgttgaagtcggacagcgacacaacggtgaggtgcgtcgcgcgcacggagcccagatcgtctaggcgcagcgcctccggatcggcgccagtggcctcggcggccgcaacgagcgggtcgtaggtcatgtccggtgccgcgtaggtgctcacctgggcccacgcgcccacggtctcggcccaaagctccggcgccgcatcttgcagagcagcggccatgtcccagttgtaggactcggcctgggccaggcggtcgggggcctcggcctccatctcggcgcggcgctcaagcggatcacccgatgacgaggccgtagatccgccgggcccgtaccatacggccgcgtccaggctggcggaataggggttcgcccgttccgcgccgccgacgaacacctccacaagccccatgcccgaggagaacaccgtgatggagaagaacagcagcacgcacacggcccacagcgacagaaacgccgtgttcaccttgctggcgatctggcgtacggtgaacaggttcagcttgcgcaggtacacgccgcgcatccgcgtgagcacggcgatggcgaagccagcgagcgaccagaagaacagaagcgatcctacgagcatgccgatggtggctcgcagaaattccggctgatccagcatcaccaggccgttttcgatgagttgctcgtaggcgtaagcgaggatggcgatggccgcgacaaaccccacgaggcacacccatgggttgcgcacgccggcccgttcgttcttctcgccggcgcggatgagatcgatgagcttgcaacggctcacggtgatggtgttgaaggcggccaccaccacgtagatggcggcgaagcaggccagcgtgacgaggaaggcgtcgggggagaacacgaactggtagttgctcatggtggtgccgaacagcgccgctgtgaagaacgacaggccttgcgagagcagaatgccgcagatgaggcccacggccagggagagcagtcccacgagcaccgtctcgtacagcacgatgcgcgacacgtgtcccggcgtcatgcccagcacgaggtaggtgccgaactcccgcttacgccggcggatgaggaactggttcgcgtacagaatgaggaagcccagcacacaggccaccaccaccgagaacatgcccaggatgtaggtggtggaatcgaacacgctttgggaagccgaggtttccatatcgaagaggatcttttggctgccgatggagttgaaggcgtagaacaccgccacgccgaacagaagcgtgatgaagtagatggcgtagtcgcgcaccgaccggcgaatgttgcgcagggcgagcttaagatacatggccggcctccccacccaggaaggacaccacttccatgatgcgggcgaagaaagcgtcgcggctctcgttgccccggcgcagctcgttgaacacggcgccgtccttgatgaacagcacgcggcccgtgtagctggcggcgaaggcgtcgtgggtgaccatcatgatggtagcgcccatctgggtgttcatcatctccatgatttccagcatcacggtggcggcgcgggaatccagggctcctgtgggctcgtcggccaggatgagcttcgggtcggtgaccatggcccgggctgcggcgatgcgctgcttctggccgccggacatctgataggggtacttctgcagcacgccatcgacgccgaggcgggcggccatggcgttcaccttgccggggatggtgcgggcaggagcacccttgatggtgagggcgagcgagatgttctcgaagcccgtgagcgtgtccagcaggttggagtcttggaagatgaagccgaggtcgtcgcggcggaacttcgccagctgccggcgcgacatgccggtgatgtcgcggccgcctacgatgatgtggccgctcgtgaccgagtcgatggtggagacgcagttcagaagcgtggtcttgcccgacccagaggggcccatgatgccgacgaactcgccggcggccacatcgaagttcacgccggcaagggcatgggtgatcgagtcgcggctgccgaagaccttctcgatggagcgaaccgagaggatgggggagcctgcgttgacggggtggccggcttggggggcgcggaaggggtcggccgcacggtgggcgccatgggcggtgtgggctcctcttccgctggcggcgctggctgcggaggcggcgccggccacgtagttctcgcgggagaaagcggcggcgatgccgtcgagggtcgtcgtgccgtcgccatcgaggggcacaggcgtgccaggatcggtcggacgcgggccgaaggccgagggggtgggttcggtgtacacttcggccattagtagctcctctcggttttgggcagctggtgggagatgaaggctcccacggccccgatgatagcaagcgtcaggatgattttccctgcagtgttcacgacagtcctttctctcggatgtgcggctcgcgttccgtctgtccggaggcggctcgatggatcgtcccatccctccggagacggctacgcggcattccgattcgctcagacagtcctcgctggtatcgaaggcgttgggattgcctgttccctttcatgttctgccttcgataccatctgcggaactcgctcggtcggaacgccgcgtatccgtctcctgcatgctggaggttagcaccctgcatggccggaggttgtctccgtcttttgcgttcgcgagcctgaattcatcctaaggaaggtacggttttggctccatcgatcgggcttacggttgacttacgaatgtgttaggttctacgcgccgaagagttctttgcgggtgcggtcgtgggggaaggtgaggatgacgcgggtgcccgtgccctcttcgctggcgaggcctacgtgcagtcccatggaagcgcacaagctcgctaccaagtaaaggcccatgcccgtggccgaaccgtgggcgcggccgacctggccggtgaagccgcgctcgaacacgcggggcacgtcggcggcggggatgccgcagccgttgtcgcgcacctcaagcaccgtgcggcctcggggggtgccgggctccttctcgcggacggtgaaggcaagggtggtggcgccgtacttcgccgcgttggtgaccacctgtcccaagatgaacacgagccagggctcgtcggccagcaccgtcagggcgtcgggaatgtcaaaggcgggggtgcagcctttctcgatgaggaagcggctgtggcgcttgcaggcttcccgcgccgcatcggccaaattcacttcgcggatggcgtagtcgcgctcgaccgaggtggatcgcgcgtaatagagggcctggtccacctgggcctcgatgcgttccagctcgcgggccactttggccgactcgggcccggggtggttggcgagcatgagcttgatggcggcgatgggcgtctttatctcgtgaatccacagctccacatagcggcgataggcggccgcgtcgtcgcgcagggccgctgtctcctcggcggaaagctgggagaggcgacgggccacatcgtaagcgatctcgccttccagaaaaggcggctcggcgatgagggagggaagcacgcaggcttggcgcagctgctcggtaaggtggtgcaattcgtgatagaaggcggctttgcggcggtagtccagaaagccggcgcccagcgcgatgagcgtaagaatgtcggcgacgagcagaacccccgacgagttcacgccgagcgcaggcagaatgagcacggtgctggcgagggcgagcaaaaaagccgcgagaccgatgacgttgtcgcgcacataggaagcgggcgtgaaggcggcgatgggcgcattggcggtgtgcgcgttgacgcgttctcctgcagcgctcgcgtcgcggcccccttccgcagcatgcgacgcgcaagagatctcgcagtcctcgcgtgccactgtgttgtgcccgctcataccgtgtaccccacaccgcggcgggtagcgaggaagtcctccggaacgcctagggaaccgagggttttgcgcaagcggttcacattcacggttagcgtgttgtcgtcgatgaaggcgtcggattcccacagggcacacatgatctcgctgcggggcaccaccacgccggggttacgcatgagcgtctgtaggatgcgcagctcgttgcgcgtgagttcggcggtgcgtccttggaattccacggtgccggcgcccatgttcaacgtcacgcctttgtggaggatcgtcataccggcagcagggctcgcgctgcgccgtagcaacgcctgcagatgcgcgagcagcacggcgggccgatagggcttggtcacgtaatcgtcggcccccaggttcatggccatgacctcgtcgaactcgctttccgaagaggtgagcatgaggatgggcaccgagcttttgccccggatgtcgcggcagatggaatgcccgtcggcgccgggcagcttcagatcgagcacgatgcagtcgggctcggcagcgagggcgcgtgccgcggtgtcgccccaggtgccctcgtaagccgccacggcgtagccggaaagctccagcacgtgggccagctccgtgcgcagggcggtatcgtcttcgatgagataaatgcgctgggccatggctgcctctctttcggcggtgttcgcaggtgccgttcgcgcagggcgtggcgctcgggcataaggcccaggcgcgaggttcggacgtggggctcgcgcgcaaggctcgggcgcggtagcgtgggcgcgaggttcgtgcgctcaagcgcgacggcaagcatcgcagcccattgtaagcctgcgcgccgttcccgcccccagcaacttccaaccttacgcaaccgtaagttggttaccagcttcctcggaaggcgtgctcgactgctcgatagtaagcgaatgggcagaatttgcctgagatcttgagttataagcgtctgcagaagaaaaatgtggatgaaattaacgagtaatgtataaagaaggggtgaaaatgtgtgctcaggcgcttataactggcgatctcgtgcaattcagggctggttcgccgccggacgaggcgtgcgcctggacgtgttcgcccggggcgacgggcgggtctacgacatcgagatgcaggtcgccagggagcgagacctggggcgccgcatgcgctactaccaggccgccatggacgtgggggagttggggtcgggcgaggacttcggcgcgctgcccgagagctacgtgctgttcttctgccgccacgacgcctacggcaagggcgagcccgcgtacgtgatcgagcgcaggtgtggggcccatcccgaccttgctgtgggcgacgcctccccgtgggtagtgctgaacgcctcggcgtgggaggcctccgccgaccccgggctgcgggatgtgctacgatacctccggaccggggaggccgaagggcccttgtcgtcggagatcgacgccctggtcggcgtgttcaacgaggacagggagtgggtggaccgcgtgcttacctacgagcaggagaccgagatgcgctgccgaaaggcgcgggaggaaggtcgggaggaaggtcgggaggaaggcgaggcccgtctcgccgtgctcgtgggcgctctgctggccgacggccgttccgaagacgtggccgctgcggtggaggacaaggtgcgtcgcgaggagctctacgccgagctcggaatatgaggccaacgcgcctataccgtgcgcattacgcctgaaggcgatgcgctggccgagaagcgctgcgccgcgcagtccgaggtggccgatcgcatcctgtcgaccctgacgcccgaggaggtcgagtcgttgaacgttctcacggagaagatcatccaccagtgcaaggacatgggcgtccgcggtgagcgcaagcatggtcgccaccatcgtcatggcaagagccgtagctgccgcaagtagcgttcggcacggccccgatgtcttttcagataatggcctcccagggggccattatttttctcaaagattattcttgacatagaataaagcattgttataatagatttcgacagagcgggagatgcgaagtctcctcctctctcctcttctctcgtccgcacgcgcctatccccctcgggcgccaaggacactcatttgcgagcccgggatcccccctccccgggctcgcagcatgtcaggggccggctgcttcggagggaggccggcctctcggctctctgccgctttccatcaaggcgcaccggcgcgttggcgcatgcgcttttcttccttaagaatccctgaggtttcgttgcgaaggcgaaaagtggggtagtatggtcgagaaaacgtggcggcctttgcggggccgcctgcacgtggcgacttccagaggcaccagaccggggagtcgcctggatagggaaggattcggctatgcgagaaatgcccgccaatcagttgaacccgcgcattaagagcgtttggcgcatcaacgatgccatttggattgttgtctcatccctgtgctgctttctgcccttcgctatcatagcgttggtggcgccagaagaagcgtgggccggggtggtggctcttattgtcgctatcttgttcgtggcgctgcttgtgctgtgcgtggtggtgctgccgcccattcgctatgctcgttggcgctacgagcttacgccggattacctggacatcgctcgcggcatcttctggcgcaagcgcttcgtcattccgttcatccgcgtgcagaacaccgacacgcgccaagggcccatcctgcgcgccttcgggctgtccagcgtcaccgtggcaactgccgccggcgagcacgagattcccggcctcggcatcgaagaggccgacgtgctgcgcgatcgtgccgccgagctggcgcgtctggcccgagaggacgtataaatgagcgcgccgaacgtgcccccgcaggtgctcgcacccgcgccgataccccctgcggcggctgccccatcgactgagctgccgcgccaccatgtgcaccacagctatatctggctcgaaagcgtgcgcacgatcttcatcattgccgtatgtgttgtggtggcgaacttctccaccatcattgggcttgttgccgaagagggcatgggcgccgaggcagggttcatcatggcggtggctggcatcggcacgctggtggtcatcctcattacgtttggcatcgtcgccgggctgcgcgtcgttggctacaagcacctgtacttcaccgtcggccccgacgagttcacgctgtgctccggcatcttcaacaagaagcaggtgcacgtgccctaccagcgggtccagtccgtggaccagcgggcgacgctccttcagcgattgttcggcgtgtgcacggtttccatcgatacggccggcggcgcggcgaacaaggccgtcgtggtgccctacgtcaccaaggcccaggccgagtggctgcgcgccgagctctacaaccgcaagaacgctctggccgctcaggctgccgttgcgtcgggcatggcgggtgcagcgagtgcgaccgcggcgggtatggcgggcgcgggcgccccggttccgcagtcggtggaggccggtattgcggctatggcccagggggcggcggcctttgccggcaacgtgccgagcccggccgtcgcgggcaacgtgctcgatgtgggcgccgaggcatggagccaagtgggcggcgtgttcgccggccctgcccaggacaccggccgcgttacttacgagtacggtctcactaacaaggagctgttcttcgcgggtctttccaacaccacatcggtggggctcatcttcgccggtctggttgtcggcgtgctgcaaatcgtcggtttcatcttcgacgtgatgggggatgcagccgatggtgctgtggaaagtgccctagtttttgccggctcccaggcttcggcctacctgatcggggccgtttcggtggggatcatcgtgctggtgctcgtgctgtgggtgttttcggcgttgggttcctgcatcggctacggcggcttcaaggcgcgccgtcgcaacaaccgtatcgaggtggaacacggcttgctgcagcacaccttccaaggcatcgacatcgaccgcgtgcagtccgtggtcgtgaagcagagctttatccgccgtctgctcggctactgcgagctgtctctcggcaagattgacgccgccacgggcgaggatagcggcaataagcagaacactctggccaatcaggggatcatcatccaccccttcgtgaagatgaaccgtgtgccggaaatcctcgccgggctcgtgccggagttctccgaccttccccaggaggcgaagcccgtcgcgaaggtggcgctgcgccgagccgtgctgcgccagggcatctggttcggcggcggcttctggctggccgtggtagtcaccgtgtgcctagtggttttcggttgggtgaatggagaagttgcgactggcggcatcgagctcgattccaaggatctgttccttctgagcattgggtggaacgtgatcgtggtgggtggctatgcgctggcggccgtcctcttcatcgtggatatagtgaacgccgtgctgtgggcccgcgagtccagcttcgcctacaaccaccgcttcatgcaggtgagcaacggcggcctttctcgagaaacagtgagtttcccgcgccagaaaatccagttcggctgcacaaagagcaacccgttgcagcgccgtgcgggcaccgacacgctgctcgccacgacggcggccggttccggcggcaccacgacgacgctcatcgacgcctcccacgccgacgccatggcgtggctcgactggctgaagcccggcggcaaccagtaatcccggaaaatatggtaaagtaccgcccatgagtaaaacagacgacactgcaaattcgaagccggccttcctcgatttcctgcgccccaaacgcgaaagcgttaccgaggacgagatcaaggacatggtggccgagaatatcgagcttctcgaagacgagaagcgcatgatcaacgacatcctcgatttggccgacatgacggtgcgcgaaatcatgaagccgcgcgtcgacatgatcatggccgaggacaccgaaccggcccgcgcggcgctcgaccgcatgcgcggcacgggctattcccgcctgccggtctatcacgaggaagtggacgaggtcataggcctcgtgtcctacaaagacctcatcggccctctgctggacggccgcatcgaagacccggtagctgagttcatgtacgagccgctttacgtgcccgagacgaaaaacgtgctgaagcttttgtcggagctgcaagaggcccgcatgcagatggccatcgtcgtggacgaatacggtggcaccgacggcctcattaccatggaggacatcatcgaggagatcgtcggcgagattgccgacgagaccgacaacgatcgcgacctcattgtgcttgtcgagccgaaccagtggcgcgtcgacggtcgctttcccgtggaggatgccgtggaactcggctggcccgtggaagaatccgacgactacgagacgcttgcgggctggatcatccacgagctggactccgtgccccgggtgggcgacgagctgctggtcgacggctacgccttcaaggtggtgaagatgcgccgctcgcgcatttccatcgtgcaggtgaagaagttgccatcggtaagttgtgaagagtcggtaacgactgcctgacagcgctcagggtcgcacccgcgagacctgcgggaacccagaaagtgcgttttgtcaagcgaacaaagcgtggatgtcggctaccgcctcggcacggtttcagccaactagggtaaaatatccgcgacataaaacagcatagcattctttactgcagcaatcccacaccctaatccagcacgctgcgccgcttgagcggtttagtttcgtgctgtcgagaaagggaatgagtggtcacaaggcgcaaacagagtcatcgcaaaaccgtcgtgctggcgatggttgcgctctgcgtgctgccgatgctggccgtgggcttccttgatgctggttgggcgtccgccggttctcacgacatgggggcgaccacctttggtctcgctcgtcagtccgccgagaaccccagcgcttccgatgtttctcccgacaccgtgcaagacaagtccgacgcggacgttctcgccgtggaagacgtcgccgaggaagcagcgctgaagaccgcctcgtcccgcgatgtgagcgccggcgtgcaggaaatcgccgacgaggaagaggccgcgcgtctggctgccgaggaagctgctcgcgtcgccgagcaggaggccatcgatcgggccgacgccacgcgctcccgctactacgctaccttcggcagcctgccggccggcgatgtggatttctccatcggtcgcgaggcgttcatcgaagaatggtccgcgcgcatcaacgattacctgttcggcagccctctgtctggctacggcgagaccttcgccgaggcggcctgggaagcgggcatcgacccgcgctggtctccggccatttccaacaccgagtccaccaagggccgcgtttgcttcaagtcccacaacgcttggggctgggatcagaccaactggcccgattgggacacggccatccgctcccacgtggccggtctggcccggggctatggtttcaccatcagctactcctacgccatgcgctactgccccccgaactacgacaactggtatcgggatacgctgaatcagatgcaattaatctaataggttccgttcgccctgacgggacgaacggactggccgacgctgcggatccgacaggcgcctgccctcgcacctcaaagcttaccctcacgtaccgaagtacgctcagccgcttttcggcacgattgcaggcgcctgtcggctcctcgctgacttccttgggcgatcaggtgcgtttataatggccctacttaaggaataagaaagaggtagggaatgagcaacgtgattgtggtcgggtgcgggcgcgtggggtcgcagctggccaatatgctctcggacaatggcaacaacgtctgctgcatcgacaagaacgccgatgccttcgcgaacctcggccgtaacttcaacggcagcaccgtgcagggcgtgggcttcgacgaggacgtgctcatccgtgctggcgtggaagagtgcgatgtgctggccgccgtcacccagctggacaacacgaacctcatgtgcgcggaggtggccaaccatctgttcggcgtgccccatgtcatctcgcgtctgtacaatcccgaccacgagcgtgcctatatgcagctgggcatcgactacgtctgcggcacgtcactggtggccgaggatgtgttctcgaagattgtgtcaggccacggctcccacattgacacgttcggtgaattcgaagtgctccggttcacgctggatctttccagccgcgacaacgccaaaacgatccgcgtctcggaacttgagcgcgatcacgaggtgcgcattatcgccttcgaacgcgccgatggctctgcgtcctccattccgacgcccgactcgctgctgtacgcgggcgactccatcctcgcttgtgtgcgtcatgacgtcatcgcgccgttctcgcgttatattctggattaggtggtacccatgtacatcgttatcgctggcggcggcaaaatcgggtcgtatctggctggcatcatgttgaagagcggcaacgaggtggccgtcatcgagcaaaggctcgccacggccgaccgcctctccgtgcagctgactgggccgtacctcgtcattcacggcgacggctgcgactcgcgctaccaagaggacgcgggcatccgccaggccgatgtgttcgtggccaccacgggccaggacgattcgaacctcgtatcctgcgaaatcgcccagcgcgtgttccgcgtgccccgctgcatcgctcgcgtgaacaatccgaaaaacgagcgcatctttcgtgaagtgggcatcgaatgcgtgtcctctacgacgctcatcgcgaacctcatcgaggaggaggcgctcttgggatcggtgtccgtcgtgtcgtcgctgactcatggcaacgtggctctggccgaggtgatggtgccgcgcatgcgccacttctccaatgaggacggcgtgctcatcgacgaggtgccgctgccggacaacgcgatcattgccgccattgccagcgggggcgatgtggaagtggccaacgacgagacggtgctgcatccgggggacaaggccatcgtagtggcggacgaggacgtgctggacgacgtgcggctggcgtttcgggggctctagtggttgcggaaagggccggttgcatgtcgctcggggcggaatcagggggtaccttggttcgcggctgcgagtccgctggggaggagctacggggtattccaattcgcttagacagtcctcgcttggtgaaacagcccactgggctgtttcagtcgctgtggaactcgctcggtcaaggcaccccctgctttctatcggctctcacgttgctgatcgttcttctcgttgccctttgtgcgcctgcaacagctctggcggcggattatcggtgctcggaggtggacttgctggcatcggtggagaccgacgggtcggtgcacatgaccgatcagcgcatcttcgacctcacggaaggggagagcgcgccggagcggttgaagtggctctacgatgggttcatcgaaggggctgaggttactatcgaacgggtgcgcatggcgccggtggatggcgatggtgcgcttgccggggagtggacggagcttcccgagacgacgttccttttgccctggcgcggcggcggagggcccgagcacgacgcctgggcctacgacaagtttcaacatacgctctacgcctttgtggacgccatgcccgagcgcgtcatgctcgaggtggtctaccgcgtggaagacgccatcgaggccttcgacgacgcggccgacttccaatggctttatgttccccaggactacgatgtggccctggccgatgtgcgagcagaagtggtgctgcctgtggcggccgacgattccgtgaaggtcatggaaaacgtttatgcgtggggtcacggccctgctgatggcgaggtggacatccgctccgacggtacggtgatctttacggatcctgcggtcgagcccacgatgtacgccaaagcgcgggtgatgttccccgtcgagtggctgacgaacctgagcgaggaggcgcgcctggcgaatcagggcaccctgcagtactactggacgagccgttacgaggaaacgtgggtcgatacggatacgtctcaggaggtcattcgtcttgggctggctttggggctgctgggcttgtctgcggcgttgctgctggcggcgctcatcgtttggtggcgctggggccgagagcggctaccggcgtttcgcgacgattattggatgaacccgcctgccgacgccatggcgccagccgtgctcggtcgtctatggcgctggaaccacgagagccccgacgacatagtagccacggtgctcgatatggtgcatcgcggtgttcttgaagtgcgagacgatgagctggtcatacctgccgcgggagaggagccggcgaagagggtcgagagtgggtcggccgccgcccttgctgcgcctcgggtcgctgatgttggtgcggatgatgcgcccgacgcgcccgacgctaacgcggctgacgcagccaacgcggagcaggtcgctctcgatgtggccacgctgcggctgctgcgcatggtcgccacgggcggccggacactcagccgcgccaagctttccgctttggcccacgaacatccgcgcgatcttttggaggccagcgcggcctggcagcgtcgcctcaccgctttggttgagccctacggcttcttcgatacagcctcccgtcgcgctcagcatgtcgttttgggggcagcgattttcctggcggttatcgcggtagcggccatcatttgggtcagctggcgtgttggcgtgctcgctctggccacggcggcggccatgggggtgctcggcaactacaccatgcggcgctcccccgagggcaacgacatcgccgcccatgccaaggccttgcgcaactggatgcgcgatggcggctggtcgctcgagggcgacaagctcgctcccgacgagcgcgcggcgctcattccgtacgcctatctgttcggtgcgctgaaatccctcggattcggtgcttccgcagacgcagagggctccgatgccggggatgccgccatggcggttcgggggaaggccccgatggctgccggcgtcgctgctgcctctggcgcccctgccgccgctgcccctgccgatgaagcggcgttcctcgccgccctggctccagtgttttcccaatccttagacgaagcgttacgtgccgcccataagcgcgctgaagtatcataggggcgaagctgcccatccatttcggcgaccatagcccggccgtcgtcaccttctacgagaaaggtcttgatatgaaagagaagtccttcgaacccggtcgcgacaacatcgtgctcatcggcatgcccggtgcgggcaagtcgaccttgggcatcgtgctggcgaagattctctgcatggatttcgtcgacgccgatctgctcattcagcagtcctgcgacaaatcgctccagcgtctcatcgacactctgggtcccgatgccttcctcgagattgaaaaccaggtgctttccgaaatgtccttcgagcattccgtcatcgccaccggcggctcggccatctacagcgagccggccatgaaccacctgtccgagatcggccgcgtggtgtatctgaagatcagcttcgacgagctgaagtgccgtctggccgacttctccgagcgcggcgtggtcatgcgcgacggcatcggcatgagcctgcgcgacctctacgacgagcgcctgccgctctacgagaagtacgccgacatcactgtggatgtgaacgatctgtccatcaccgccgccgcccgcaaggtcgccgccgccctgaagtagcggctcggtttcgcatcgacgggaaactggcggaaaacagcgccactttttcgcggggcgttcaaaataccctgataatatcgcctaactttagcccgctgtagggtagaatacgggcatgtcttgcgtcggcgagggtcggcgcgtatatccgaggccgtttttctgcgacgaatccctggttcgggcgtgcttatcgcgctctgttggattcgaccgcagaaaggcgagcccgtttggaaggcgatccaggttgcagggcctggcgcgctttcggaaaggaagcatctatggccgatttgaacgagatgctcgtcgcttggactggtgagatcgactcctttatgtacacctacattttggtgatcttgctggtattcgtgggcgtctactacaccatccgcaccaaggcggtgcaaattcgctacatcaaggacatgttcactcagctgacggagaaaaagcatgtccagggcgagaaatccatctcgtccttccaggccctcatggtgtccaccgcctcgcgcgtgggcacgggcaacatcgccggcatcgccacggccgtggccacgggcggtccgggcgccatcttctggatgtggctcatggcgcttatcggcgctgcttcggccttcatcgagtccacgctcgcgcagatctacaagattcgcggcaaggaaggcgagttccgcggcggtccggcttactacattcagcagggcctgggccagcgctggctcggcatcatcttcgcctgggcgctcatcctgtgcttcgccttcggcttcaacggcctgcaggcgttcaacatgacttcggcgctcgagtactacatccccgactacgccaccaacggcacggcggtcggcgtgggcatcgtgctcatcgtgttcaccgctttcgtcattttcggcggcgcgaagcgcatctccatcatcacctccatcatcgtgcccatcatggccatcgcctacattctcattgcgctgtggaccacgatcgccaacatcggcgagctgccggccgtgtttggcaccatcttccagtcggctttcaacttccagtccatcgcgggcggctttgccggctcggtggttatgctcggcatcaagcgcggtctgttctccaatgaggccggcatgggctcggccccgaacgccgccgccaccgccagcgtgtcgcatccggtgaagcagggcctcgtgcagagcctgtccgtgtacatcgatacgctgctcatctgcacctgctccgctatgatggtcatggtgttctgggtgcaggatcccgaggccgccatggcgctcaacggcatgccgctcgtgcagatggccgtgaacaacgccgttggcgaggtgggcatccacttcatcaccttcgcgatcttcgccttcgcgttctccagcctcatcggcaactacttctatgccgagacgaacttccgctacatcttcaagaataccaaatggggcatgctcatcttccgcgtgctgtgtctggccgccatcttctacggctgcgtgaacagcttcgatctggcgtggaatttggccgatatcttcatgggcttcatggccatcatcaaccttgtggccattctgctgctcggcaagtgggccttggccgcgctggatgactacactcgtcagcgcaaggagggcaaggatccggtgttcattgctgccagcgtgcccggcatgcccgcctgcgagtgctggaccaccgcggatctgccgaacttcggagacaatcctgtggaggagtacatcgaggaagccgcatcgctcgactcggagggcttgaggtaagaacctgggtatccccccgcagggcggcgcatcgccttgggtcagaaagggtttccgaaagagcggcggctcgcaagggtcgccgcttttttcgtagtgctatactttcccggaacaaaacggcggcccgggcggctgcattaggggagggcgtaacagctatgatcgatattccaagtccggctgtggccgtcgtggggcggcataactccggcaaaacgacgctcatcgagcggcttatcgccgagctggtgggtcgcgggctcgacgtgggctccatcaagcaccattcccatcgcgggttcgacatcgatattcccggcaaggactcctaccgccacagggccgccggcgcctccgagacggttattgcggccccggggcaggtggcgcgcatcaagaccgtggaagacgaggtggagtgcaacgagctggtgcgctcgatgccgaaccacgacattatcgtggtggagggctaccgcaaaagcgggttgcccaccatcgagatcatgcgctcgggtaacgaggccgactgccgtgcggctcgcctgttcgtgaaggcggcccgggagggtctgcctttgacgacggacttcacgcagctggggcgcgcggtcgaccgcgcgggcgacggggctgggcgcgacggggcctgcgacagcgcgggcgagatgccgggcgcgggcgaagtgccgggcgcgtccgactactcggctgccgccgatgctgcggccaagatgccttccaccaacacggtggctgtggtgaccgatatccccgatgccgaggaggctgcggcgctctatggcattcccgccatcggccttgaagatgcggccgctttggccgatttcctttccgagcactacgtgcggccgcgcgtcacggtggtcatccaggccggtggcgagtcgcggcgcatgggccagtcgaaggcgacggtgccctttgcgggacgtcccctcatctgccgtcttgtcgagcgtttgtcgcccgtggccgatgagcttatcatcaccaccaacgaagccgataagctgggctttctccatgatatgtaccccgatctgaccatcaggctcgtgggcgacgcctatgcagaacgaggcgctttgcccgggctctataccgcgcttgctgctgccgagaacccgtacgtggccgtggtggcctgcgacatggtgttcgcgagcgcgcgtttggtggtggccgaggcgcttgccatgcacgagagcggagccgacgtggtggcgccgtccaacaagcacggcttcgagccgatgcacgccatgtaccgcaaggaagggtgcctcggcgctgttcacgcccgcaccgagcgcggggagaagcgcgtgcagagcttcttcgacgacccggcggttacggtgctgcccttcaaccaggatcgcgtcctggaagttgagccccgcggcggctgcttcatcaatgccaacacgcccgacgagcttgctcgcatcgagcagtcctatctcggcgaatagcagaaagggattcgcgccatgccgaacttgaacgatatcatggagatgatggacgccttggagacgaaggcgatcattacgatccccacgttctgcgtcgctgtgcgcaaccgtcattcctcatgccgcaaatgcgccgatgtatgcctggccgacgccttcacgattgagaagaacgagctgaacatcgacgctggggcgtgcgtggcctgcggggcctgcgtggcggtgtgccctacctcggcgttggttcccatggatccgatgcccgacgacttggccggcgctgtggccgagacgaccaacgcggctgatggcctgacggtcatcgcctgcgcccgcaaggcggctcgcaacgtgggcgaccccgataagtacgcagtggtgccctgcctcgcccgcatggaggaagagctgctcgtggaactggtggcccgcggcgttccggagatctgcctggtggacggcgactgccgcacctgcaaatatcgaggcgcggtgcccgccatcgacgacacggttgagtcgacgcgcgcgctcatcgaggccatgggatcggacgcgcagatcacgcgcacgtcggagtttccggcttcggttcaagtagaggatatgcgcaaggcggtcggtgccgcccggcgtgagttcttcacctcctcgggccattatgccaaggatgtggcgaagtcggctgccgagaaggtggtgaacgagaagctggcgcaactgcatctgcagaaacaggagcagacgctgcgggagaagctcggcgtaaagaacggcgcgggcaagatgcccaccatcgaagccgagcgcaacatcgctattctggatgccatgagtcgcatcggcgatccggacgagccagccgtcgacgagatgttcacgcgcattttcggcgacatcgccatcgatgccgagaaatgctccggttgcggcatgtgcgtcatgttttgtcccactgatgccctgcgcaaggcggtcgatcgccatccggacgagggcaaggcgtacctggagttccaggtctccgactgcgtccagtgcaatttgtgcgccgatgcctgcttgaagaagtgcatcgagatcgtacccgtcgtctccatggaagagctgttcgatttcgagccgcgcctcgtggagatttccgccgctaagaagggcaacaagctcttcaatcggaacaagtagcaaagattttcttgtttctggtcacaaaatcgagttctgggtttttctgagagcaaactgtcctcacgtccctgtgtacgccctagaaaaatagatataattaatcgttgtgtgcacacctttcatgagagtgctcgggaaaatccgctcgacgaaacccagaactcgattttgtgaccaattttctgattaagattgtctgtgctatactagcgagcgctctagtgctttagcacagtaaagaagtaaagtggggaaggcgagagactttcctggcgtaccttttagggaggacggaatgaagaaactgacgaagatcgccgctgcagctgcggctctgtgcctgggggccgcgcttctggccggctgctcgggttccaacgacgcggccgataacgcggccgacaatggcgctgccgctaaccccgatgccacgacgctcatcgtgggcctggacaacgcttacccgccctatggcttcatcggcgacgatggcaacctgaccggcttcgacattgatctggccaccgaggtggccgcgcgcaatggctggaacctcgagcttgaagccatcgactgggatgctaaggacgcgctgctgaaccagggtaccatcaactgcatctggaacggcttcaccatggagggccgcgaggccgactatgcgttctcgaagccctacatgcacaacgagcaggtcgttgtggtgaagaaggactcgggcatcagctcgctggatgatcttgctggcaagaacgtcatgacgcaggtcgactccgccgccctggacgtgctggagggcgaccagaaggatctggccgacaccttcgccggcggcaaggcgcagaccatcggcgactacaacaacgccttcatgcagctggagtccggtgcggtggatgccgtggcttgcgacctgtccattgcggactaccagatggccgccaagcccgatatgttcgtgaagctcgagcccctgtccactgagaactacgccgtgggctttgccaaggatggtgacgcggccatggttgacgcggtgaacaagacgctgaaggagatgtacgacgacggcaccatcgccaagctgtgcgagaagtggggcgagtacggtatctcgatcgacaactgggttctcgttgattagttgcttcgcaattaatcaacgctgacgctgcggttccgacgctttgggttcgttcgccctggcgggacgaacgaaccggccgacgctgcggctccgacaggcacctgcccttgccattcagcgctttccctcacggcccgaaggccgctcggccgcgcttcaagtcaattgcaggcacctgtcgaaccctcgctgatttccttgggcgaaccagcgaagggaagagttttaattaatcgggagggcgaggctttttggaggccttgcccttcttgtgggtttaagagcgacgatgagaggacgtggagatggaattctcggtcatgatggggattctcatggaaggtttcgccctgacggcggagatcttcctcatcacgctggtgggctcgctgcctttgggcgtggtggtcgctctggcgcgtatgagcaagttcaagccgctggcgtggctggcgcagctgtacatctccattctgcgcggcacgccgcttatgttgcagctcatggccatcatgttcgggccttactatctgttcggcctgaatatgggcagcgattggaagttctgggcctgcgctatcggcttcatcctgaattacgccgcctatttcgccgaaatctaccgttcgggcatccagtctattccgcgcggccagtacgaggcggccgaggtactgggctacaccaaagcccagaccttcatgaagatcgttcttccccaggtcatcaagcgtattcttccggccatgggcaacgaggtcatcacgctggtgaaagacacgtcgctcgcgttcgtgctcggcatcatggagatgttctccgctgcgaaggccttggccgccagcgaggtgtccatggttccctacgccatcgcggctctcatctactgggtgttctgcctgctcatcgaattcatcctgaaccgtgtcgagaagcgtctcgattattaccacgactaggaggcgtttcatggaaagcaaagcggtcgtaagcctcaccaacggcaagaaggcgttcggggacaacgaggttctgaaggatatttcgctgacggtgaatgccggcgatgtgctggccatcatcgggccctcgggcggcggcaagtcgacgcttctgcgctgcatgacgctgttggaaacccttgattcgggcgacctttcctacggcgatctcacggtgtgcaccaacgacgctgcaggacgcgctgtttacgggggcaaggacgtcatcgccgctgcaaagacccgtttcgggctcgtgttccagaatttcaacctgttcccgcactataccgtgctgcagaacgtcaccgatgcgctcatctgcgtgcagaagatgccgaaggacgaggcgctcgctcgcggtcgcgagcttctggcccgcatgggcctggcggacaaggaatcgatggtgccgtgcgacctgtccggcggtcagcagcagcgcgtggctatcgcccgggccatggccatgaacccggacgtgctgttcttcgacgagcccacgagcgcgttggatccggagttgacccgcgaggtgctgaaggtcatccgcgatctggcggccgagcacatgaccatggtcatcgtcacccacgagatgggctttgcccgcgatgtggccgaccacctcatctttatggacggtggcgtcatcgtggagcagggcccggccagcgaggtcatcaacaatccccagcacgatcgcacccgcgcatttctggcgaattacgatcgggactaggcgctcgcttgcgttctcgcatcgcctcgaggacgccttgaagacgcctcgaaagcgactcggcggcggtcggcgcggggtgcggtggcccgtgcgcggtcggcgcgcgtcgttgcgtctccgcggcggttgtcgcgcgtacaccgattggtgtatctctgtgacgcaagcgtgacgatgggttgccataacggttgagaagttctagggcgtgctaaggtttggcgcacataaggacaaccttacgcgaaggagccttccatgaccgacaccaatagcacccccacgcctccaggcgactctgcctcgggcggccacacccccgcatcgcagcagccggtaccgctgcagccgactcagcctgcgccctacagcgcccagggcgctcagccctacggaggtcagcaggcctataccggccaggcaggccaagcaacgggctatggcgcccagcagccctatggctacggggctcagcaggcgcccggttctgcacagcattctgccggacaggtctacggccagcaaacttacgaggctgaacctgtgtccatgcatgcccagcacgcggctcccaaaggcaacggcggcaagacgtttctcatcgccttcgccggtgcgctcgtggcctgtgtgcttgccttcggcgtctggggtattgcgggcgcgatgatcccgggcggctcaagctcgggcacttcatcggtcgtcaccgatccctccacgggcgagacgacggtcatcgcgccgagcgaggatccgacgttggctgaggcggtgtccgcgaagtgcctgccctcggtggctgctatcaccgtgtacgccgacgcttcccagaatgacgcgatgagccagtactttggctaccagtacggcggccagagcgaaggttccggtgagctggtggcctattcccagggttccggcgtcgtgctgaccgaggacggctacatcatcaccaacaaccatgtggtggaaggcggcagcgcttacgaggtcatggtagccggcgaaacctacgaggctgatctcgtgggcaccgatccctcttccgacgtggccgtgctgaaggccaaggacgccagcggtcttacggttatggagcttggcgactccgacaacctgaccatcggcgagtgggttatgacgctgggcagccccttcgggctcgagcagtccgtcgccacgggcatcgtgtccgccacgagccgctcccagattatgagtgcccaggaatcgatgcagtccggcggtaccggcgaggtcaccatctacccgaacatgattcagaccgatgcggccatcaaccccggcaattccggcggcgcgctggtggatgacgagggcaagcttatcggcatcaacacgctgatcacctcgtactccggcaactactctggcgtcgggttcgccattcccgtgaattacgccatcaacttggcccagcagatcatcgccggtgagacgccgacccatgctcagctcggcgtgagcctctccacggtgagcgcggcgacggcgtcccgctacggcctgcccgtcgacaccggcgcctacgtggccgccgttactcccgactccggtgcggctgcggcgggcatcgtgcctggcgacatcgtcacggccttcgatgggcaggcggttgagtcggcttctgacctcatgctggacgtgcgtaccaagaaccccggcgacaccgtcacccttacggtgaacagcggtggccaggagaaagaggtgcaggtgaccctgggcgacgactccgccagccaaaaggccaagcaggagcagcagagccaggagcagtctatgaacggctacagcctggaagacctcttcggtcgccagcgctaaacggcgtgacgcgcgggcgtgtgccgcccactgcgcccacgccacagctcgaccaaccttggccccttctcggaggggccattttaatggctaataatcctggcgcaccatgggaaatatagcgccatctgctaagatgcgccgcaaatcatgtcatattcggcattcgaggccttgcgtctgccgcatactaactgcactatcccatgatgcgcagaggagcgtgcagtgaggttcggccctaacgtagtggagcacgctcccttttccatccccatgatcggcaacaccgcgactggctatgttatcggcctgactcccgaaggcgccgccgtgtgccaccgcatgttcaccgaggacgtgcccgaagcagaggtcgccgcggtgaatgcggatctgcccattcatttgcgtcgtggcggcttcgtcgtggaaggggagagtgccgatggcgtggcagtgagggaaggtgtggagggggctggcgaaggggccttggggaaaggcgtggaaggtgccgaacgcccggaggatgtcgagcgcgaggaaagcgtggggggtgccggagatgcggaaagcgccgcagccgagggtgccaacatggccgcgttcgactcgcctgtgccgctgcagtcggcgtacctgcacgtcacccaccattgcaacttgaactgcatcggctgctactcggcggtggacgcccgcaatgcgcagcgcgaccttacgctggacgagctgcggggcatcattgaagccttggctgatgcgggctgccggcatgtggttatttccggtggcgagcccttcctgcgcgacgacctggctgccatcgttgcctacgtgcgcgagcgcggcatcgactcggtggacgtgctcaccaacggcacggccgtcacaccggagaagctcgccgccatcgcgccctacgtgggtcgcgtttcggtgtctttcgacggctccaacgctgaagcggcgcccgtcattcgtcgcgagcctttgttcgagcgtctcgtggcggcggtcgagatgatccgtgcggcgggcattgcgccccacatcattccgacggcccacggcggcaatatcgacaccttgggcgagtacgtggctttggccgactcgctgggggccaccatgaacttcagcctgctgtccgcacccgtggaaagcgacgagttggccgctgtcatccctgacgatgcggccctcgaacggttggcccaggcgacgctggcgctttcccggaacggcgtacccgtgctggccgacacgccggtgagcacgagtctttcgaccacctgtggctgcggggcgggatgcgccatggtaagcgtatcggccgatggtgaggtgttcccgtgccacatgatgcacgacgaggcgtttagcttggggtcgcttttggaagaccccggctgcttggccgcgcgccatgcccctgcaccccgcgtgggagagctggccgcctgcgccgattgcgagatccgctatctgtgcgggggcggttgccgcgctcgcgcctatttcgccacgggcgacgtcgaggcccgcgatccctattgtgccctcatgcggacgttctaccgtctgctttttgaggcaatgttaggccgcaactaaagaaaggaggtggaatcatgctgttctatagcgatgcagagccgctgagtgtttgtattttccttggcccgccaggtacggtttgtctgaaggttggcctgtaaaataccatcgtggaaaagtggtggttgtccaatggcgtatggggcaaccgccacattaagctgaaggagaagttttgcgcgacggcgaagatcaagtgctgcacgtagccttaaagcgaatgagaaaaatctgcagaataatcaagtgttgctttatggtggctactattatgtctgcgttgatttgggttattgttgtcgctacgttgctggtgggttggttaaagtcgggccaagaaatggcgggcgctgttctttactcagttgcatacggcgcattcgttgttcttgtcttgtggaacttaacaaggctgtttaacgaggtcgataaaggagagccgccgttttcagaagcccaagctgatcgcttgcagtcgattgcgatcattgctttggcgattgtgattcttgatttcctgatttcggtcggctttattttcgagccagcgcccgagattggcttcggtatggttgcaaacgatggaattgctgagccgacaatcaacctcaacatcgggatgctggtcttttctgctattatgtactcactttcggcaatatttcgatatgctgcgttgctacagcagctcagcgacgaaaccgtgtaagggagctgttatgcctattattcctcgtcttgaccgagtgatggcggatcgcaagatgtccgtcaacgagctttcccagcgcatcgacatctcgccggtgaacatttcgcgcatgcgccgcggtcacatcaaggccgtgcgtttctccacgatggagcgcatttgcgaagtgctgcagtgccagccgggcgacctattcgagtacgtgtcccccgagccgggcaccgaagaggccgctgagctcggcgcgatcgtgaaccgcgaaattgaggagccggcccgcaagcccattggcgccgtttcccgcaccccggtgaacgtggccaactagtctctaccacatccgcacctcacaggacgccccaccgggcgtcctttttcatgcccgcgaaacacccccgaaaagtgctccccgagagctgcacccccgagaaacgtatctccgggaaacacactcgtaccccgacgcccctttttgcagcatcgaggaggttccgtagaggcaggaagatcgacctctccaggtgaaggacgtctttctggcaagttttccgagcttttcgacatggcctgtttgcagtggaccaactgatgacattcaagctgtctagatctaacggaatgtgataagtggacgagagacttcgccccagattcctttgcacccggtctcctcgcgtcgaaaccctcgaaaaacttgccagatttgggcggtttgttctgcacgattcggcgcattgcctgtgccgggtgcgtccttgaccgtccctggcaccgaagatacggtattccctgaaccttgaaatcccgcagaaatcgccgccagcctctcctactccccgtggggcgaggaggagctggccatggagtcgctgcccggctacggcgaccggttcgagcggccccactacggatacaacgtcgagccgtcgtccccggagggcggcctgcagtacctgcgcgaccgctggatgtttaacagagtgctatgcgaggaggaggtgtgccgcaaggtcctgcgcgccgcattggggatagaggtaggggagatagcctatctgaatgccgagcaggcgaaggagccggcggcggcgagccgcggcgtccgcatggacgcgttcgcccgggagggaagccgcgtgttcggcatcgagatgcaggtctcccccgaggatgctgcctatcgcgatgaaatgctcgcggagttcgggctggaaagggccgaataaacatcagaggaagcgcactggaagatggatgtcctccgctggggaggggtgctgtctgtctgatatcaaaatattacattaaaaattattgataacgtgctagtatgttaagtacatcatgaggtcgctgcgccgctgtgaagaagctacggctgcgcgggcacctgaaggagcacgcaaaagcggtcttctgagcggatgggagcatgctatgcctattgtgtcgaaattgaaggtggtcatggccgaccgcgacgtcagtgtcaacgagctgtcggagaaggtggggcgttcggcggtgaacctctcccacttgcgctgcaatcactcaaaaggtattcggatctcgctgctggaggatttgtgccgcgagttgcactgccaaccgggcgatttactcgtgtacgagccgcccgctcgcgaggagcaggactgaccgaatcggcagacgtcgacgagacgccttccatcgctgttattttaaaaagacacgggaaagattcttaagagcttgtgcgagcctttcgctcgctcgctcgattggcggggtgagcggaagttctccgccttagaagttgatgagagagttgaaggggacgtcgagggcgtcggcgatttcgatatatttggcgatgcccgtgttgtgcttgccggcctcgatgcgggcgatgacggcttggtcggtgtgcaccatgagggcgagcctttgctgggaaaggttttgggcaatgcgatgcgccctgatctgctgaccaagcgagtgaatgcgggcttgcaccttttcctgttcgtcgttcatggggccaagggtacgttgatgacgaatcagtcataggtcatatatgacataacttggcaatttctgaagaatgggcgcacgggaagggtagctgcctggcgtctgcgcgatatgcgtttctgctcgcagtggtctgcacggaggtttgcggttcagcaggagagggttcgggtaagcccctatgctcgcgccccagccctgagctaattctttgatcttggaaggctgacgctgcgttggcgagggacttcgggtaatatgtatccgtttacaagatcctgccgacgaagggatgtactcgatggcgaacgaatacaagtacgatcgcgtgctgctcaagctatctggcgaggcgctcgccggcgatcaggggtacggcattgacccgcgagtggtcgatgaccttgccgaggaaatcgccgagatcgttcacgatggcgtgcagctggctgtggttgttggcgggggcaacatcttccgcggcctggccggatcggccgagggcatggatcgctcccaggccgactacatcggcatgctggccacggtgatgaacgcgctcgctctgcaggatgccttcgagcgccacggcatcttctcccgtgtgcagagcgccatcaatatgcaggaagtgtccgagccctacattcgccgccgtgcgatccgccatttggagaaggggcgcgtcgtcattttggcggccggcacgggcaacccctatttcacgaccgatacgacggcggccctgcgcgcctgtgagctggacgtcgattgcgtcatgaaggccacgaaggtcgacggcgtctacgatgccgatccgatgaagaatcccgacgcgcaccggttcgaccatatcagctatatggaggtgctgagccaggggctgcatgtcatggatgccacggccacctcgctttgcatggacaacgacgtgcccatgatcgtcttcgatctcaccaagccgggcaacatcaaggccgctttgcagggtgagccggtgggcacggtggtcgagtaggcgcctggggcgcagggctcgtcggagccgcttgtcggcacgacagcgaggacgagcgtatgccgcgggttgagaaactcgcggcggattctagaaggatttcagggggaggagcccctgagtgattagggaggaaaccctcatggcagatatcgacgagattctgatgagcgcggaagagcgcatggaaaaggccatcacggcgctgaaggagaacttcatgggcgtgcgcacgggccgcgccaacgccatggtgctcgaccgcatcaaggtggactactacggcgtgcccacgccggtgaaccagatggctggcgtgaagacgcccgaggcccatctgctggtcatcgagccttgggacaagggcatgctgcgtgccatcgagcacgccatcctcgagagcgatttgggcgtgaccccgaacaacgacggctcggtcattcgcctgccgttcccgagcctgaccgaggagcgccgccgcgatctggtgaagcagtgcaagacctacgccgaggaagcgcgcgtggccgtgcgcaatgcgcgccgcgacgcgaacaccgcgatcgagaaggccgtgaagaacgacaaccttcccgaggacgaatcgaagcgggccgaggccgagatccagaagatgaccgatcggttcgttgctgaggtcgatgaggttctgaagaagaaggaagccgaggtcatggagatctagggggttcactggcttcacggatgaccggtgggtagggatgaacaaggatttagattacatatttccggatccgcccgagggggttgatcctcgggcgcttgatccggagaggatccccgagtcggtggccatcatcatggacggcaacgggcgctgggcgaaaaagcgcgcgctgaaccgcctgaagggccataaggccggcatcgaggcggtgcgagaggccattcgctgcgcgtcggatcttggggtgcgctatctgaccatctactcgttttccacggagaactggaagcggcccgaagatgaggtcgtggggctgatggatctgttcgccaagaccatgctcgccgaagtggatggccttcatgaagagggcgtgcgcgtgcggacgatcggcgatctctcggcgcttcccgcagagacgcgcgaggctttcgacgaggcctgggagaagacgcgcgacaatgacggtatgacgctggtggtggccgtgaactacggtggccgtcaggaaatactgcgcgcttgccggggctgcatgcgcgaggcggtgcttttgggcgaagagaccggggaagtgatagagcccaccgaggagatgttcgaacgggggctgtacacgttcgggatgcccgaccccgacctggtcattcgcacttcgggcgagatgcgcatctcgaacttcctgctgtggcagattgcctattccgaattcgtggtcaccgatgtgctgtggcccgacttcaaccgctacaccttcctagagtgtctgctcgagtatcaggggcggaaccgccgtttcgggggcgtggcctaaatgcgcggggggatttccgacgaagagaagagggatcgagcccgagcggcacgcgagcgattgcgccgaggcgaccatggccgtcgtgtgcgttcggaagagcgcggaagcgtgtcagctgcgcgtggggcggcggcttctgacgggatgagtgcgtcccctgacgaggtgagtgcgccctcggaggagcgcactcatttgctcgaccgactgcagcccgatgaggaacgcgacttgcctcccgtcgtctgcgatgcggaatcggcccccgaaggccctccctggcactacgacctctccgatgaggagcgcgccgcccgcgaggagaagcgcgagacgcgccaggagaagcgcgatcgcctgaagcagaaggcgctgaacaagacgccggacaagctgcgcaatccctccgatcttcaagtgcgtttccgtaccggggtaatttacacggcggcgacggtcatctgcgtgctggccggcaacatccccatggtgctcatgctgatggttgtcgctggcatctgcgccggcgagttcttctacatgctgcgctccgatgcgaagctgcccaacgagatgctcggcattattgcggccgtgctctatcccctaagtgtgtacattgccggtctggtgggcgcgatgctggtgagcttggctcttctgctggccctcttggtgtggtacgtgttctggctgcgggcccgcatccccgatgtgggggtgagcttcttcggcgctgcctacacgggccttctgctgtgcggactggtgattatccgtgtgtcgctgccggcgccgtggggcggcgcctgcgtgcttctgctgttcttgtcggtgtgggccaacgatgccttcgcctatttggtgggaagcaaaatcgggaggcacaagctggcaccgcgcacgagtccgaagaagagctgggaagggttcatcgcaggtctggtggggtcggtgatattttggtgcctcatgacgctggtgcccggcatcaccatggccattcctcaggctattgtcttcggcatcatttccggctgcatgggcgtgctgggcgatttggcggagagccgcatcaagcggaattccgggttcaaggactccggcaccatcatgcccggccacggcggcctgctcgatcggagcgactcgctgttcctcacctccatcacggcagctatccttctgatagccggcggttgcattccctatgctcttttctaggcgatccatttcggttcgctctttgcgtgtcctgtcatagtgaaaggggttctcatggccaaacggcgcattgcggtactcggctctacgggatccatcggtacccagaccctcgatgtcgtgcgtcagcacggcgataagctggagatcgtcggtcttgcggtgaacagctccttggatgttctgctcgctcaagcccgggaattcggcgtgcgccatctggcggtggggaatgccgctttggcgaacgacccccgttgcgatgaggcgcgggccctcgtgcggtcgctggccgttcccgagggccaggaggacgcggaggcgagcttcggcgtgggctccgaagccgtcgtggctctcacccaactgcccgaggtggatgtcgtcgtgaacgccctggtaggggcagctggcttggaggcgagctatacgacgctgaaggcgggcaaggtgctcgctttggccaacaaggagtcgcttgtggtgggtggcgacctcattatgccgctggcagcagcggtggatgcggatcgtcgggcctccggcgtagctccggcgacagggccggccggggcgctcatgcccatcgattcggagcacggggccatctaccaatgtctgctcggagagaatccgcgcgagatctcgaagctgtgggtgacggcttcgggcggcccgttccgaggcaagacgatcgccgacctggaggcggtcacgccagctcaggcactggcccatcccacctggaacatgggggcgaagatctccatcgattcctcgacgctgatgaataaggggctcgaagtcatcgaggcgcaccacttgttcgcgatgccctacgatcagatcgaggtggtagtgcagccccagagtgccatccattcgatggtggagtttaccgatgggtcggttctggctcatttgggcacgaccgatatgcgtattcccattcaatttgctctctcctatcccgagcggtgggaggctcccgtgagaccgctcgattttcggacgttgggctcgctggaatttgcggcgcccgatgtggatacgttccgctgtctttctctggctcgtcatgcaggtgaggtggggggcacgctgcccgccgtcatgaatgccgccaacgaagtggcggtggcggcatttctcgccgagcagatcggctacctcgatatcgcccgctgcgtcgaagcgaccatggacgcccacgaaggggcaggcgtccaagtcgtggagagcctcgagcagctgaaggccgtcgacgcatgggcccgcgccttcgcaagcgagtgggcccgggggcggcggagttagcggcgccgccccggaagcgttctcagcggcgcttgcggtaggcgacgaaggcagcgccggcgccggctacggcgagcagggcgaccaagcaaatcaccgtgaggctctcgtctcccgtttgagcgaggcgcgaggtttgggcgacgcgcgtcggctcgggctcgtcggcttcgggctcagtgggctcctccggctcgtcgccgccggtcggcggcagcggcaggtcgggataggcgtaggagacggtctgcccctcgtcctcgatgtcggcgtggagggccacctcgatgtcgtcgtgcagcagcgattcgaagaccacgaggctcacgccattcaagttggtgccgggaatggtgatctcgacatccaccgtgcccgaggattcctcggggatgaaccggtggcttaccatgaccactttatcctccacgagccacggggcgttttcctctttgtccatgagcacggcggatagctcgtactcctcgccgggggtcagtccctggtagctgacggtgtcgatgatggtgacctcttcggctggcacgccttcgtgagtgccggtggcggcgtcgacggccgttgtgccgatggcgatagggctcacggcgatggtctgcttgcggtcggcgagatcgcggtgcgaggctacttcgacgccatcttgcagaagcgtctcgaagacgacgaggttggtgtcctcggtgatcgccgaggcgtcgaaggcgaaggtcacgtttgcgtacccgttgtaatcctcgggagtgaactcaagctcggcggcgacttcttcctcattcacgaggaacggctctccggtggctttgtccatgagggttccccgaagcagatagggctctccgggctctaggccagaataagtgactcgatcgatgacgacggccttggtatcggcgctgatctgcgtgtcgtacagatcgtcggacagaccgtcgtaggcactcgtgcggatcgtgggcttgccggtgcccgtgttgttgagagtgcccaagtccatgacgagtccctcatcgctctcgtcaaccacgatttcatcgcggatcatctcgaagattgcgttggccgggcatcgaagctcttccagctcgtacgtgtcaaagggcagtgcgcccagtccgttgtccgcagcgacggacgccccttcggcattgagaccgaaccagatccccgctgtggcatcaagggcctcggtgtccaatgtaagcggcatctggaagctgccgtcaggagcggtgaactgcgcgtcgttggcgttcgtgttcgcgtcgtggggatggcccggggtagattccgtggaagcgaggccgttcttgtccgtgacgaggatgtgccattcgccggtcgtcttcgaggtgagcttgaaggggatgccggccagcttcgcggcgccgtcggcgcgcttcatgaagcgcagatcggtgcgggcaacgcggtcggtaacgagatcgccattctgctccgcatcgaaggtctcgataatctcgccatcggtgtcggcatcggtgacatggcgcacatgcacggtctcgtcgaggaggtagccgcgcggcgctttcacttcctggatggcataggtgccgatgggaagcgcgatgcggccgttggagagcttgtagaacgcatcgcctgccaccttgtagggaagctcctcggtcgttccgtcggccaaggtgtgtgtgaaactgctctctgcctggtcgagtaggaaggcaccttcatcgttggtgcgcacgacccagcttgcttgcggctcgagggtcttaagggcgtccagggaagcgttcttggccgcataataatcgatgcggaagtgggcatcgccgagggtggcggcaccctgcgcatggctctgaccgctttgagcatccttcttctggataagaagagagaggggattcagctttgccttgtcgctgacggcagtggtattcacgcgggtgacggaacgatcggcgacggtcacggcataggttcggctatccagagcatagccctccagagggcgcttggtctcgcgcacccaataggagccgatgggcatctcgtcgatgcgcccgtagccatcggcatcgccgttcagactcgtacggatttcgcggacgagctttgtgcaggccgagtccgcgtacacgccatagacggcgcccgccaaggtgtagccggggtgccccagcgtgacctcgggatagcccgactgcttgagcaagtcgatggagccgcgcatgggttcatcggcaaaggagacttggcacacgacgctctcgtcgctggttgcctccacggtcgccttctggacggcgctgttcaggcggaatccgggtggggcgaacagttcgcagaagtaatagtcgccgccctcgatgtcctcgacgaccgcgcttctgccgtccgccccggtgacgagggtaaacgaagcattggcctgggcccaggtgcgggccgcctgccagcttccccagacgcccttggcggcctgatcggccgctgcttcagcgctcgcacgggtggagaaggcaccgaacaccgcgttggcgagcgagtaattcccgttggcgttggagatggcggcgttggcggaggttttcacgacctgggcgcgcccggtgttgatgggctccacaagcagatagccgacaacgtcctggaactccttgttagtggcggcagatcgagcatcgattttgtagtagaacttgtaccacccgttgtacgcggattgcgagccggtgtaggtgcccttgtaagtgatgtagttgtcgccgttggggttgcttgccacggcgccatagccgttggaaacgccggcggtaccgcaggtggcttgggccatggcgcggttggtgggtgcgcttcccccgctgtagttggcgtccttgtagtcgttgcccgtggtgaggaagcgagcgcggtagtcgctgccggtgcgcgaggtggcgaagggcgcatcggcgccgttgcgggcggcgatcgtctcgtaaaggaacgcgtccacgacggcgtcgaagctgctcgatgcagtgttcagcacgtagtcgttgaagttcgttccctgggaaactccgttcacccagtgctgagaggtgccgaagaaagcaccgaacccataggagcctaccagatcgctggggaacccgtaggcctcctgtttgcggggcatgtcgacatcgaaggtttcgaggcgcatataggggttgagcgcgtagtgcttctcggcctgcccggggaaggcggctgcgaagggggcgatgccgccagcctcggcgaggatgtcgggaatgtccgaggcgatgatcgttgtctcttcgccgacggtgagctcctgcggactcgtgtcgaggtcggcgagcacaaagcgctcataggcgggatgtgcgggcgacagctcgaagacgatgccgagggtttccagggtgtccgcataggactcggggatgctcacggtgcccgcagcggcatcaagagagcactcatcggtaatgtcgcgctggcggtcgccgaaggtggcgtagtgctcgtacacggcgaagccgagcgcctcgttgaggctgagcgttccgccctcgtcgaccgtggcgacaatgtgcccttcttgcaggtcgtacggcgcggtgatgctggcgaagtcgatggtctcgcccgcagagtctttaaagtggaacatgacgggcaccccctcggtttccgtggcgactgccgaggtcgcgggggcacacatcgcggggatgaggcccacgagcagtaggaaggcaagaaccatgttgaaaagggcacggcctccttggaggggcgggcgcgcggggacgggatcgagtgaatccacggtgactcctctctgcgcggccacgtgtccgcgctgctcgattgacgaaagagagtcaggcgtggggcgcaatcgtgacgtccgtgtctcgaaggaatgcgggctggaaggtttggcgtacggctcccgatgcctgacgccgataaccttacgagagccgaaccgcagaaatgacgcgggaatgtcccagttcattccctcccccgaccgtgcgggagtcgtatttttatgcgacggaaaagcggtcggcgcgaggagacaaaagggacttcgacgggtcttcagcgggaaaagggcgggacttcgaggtgctcgattctcaagcggcggcagcaaaggcgcgtgcttcgcgctcgccgagacggcagtcaaggcggtgggcgagccgacagattcggcgcacgtccctccgaaaccatggagggatcgtagccagcttgtagttattttccgagacggctctccaagggaaagacaaagggtgcccgctttctataatgaccagcgacacccgttcctgccccgtgaggtaggaaatctctcatatataaggagacatctgtggacatcctcatcatgatcgtctgcgccgttatcagcatcggcttcctcgtgttcatccacgagggcggccactacctggccgctcgggccttcggcgtgcgcgttaccgagttcatgctgggcctgcccggcccttccattggcttcacgaagggcgagacccgctatggcgtcacggccgtgcccctcggcggctatgcgaaggtgtgcggcatggaggctggccctctgcagccgcacctgcaggaggtgctcgcgtcgctttaccgccgcggcaccgctaacatggaggacgtggcccgcgactgcggcatcagcgacgatgaagcatacaacgccctggaagagctggtggaatggggcagcgtcatcggtcccgccaaggccgatcagtacaacacctaccgcgctccgcgcgtcgcgcccaccaagcgcgctctgaagaaggcggccgcggcggggctgccggcgcccgtttcctacgagctgggccaagcccgagaagtggccgacccccatgctctttacgagtccgagtaccgccagcagtaccgctcgctgcccttctggaagcgctcggtcatccttttggcgggcattttcatgaacctgctgttcgccatgctcgtgttcattatcgtgttctcgatcatcggctttcaggtgcagcatcctgaaacgggcgagatcacgaccattcacgcatcggtgctgcaggcgctgcaggccggcttcatgtacatcggcatggtgattcaggcggtggcgggcctgttcaacccggccacggcggctcagacggtgtccgattccacctccatcgtcggtatcgccgtcatgtcgaaggactacttccaggcgggcctcgtggaggcgttggagttcatggccatgatctcggtctcgctgggcatcatgaacctgctgcctatcccgccgctggatggcggccgcttcgtggtggaaatcttccagaagggcacccgcaagacagtgtctcagaaggccatgaactatatgtcgcttgctggtatggccctgttcctcggcttcttcgtcatcatgctgaaccaggacatccagaggttcgtctttggcaactggggctaggggtttaaacctgtcggaccctcgctgacttccttgggcggattctggacttataattggtgaaagataacggttggaaaggaagtggtccgtgaccaaggaactgaagccccatgaccgcacgcggcgtgtgatggtgggggatgtgccggtgggcggaggcgcgccggtggcggtgcagtcgatgttgaacgccccggccgacgatgtggccgccaacctcgcgcaaattgaggcgctggccgaggccggctgcgagatcgtgcgcatggccattccgcgtcgggactgcctggacgccttcgaagccgtgtgcgccgcatcgcctttgcccgtggtggccgacatccacttcgatgctcgcatcgccattgaggcggcggctcgcggcgcggccaagctgcgcatcaaccccggcaacatcggcggtctggaggcgacgcgcgaggtgatcgctgcggcggctgcggcgggcattcccatccgcattggggtgaacgccggatcgctcgacgacgcgctggcggcccgcgacgacctgacgctgcccgagaagctggccgcctccgccaccgagtacgtgcgcttcttcgaaggcgaatgcgaatttcacgacatcgtcgtgtcggcgaaggcccacgacgtgcagactaccatcgacacgtaccgcctgctggccgccgaactgccccaggtgccgctgcacatcggcgtcaccgaggcgggcacggctttccagggcatcataaaaagtgccagtggcctgggcgttcttctggaagagggcatcggcgacactatgcgcatctcgctcacggacgatccggtggtggaggtgcgggcgtgctggacgctgctcggcgcgctcgatttgcgccgtcgcagccccgagctcatcagctgccccacttgcgggcgctgccaggtgaacctcatcgggctggcacaggaagtggagtcgcgtctggcctgtgtggataagccggtgaaggtggcggtcatggggtgtgtggtaaacgggccgggggaagccgccgatgccgatatcggggtggcttgcggagcgggcgcgggcgttgttttctcccatggtaaaatcgtccgcaaagtgcaagagtcggaaattgtttctgcccttatggaggagttggagaacctatgacccagattctgcgtatgagcaacctgtacgcccccaccttgaaggaagacccgtcggacgccgacatcgatagcgcgcgcctgcttctgcgcgcgggcatgctgcgcaaggccgcctcgggcctgtacacgttccttcccctgggcttccgcgtgttgaagaagatcgagaacatcgtgcgcgaggaaatggatgcttcgggtgcccaggagattctcatgccggtgctgcagccggcggagctgtgggaggaaagcggccgcctgaacgactacggcccagagctcatgcgccttaccgaccgtcacgaccgcgagatgtgcctcggtcccacccacgaggagatcatcgtggcgctcgtgcgcaacgagctgcgctcctacaaggaactgcctcagaacctctaccaaattcagacgaagtaccgtgatgagattcgcccgcgcttcggtcttttgcgctcccgcgagttcgtcatgaaggacgcctacagtttcaacgccacccaggagtcgctgcaggaaacctacgacgccatggggaaggcctacggcgccatctgcacccgctgcggcttggattaccgcgaggtggaggccgatggcggccagatcggcggcaaggtcacgaccgaattcatggcgctggcggaatcgggtgaggccgatctcgtgtactgctcgtgcggttacgcggccgatgccgaggccggcgcgtgtctggcccgccccacgctctacgaggtgggcgccatggagaagatcgccacccctggcgtgcataccatcgccgagctggcggaatttttgagcatccccgagtcgtccacggtgaaggcgctctcgggcaaggacgccgagggcaacctcgtgtgcctgttcattccgggcgatcacgagctgaacgagctgaagatcgagggccttgtgcccggcttcacgctgttgaccgacgaggagatgatctccttcggcctgtgcaagggctccatgggcccggtggggctgccggagggcgcccgcgtcatcgccgctaccagcttgcaggccatcccgcagtgggtggtgggtgccaacgaggatggctaccactacgtgggcgcgcgcctgggcgaggatttccaggtggacgagtgggccgatctggctacggtgaagcccggcgactgctgccccgagtgcgggcttccgctggaaggagcccgcggcatcgaggtggcccagatcttccagctcggcgacaagtactcccgcgccatgggcgctaccttcatggacgaggacggcgaggagaagcccttcatcatgggctgctacggcgtgggcatctcgcgcacgctggccgccatcgtggagcagcacaacgacgagcacggcatcatgtggccgctgtcggtggcgccggcccacatttgcgtggtgccgctcacggtgggtgatgccgaggtgcagcctatggccgagaagatcgcgaaggacttggccgagctcggcttcgaggtggtcatcgacgatcgcgatgagcgcgctggcgtgaagttcaacgacgccgacctcatcggctggcccgtgcagatcgtcgtgggcaagcgcggcctgaaagagggcaaggtggaaatgaagctgcgccgcaccggcgagaagaaagaggtggcgctggacgctctggccgagatgatgggctttgctcgtcgtgccatgcgcgacaacgttctccacggtgccggcactggagctttcgccgccattttcgggtagggcgacggactctccaatcgacgaaggaccctggatcgcatctcgcgttccagggtctttttcgtattcgcgccgaatggacgcgagccgcgccgaatggacgcgagccgcgccgaatggacgcgagccgcgccgaatggacgcgagccgcgc

SEQ ID NO: 10581 - DNA, 14355 bp, Unknown
  gut microbiota DNA sequence
tcaaagtgctcaatgtcccatgagcactttgagctatcattttggttagcaaaacaccagttcacagcccctgccaaaaacttttgacaggggtttttcgttgcgggagcggcgtgtcaaaaccttttggtggtacgcttcggtgcgctatgtcacgctgagcgggaaaggatggagtcgtggagatcaaggagcagctgaaggaacatcgggcgcggctgggcctgtcgcaggaggaactggcggatcgcatcttcgtgtcgcgtcagactatctccaactgggagaccgaccgtacctatcccgatgtgcagagcttgcttctcatgagcgatcttttcggcacgtccatcgacgaactcgtgaaaggagacgtggcaactatggaaaagacgatcgagaacgagtggaagaccatgagtcgtctggcaatgacggcatgggtgctcgtaggtgtgggcattgcgtgcgtcattgcaggcatggcgcttccttccggcccctcctcgctggcatctggcttttccgagggcgaagtgctgggcattgtgctgttcgtcgctttgtggattgccggtctcgtgcttatgggcatcgtggagcacatgaagagaaagtacgacttggtaacctaccgcgacattcttgcctattcccgcggcgaggagcccccgcgcgacggtgcggccttcgcgcggcgccatccggtgatgatgggttgggccaagggcatcgtgagcgcgatcgccggttttgttgtggcggtggtgctctgccgtattttcctggggtaggaatgtgagtcggattgcatattttggcttggaatcaacgtttttacgattgaagtggcgaccacaacgccgtgccgctattcacgacctggggaaataatttttctgaggcactcgcaaggcctaaatggggctatttgatcggaaaaccgtgaattccaagccatttgaagcaaacggaagtggaatttgagcaaagcagaagcggaattccaaatgtgagcgtgtcaatcaacttttgacggggcagtaacagtgctgccccgtcgtcgtattcgggtcgcgacgccgcctatgatggagaggctaacttaacgagaacggaggcttcgaaatgacgacgattgccgatggattgaaagatgtgttcctagccggtgtgggcgccatggccctcggcgcggagaagactcaagaactggtggaacagctgatcgccaagggcgagatcaccgtggagcaaggtaaggccatcaactccgaggtgctgaagcaggctcaggctacggccgagcgcgtgggacgcgacgcgcagacggcagctggcgaggcggctcatcgggcgaaggctgccgccagccacctgaacgaccaggccaagacagctgcggagctggctcacgagcaggccgaggccgccgtgtccatggcccattcccaggccgagatggctgccgatgcggccaagaaggcggcgggggaggccaagaaggattccgccgatttcgctacggccctgaagcacgacgtgctggaggctcaaatggccatgatgacccccgagcagcgcgccgagttcgccaagaaggccaccgaaatcgccgcccgcgacgccaaggcggagtagcggattgcgcggatgaattttactcaagtggattttagtaaagtccacttgagtaactgacgagcgaagaattccaaagtattcgcgggctgggctgccgcttgggcggtggcccagcgttgttttggcgtgattggcggtgcggatgctggtggagccgcagccccgtggtaaacttctcgattaccattgaactaccacgacgaaagcgattccatggctgatttcattgaaggcaagcgtccggttatcgaggcgctgcgcacccacgtgccgctgaagtgcatcctcatggccgacaacctgagccagggcgacagcctggtgcgcgacatccagcgcaaggcgaagaacctggacgtgtctattaagaaggtgtcgaagaagaagctcgacgagatttccgagcgcggtagccaccagggcgtcatggccgagacggctccattcaactacgtgaacgtgacgacgattctggacgtggcgaagcagtcggccgaggagcacgacggccgcgcgctcattgtggtgctcgaccacatcaccgacgccggtaacttgggggccatcgcccgttcggccgagtgcgtgggcgcttccggcatcgtcattcccaacaagcgcgccgcccgcgtgaccgccgccacctacaaaagctcggccggggctatttctcacattcccgtcacccaggtggcgaacctcgtgagcaccatcgagcgtctgaaggacgagggcttctgggtggccgccgccaccgagcatgcctccgacctcatttggcagtcgaacctcaagggcaagatcgcgctcgtgatgggcaacgagggcgaaggcgtgtcgcgccttgtgctggagaactgcgatttcggcgtgaagctgccccaggtgggagagatttcctcactgaatgtggcccaggcctccaccgcctgcatgtacgagtggctgcgccagaactgggaatagcgcgcaggtcgcatcatggccaagcaacgcaagaggctcctcatcgttgacgggtacaacgtgctgcggtcgggcagtcgctaccggtggcagccgcgggccgatgaggactacaccgacgatttcttcaacactgctcgcgagcggctcatcaacgacgtggcgaactacgccgggcgcgacatgggcgccatcatcgtcttcgacgccgccgacaacgagctctcggaaggctcgcgcacgaagatcggcggcgtccaggtgatcttctcgccggcggggcagtcggccgacaaggtgatcgagaagctggcctacgacgcgggcaagcgcggggtggagaccatggtggtcacgagcgacgcggccattcaggacacggtgttcggcggcggcgtcgatcgcatgagcgccgacggcttctcccacgagatgggcgagtactacgaagatgcgcgtttggatgacaccccgaaggtggcgcgcaagaacaccgtcgccgagcgcatccccgctgacaccctggcgcgcctgaaggcactgcgggacggccgctagcgagcgcgaatgctgccgtgcgtgtggtgaccgctggggtattttcccagttcagcgcttccgcaaccaataattgcggaaaatgacaacgcgaattggttccgtggcaaagaggttttcggtaggctccaaggcgtttttgagaggcaatcgcagaagaaaggcagcacaccatgaatgtcgaaatcgccgagcgcttggccgcgcgccgaaagcttgcagggctgtcgcaggaggccctcgcggagaagttgggcgtgtcgcgccaggctgtttccaaatgggagcgctcagagtcgtcgcctgacaccgacaacctcattgccctggcgaagctctacggggtgtcgctggacgagcttctgtacgtggacgagtccatcgaggatgatgtggcctttgaggccgccgaccgcgcggaagtgcgtggcgcgagcagggttgtcgtcgcggaagcttcggaagagacggcttcgccagagggcggtggcgttggcgatgcatgtgatgccgagacagccgagggcgttgacttcgaaaaggagggccgcggcaaggtgcacttcgggcccggtggcattcacgtggacgacggcaaggaccatgtgcacgtgtcctgggccgagggcgtgcacgtggtcgaccgccacggcgaggaggtgcacgtcggttgggacggcgtgcgcgtcaacacgacggatcctgaggcggcagagcatatcttcacgcgtgacaatcccttcggggtatcacccggtgacttcgatgcagacagggctaagaagtggctgaagttccccttctgggccttggtgattgtgggctacctcgccttcgggatgctcagcggcatttgggggccgacgctctttttgctgttcctcattccgacctattacattgtgggcgcggcagtcgcatctcgccgcatcgctcccatgctgtgcgcgctgtatcctattggtgcgatcgcctggttcctttggatgaccttcgtcgatgttcattggcatggccccgcttgggtcatcttcctcaccatcccgctcgtggaggtcatcatcgtccagctctccaaatggtggaacgcccgcaagggcaacgatttcaagggcgacgtcgcctaggtgtctttgcaagcgcctgccgcgaagggagcgggaagcccgagcgctgctgtcacaagggcgagttgggcttgattccttggaaaaggcgcaaattacctgctcgtaggtggggcaactggtggttgtcggggatttttcgctcgtttctggtaaattgaccacataaggtgctggtgcaaccagggttgaaaccatagagtgaaaggcgagatgtgacgaacaagacgcgaaagggaaccgtgatgaacgtcgaaatcgcccaacgccttgccgagctgcgccgcgagcgcggcttctcccaagaggggctggccgagcagctggggctgtcgcgccaggccgtctccaagtgggagcgggccgagtcggcacccgatatgggcaacctcattgccctggccgacttgtacgaagtgaccttagatgagcttttgcgcgtgagccccgaggtggaagaggacatgcgcttcgaatcccaggagcgtgcggaatccgtcgagaccgaagccgctgctgcggcggaggcggctttggcagcggcggcgcgggccgaggcggcggctgcgacagcagctgaggcgcccgacgtgccgaaagtggtcgtggaagtgagcgcgcccgctgcgacgtcgggaggcttcccgccgcctgctccgtcccctggacaggccggtgcttccggccgaggggcgccgcacgggttctcgccttccacatacggagcgccgggccatcggccaccgagtgcgggctatggccccggcgcgccttcgtacggttcgccggcatcgccgcagagcccgggtgcctacccttctggctcctgcccaccgggttccattccgccggcatcctcggtgcccattgcgccgccaccgacgccccaatcgaaagatccgctgcagtcgtttccctacccgcttctgtgcgcggtcatcttcctacttgctggcttctgcttcggctggtggcatcccggctgggtgatcttcctcaccattcccttctactattgggtggtgaacgccttggaggctgatccggcttatcagacgtggttggccgaacgccagaacgtcgcggcgaaaagtgattcctcctcagaaggaggcgcccaatgaaactggaacggagcacctatgtgaagatcgcgctcatcgtgctgctttgcctgggggtgtgtgggttcttcggcggctgtcgcggcatcgttccctggggcggctcgctgcttgcgcccggtggcttgatgggctgtgtgggctggaacgccatgggcgagatcgccggatatgcgggagatgcggtcggcgagatggccggatatgcgggtgatgccgcgagcgaggtggcggatgcgacgctgcacagcggtgtgcgcggcggcgttgcatcgacttccgagggcagtcatttcgaaatcgacgccagcgaggtaaacgccatcgatctgaactggctcgccgggtcgggctccgtgcgcgtggtgcccgatagcgagaccgacggcaaaattgtcgtgaacgaaacgatgcacggcggtccgcaacccgttatggcctgcagcacgaacgacggcgtgctttctgtcaactatatggaaggcgacggaggcctatcgggatgctcgctcggcacatggggcagcaaagacgtggaggtgcttatccccgaatcggcggcgtctcttgagcgcttcgttcttgaggcagcctcgggcgagtacggtatcgacggggccgacgccatgctgtgcgagaaaatggaactcgatgtcgcctcgggttccgtctcagtgagccagatgtcggtgaccgacctcgagctgagcctcacaagtggcaatgtcgcttacgaaggctctgtcgccaagacgctgcacatcgatcaggcttcaggggagttccacttcggcccgtgcttgtcggctccggagaccatctctggatcgcttgcctccggacacatcgttttggagcttccagccaataccgcgctgacggcgcaggtggataaaacctctgggaacttcacgaacgacttcgccgattccgctggagatccgtcgcactcctgcgagctctccttcgacatcataagcggcaatctggaagtgctcagcgctgagtaaagagcattcaatcgcagagctttcaatagaaaaggggcgaccgcgtggtcgcccctgctgcgagggaattgtgagtcccttctgtcgacatgcttgacgtgtaaggcgtctcggcggcttagcgctggccgaacaggtcgtccaagttcagaccgttgccgtagccatcgccgtacccgtacccgttgccgccgtcctggccgtaaccgtcgccatagccccagccgtaaccgtagtcgttaccatcgccgtagccccagccaaagtcctgaccctgctcgggcatctgctgctcctgctgggccttctgctcggcagccgctttctggctggcggcatcgtcgcccagagtcacggaaatctcctgctcctggccgctgcgattcacggtgagctgcacggtgtcgccaggattcttgccgcgcacggccagcatgaggtcggaagcgccttccacagactcgccgtccagagccgtgatgatgtcgccctcctggaggccggccgcctcggcgccggagccctgggagacggcggccacgtaggcgccggactcagcggcgaggccgtagctggcagccgcctggtcgttcacggtggacaggctcacgccgagctgggcgtgggtcggggtctcgccggcgatgatctgctgagcgaggttcactgcgtagttcaccggaatggcgaacccgacgccggaatagttgccagagtacgaggtgatcagcgtgttgatgccgatgagcttgccctcgtcatccaccagcgcgccgccggagttgcccgggttgatggccgcatcggtctggatcatgttcgggtagatagtggtctcgccgctgccgccggactgcatcgactcgctcgcgtccatgatctgcgagcggctcgtggcggacacgatgcccgtggccaccgactgctcgagcccgaagggggcgcccagggtcatgacccactcgccgacggtcaggttgtccgaatcgccgatctccatgggggtgaggccgctggcatccttggccttcaacaccgccacgtcggaggagggatcggtacccaccagctcggcgtcgtaggtgttgccggcgatggtcaccttataggcgctaccgccgtcgaccacgtggttgttggtgatgaggtagccgtcctcggtcatcacgacgcccgagccggtacccagcccctggagctggccgcccgcatcggcgtaggtctccacgtataccaccgacggcagacacttggcggctacggcctcagccagggtcgcgtcatcgttggtgttgatgacagtctgggtagcggaagggctgcccgtggcctcggcggtggcagggtcgatgatggcgccctgcacgccgaacgcgagcatgcaggcgagcgcggcgccggcgaatccggtgaggaaggagcggcggccgaacttcggcttggcggtggcggtgttctcgacgctggcggccacggagccgtcgatgtcgaactcgtaggtctggctcgcggcggagtcgacggcgttgtcgcggaacgaatgcttgccgaaggggttcggagtggtgttcaagttggtcattggtgatctccttctgaaagggggtcggtcatgtgctggagtgcacactatcacgccccagcacgtcccaatgacctcggcaacccccaatcacgaccggcccacgcagatacaccaacgggagtagtccctgcggattatagggagctctactcctcttccagtgtgatgcggtcgatgcgggcggccaggtcgtggccacgctggtagaactggaggttctggttgtgggcgaagtagcggtcgcagccgtggtcgttgatgaaggccatgccggcgcggctcacggacaagtcggtcaccagcatgagcatctcctggccctcgccgaaggcctcttccacgaacttgaacacgttgtccaaggcgtctgccgccgtatcgatggccgcatccagctcgtcgagtcgctcgttgaagcgctcgcgcagcaggttgaacgtggcgccctcgggtgtatcggctcccgtgcgcagcacctcgtcaagaaggccgatgatccgctcgaaggagcggtagcgctcgtcggaaagcaggctcgcagcccgttcggtgtcgcgggtacgtgccagctcggtggtcgtggcgcgaatgagcgcgctcgcatcggcgtcttcggccacgccttcggcggccaggcgctccttcaaatcggccaacacgctatgaccgaacgccgctgctttctcttccataaccgcctcgcgcaagcagctcaccgtggcgtccacgataagccccatgacggccacgcgctcgtcgaagggcgccgccgcggcccgctcggccaggccggcatcggcgctgccatccaagatacgatcgatctgatagtcgctgcggtacttcgtgaacaggtcgtaatacatggcgaaccgctttgcgatctcgccgttctgcacgtactgctccacgagcagctcatcaacggtgagcccctgggcctcgtagagcttgatcatcgctgacagatcgtcccagccgcgggccgtcacgaacgacgcgccgtcgggggtggcttccacggcgtagaagtgggagcgctcgatgtccaggtaggtgatgaccgccggatgcacttcggccgacacagcgaactcgcgccacacgtcgtagtcgggctcaacctcgatgcgcttcaggcgatcccacgtggcgatgtcgaagtcgtgggccgtgcggttgtactcgggcgggttgccggccgtcacgacgatccagccgtcgggcacggcatggcggccgaagatcttgtattgcagaaactgcagcatggccggcgtgagcgtctccgatacgcagttgatctcgtcgaggaacagaatgccctcgcggcgccccgtggcctccatcgcctcatagaccgaggcgatgatctcgctcatggtgtattcggacacctggtattccacgccgtcataggttttcgtcgcgatgaacggcaggcccagcgcgctttggcgggtatggtgggtcatggagtaggacacgaatcccacttccagttcttgggcgatttgctccatgatggccgtcttgccgatgcccggcgcgcccagcaggaacaccggacgttggcgctcgggcggcagaagatagttgccgaactcgtctttagtgaaataggcgatcatggcgtttttgatctgctgttttgcttcgcggatgttcataggggctcctcttctagcacgaaggtttcatccaggatcactttcatggcccagggcggcacgggggccgaggctgcggcatcgtcggaatcgaggaacacaaaggcggtttcgtaggcggggcggcgcgcggggtaggtgccctgaccgtcggtgaagtagatgaggccgcccaaatcgttcagctcgccggtggccagcgcttcgtccacgtaggtgaacacggggcggaagtcggtgccgcccaggcccttgatggtggggttttccagatagtcttccaaatcgcgtaggcaggtgatgcgggccacgtcggtaatggcggcatcgcactgcacaatgaggacgttcatgcgcgagaagaagctcgtctcgtcagccagaatagaataggtgcgctcgatgaacttgcgcaccaggccgtctttcgtggaggccgaggtgtcgatggcgataacgaagtcgcggatgcgcttctcttcggcaaattccactggctccacgaggggcaggttgccgtacagctcgagcccgtaggtgtagaacacgtaatcgaactcgtcgtcgtttacgcggatctgctcgcccatgcgggcgaacttgcgcaggaaggcccggtaatcgtgcttttcgcgggtaactttgcgcaggttcatggcgaggttcgatccctcgatgccccacagcttagcgtaggcgtccagctggatgcccatctccagcgccgcgttttcccactgctcgcgggagcggtcgagctgcacggtgtcggcgaagcgctcgccaatggcgcgggcggcgttctcgggcgcgtccttctgggtgatgtcggcggcgtccatcgctcggtgcgccttgtgggaatagggaacgtcggcagcctcatcggggatgtccatgtcggtgcctgaggtgtcggccttggcggcgggagcgctcgtgcggccctcgccttcggttgcctcgcccgtcttgcccgacgcttcttctccttcgacaatgacgacggcatgccaggggcgatggtcgtccacgtggaagcgagcgccgaggcgggcgagctcgtcgtcagttgcgccggcggcgcgtcgatcgcgcagggcagcgtagacgcgctcggcagtcatgaggccggcctcttcggccatgcgctccagctcgggacgcgaggctgccgcttgggccgtgcgcgtggcgggaagatcgagctggtcgatcaccgattccaccaccatgtcgcaggcgatgtcccatagaaggggatcgatgccagctccggggtaaaggtgcagaaacacgttgtgaagcaccgtgtgcaggtaggcgcgagaagcttcggccgggtcgttggcgtaggtgcgcgcccaggtgacggggtcgaaccgcaaatgcgcgccatcggtggcgagcgtagcgccggggatgggcaggggcgcgagtcgggcaaaggctgcgctcatgaagcgcaggtttaccaaaagcccgttgcgcaccaggtcgagagcatcgagggccagcgcctccacctcgtttttgcgcacggcccctcctttcgcggttcgagtgacaaacatttcctcatttttggtcacaaaatcgacttttgaactctgatcgagggaaagagaagattgattctaatgcaattcgataaaatcaacgccgcaaagcgaccagcggcctcttccgtgagcgacaattcgccgcgaaggagttcaaaactcgactttgtgaccaaaaaacaagattcttttgtcattgtgcctctatgggtcgtagtgtagcatgggctttacgcagggtaaacggccttcaggtgccaaaattgggaaggtgcacaaaatcatgagcggcaacacagtggtctttcgcgatgcaacttcttctcttgacgatcttattgcgcgggcgcaagaaaacccggtgcatttgatgctggccgacgtgacgattgaggagccggggcaccccatcgagggggagaactggcggccccagctggctccctacaagccctgggtgcacgatgcggccctcgatgaaaccgaggagcttgatggcaccgacggcgacctgctcatcgtgggcgcgctcggcatgggtatctctgatgaggagcgcatgggcattattggcagtgctgtgcgcggggaaggcggggagggatcgaccgcgagcatggtcgggcggtctgtcgaaggagctgccgaaggggctgttggcggcggggccgcaacggcggtggcccccgcgcgcaagctttcacctcacgagttgtggacgctggggcagacgccgcgctggcaggcggaagagccggcgcggggaaatgcagacgaggctcgcgactgtgaaacagtgaaaaaccgtgaaacactctcaagcacccgtgaaacatcaatgtatggccgtgaaacatcccggaacgaagaggcgtactttgccaccaatgttcccataacggtgcgtcgcgatggcgagggctatgccgtctctgctgttcacttgggaaaacttgccgagcacgaccttcgggccgacagcctgattgtcgtggtgccatcgtttatcgacgatgtgccggtggtgcgcatcgcttcggaggctttcgcgcgccgcttcacgagcggtgcccaggtgcgccttttagtggtgcccgatacggttgaagtggtggggtcgcaggccttcagctcggtgagcgctgatgtggtgtatctgggcgctggcgtgcgcacctacgatcccgcgcctttagatatggcgctgcccaatccgcgactggaggcgcgcagctatgcggtcagctctgccaatgagcgcttcgccgtgaaggacgggtgcctcatcgagcgcataggtgcgggcggtagcgagggtggagtctttggcttgccggcatcttcaccgaggcacgatgcggattcttggcggctcgttttcgcgcaagtgccctacgaagagcgctttgaggttcctgcgggcgtgcgcgtcgtgggtgccgccgctttcgccaaagggtgccctgcgccgcgcgtcatcgatgcgcccgattctcttgagcgagtggatggctcggtggcgcccgagacgctttggcgtgccggcgatccgatggcgctcgcccgcatcgtcgcccgctgcggaggccgcgtcaccgattttcaggctgtggaagagaaccagtgctggtacggcttcgcagggggggatgtcgtcgcaggggagggcggcgttgcgaaggaagtcggcactgcgcgggaagtcggcgctgcggcaggaggcggcatgcgcacggcccatttggtggcgggtccgccggcccccgactcgccctcgcgccagttctcctcggcggctcatgcccgcatgaggggggccacggctgtctcggctcgcgaggccgcggcgagtgcggcgagcgcgatggcggcgccggtgtccgctgctgatcggctggccctgccgcgggaagtgggcggcgcgcccctcgcgtacgttgccgagcgcgcgctcatcactgccccggccacccttgtcattcccgatacggtgcgcgaggtgcgcgacggcaacgcctgcaagggcacgcgcaagctgatgctgcccgagggcttgcgcaccatcggggcccactgcttctgctcgcgcacgttggtcagccctgtgctcatccccgcgagcgtcaccagcatcggcgagggcagcttcgaatacgccatcgtgcgcctggctgcggccgatgcggtggtgcatatcacttccgaccagctcataagctgtttcttggaagacgccgaggatggcattcccttcgatttcgctcgttacgacgaccaattgctggtggggcgcggcctgcccgatcacctcggagctctgctccatcgcgtggcggcgcccttccgcttggtgcccgagatgcgcgaccgcattgtggaagccctgcgtgagcgcgccgccgaggccgtgcagtatgtggcgcgcgagggggatattgccatggtgcgcgctctggccgatgcggggttcttgaacgacgctgagctgttcgatcgccaaatcgagcgcttacgtgccagcaatcgcaccgactgcgtgctgttcctcatgaactggcagcacgaccgccaagaagccgcccgcgccgccactcccaagcgcgcccgcgaccgcttcgcgctgtaggatcagtcgactggatccgcggtctgcgttctgctctcgaacaggtcgaggagttcttggcgcgtaccgacggcgcatttgcgatagatgtgcttgtctaggacgatgccaacgagagctaccgctgagatgaggccctgtcttaccctgaatgaaagcagagtcgtcgcgctttcctgttgggcgctgctccccctaaagcctctgcgagcaatgccgctgtaggtgggggctggcagggtggttgatgcgacagcgtcttttgtcggacttggcaaaagatgcaaaagatgcaaaaattgcaaaagatgcaaaagttgcaaaagatgtcaaggagtgatgatggcgagcaatccctttacccctaccttcggagttgtgcctgcgtttatggcgggtcgcgaggacatcaccagtgagttgcttgcagctctggaggaaggtgtgggcaaccctaacctcacaacgatcatctctggtgca

SEQ ID NO: 10582 - DNA, 1344 bp, Unknown
  gut microbiota DNA sequence
aagagagtgagttacacgggcgcgccttgccgccggtggcggccgaggtggtccgggacggcttgacgagcgcggccgccgaaaagctatggctcgcctttcgatcgcttgcgaacgtgcggccgtcctggcccgcgcctgcggaattcctcgctgcccaggacgagctgctgcaggggctcattgccgaggcgggcatcgcaacgctcgccgacacgacggcctccccggttgatccgcgcctgcgcttgtggcgcggcgacatcaccaccctggccgtggacgccatcgtgaacgccgccaactccggcatgaccggctgctgggcgcccttgcactactgcatcgacaacgccatccacaccttcgccggcgtccagctacgcgccgcttgtgcaaaggccatggcggctcagggacacccggagcccacggcccaggccaaggtgaccgacggctacaatctgcccgcgcgccgcgtcatccacaccgtcgggcccatcgccgacgggcgccccaccgatacgcaccgccgccagctggccgagtgctaccgggcctgtctggatgcggcggccgcggcggggctttccagcatcgcattctgctgcatctccaccggcgtgttcggcttcccgcaaaaagaagcggcctccatcgccgtcgcctcggtgcgccgctggcttaacgagcatcccgacataccgatgacggtggtgttcaacgtcttctccgaaaccgacgagtcgctctaccgtcccctgctcggcctctagctgctgagcgccgctcaaatgcggccaacgcgactttgaccgtcgttttcggcgtttcgataagagaaaattctcacctggatcgtgtctcgcttcctcccttccctcaagcgcgctgaaaccgagggctttgccggcttctgaggggctcgacaaggatgcggcgacgctatactgtcttcgataagaatgcgcgcaagaagggagcggcgatgttggaggtgcgcaaggcgcgggcggacgagatcgatgccgtgctggatttctacgcgaagatgatcgacggcatgcagggcaccgatttcgatgtgcagtggcgccacgacggccatccctcgaaggacttcctgcgagaggcggtggcggacggccagatgatcgtgggcgtgttggaaggggagggcatcgcgagcgccatggtggtgaaccacgagggggagcccggctacgaggcggtgccgtggagcgtggacgcgccgcccgagaacgtgggcgtgctgcatgtggtggccacgctgccggcctaccacggccgcggcttcgcgcgccagcttctgcagggcggcat

SEQ ID NO: 10583 - DNA, 1300 bp, Unknown
  gut microbiota DNA sequence
gggcaacgggccgcaaaggaacccgagaaccgcaaggggatgcaaacgcccacgaacaaaaggcccggccgacggggagggagcgtcggccgggcacgggagggtgagacggcgggcggcctacaggctcgccaccaagcggccggtgtagtagcccgaggtgatggcgcggccgatggagagcccctcgatgtccatggggtaatccacgccgccgaagaactggcccgaggcgttgcccacggcgtacaggccgctgatgggctcgaactccccgttcaggcactggtggttgctatcgaccacgaggcctcccagaatggccggcagcttgttggagccgcgggggatggcgtaataggggccgccctcgatgggcacgaggtacttggcagccttgccgaagtcctcgtcgcggccggcggcgcacagctcgttgtagcgggccacggtgtcggccagggcggcggcatcgatgttcgtgagcttccaatcgttctccgcggcgtaggcgttcatggcctcggccaggccctcaatcgtatcggcggtaatccacttctcggggttcaccttgttgtcgccgctgtaccgggagatgtcgtaggggctggcggccttccactcctcgtagtagctctcccagttcgcgggcaccaggctgaagaacttcgccgccgtggagtcggcgaagccggccttcgccaggtacgggcgggcgaagttgttcatgtagcccatgcggcagcaggtctcgtccatgaagcggttgccctcctggtcgacgaagaggaagggcatctccaggcgcacggccgccggctcgccgtggatcatcttggtgtgggtgtgcggcgtcatgatggccccgacgttcatgccggccacaagcgcgctgccgtcgcggaagtcggtgaacaacgagaagcccttggtgtccggcgcgtagtagtcgagcatctcctggttggaggagtagtcgccgcaggccagaatgacgcccttggtcgccgtgaacaggtggtgcgccccgtcggcgtcctcgcagatggcgcccgtgaccgcgccggactcgtcagtggccagctgcttgcagggcatgttgtagaagaactcggcgccggtggcggccaggttctcggcgatcaccgtggcggcggcgttgtggttgccctccacgtggaagtaggtgttggcgtgcaggtggatgtcgtagccgttgtaggagagcacggcgtcatggggcttgctttccacgccgcccttcgccgcctcctcggcccaccaggccagggcctcc

SEQ ID NO: 10584 - DNA, 2030 bp, Unknown
  gut microbiota DNA sequence
cttcttcagcttgtcctccatgaacgaggtgtcaccctcgggcagcacgttgcggatagaggtgatgccgttggcgagcttggcggcatagcggttgatggccggcaggtaatcgcgacgcaccaggcgcttcatggcgcgaatctcgatgttcatgatcttgttgtacttctccagcttcacctcgtagcgggagcggacctcgtcctcggtgagcacgccgaactcggcgaacaagtcgatggacttctggtcgaccaggcacggcagcgcgtcggccgtggtgcgatggttcgccagcccgcggcgctcggcctccttctcccattcctcggaatagccgtcgccgttgaagatgatgcgctcgtggtcgcgcagggtgcgcttgatgtagtcgatggcggccgcctcgaactcctcgccggtcttgccttccatctgatcggcgaattccttcagcgacttggccatggccgtgttcagcaccatgttcacgtccgacaggttctgggcgctgccgggcatgcggaactcgaacttgttgcccgtgaaggcaaaggggctcgtgcggttgcggtcggtgttgtccttgatgaagttcggcagcacgtccacgccaaggtccatggatacgcgctcggccgaggtgtagtcgtgatcgtcgatgagcgcctccacaatcgcgcccagctcgtcgccgaggaacatggacacgatggccgggggcgcctcgttggcgccgagacggtggtcgttgccggcgctcgccgccgacatgcgcagaagctcctgatactcgtcgaccgcctcaataacgccggtgaggaacacgaggaagcgcaggttctccatggggttctcgcccggatcgagcaggttgcggccgccggcggagatggaccagttgttgtgcttgcccgacccgttgatgctctcgaagggcttctcgtgctgcaggcacaccaggccgtagtggctggccagaagcttcatcttctccatggtgagcaggttctcgtccaccgcgcggttcgtctcggcgaagatgggcgccagctcgtgctgggccggggccacctcgttgtgcttggtcttcgcggaaatgccgagcgcccacagctcgtcgtcgagctccttcatgaactcgttcaccgtggggcgaatggcgccgaagtagtgctcctccagctcttggccctttaccggcggatagccgaacagcgtgcggcccgtgagcatgatgtcgaggcgcttctcgtagtccttctcggagatgagaaagtactcctgctcggcgccgagggtcgtggtcacgcgatcggacgagtcgtcgccgaacaggtcgagcacgcggcggccctgggtctcgatggctttcatggagcgcagaagcggcgtcttcttgtcgagcgcctcgccggtgtagctgcagaaagccgtggggatgcagagcacctcgtccttgatgaaggcgtaggaggtgggatcccaggcggtgtagccgcgggcctcgaaggtggcgcgcaggccgccggaggggaagctggaggcatcgggctcgccctggatgagttccttgccggagaaggtcatgatggcgcagccgtcatcggtgggatcgatgaagctgtcgtgcttctcggaagtgatgcccgtcagcggttggaaccagtgggtgtagtgggtggcgcccttctcgatggcccactctttcatggcgtgggcgacgacgttggccacgtcctcgttcagaggcgcgccttccttgatagttttcatcagctgcttgtaggtggtcttcggcagacgctcgcgcatcacatgctcgttgaacaccatggagccgtacagatcggtcactttcgacataacgggttcgctcctcactcgggtcgatgatcggaataagataccacgtcggagccaccgcaacggctgcacccggcacgttccaagttaatggctcattgtttcgaggagttttctggtaagcgaaaccgaagttacgaaaacggccccgacgatgcggg

SEQ ID NO: 10585 - DNA, 1067 bp, Unknown
  gut microbiota DNA sequence
ctcatgtcgaacctgcccgaggagacccagctggtgaagatcatcgggttccggactgctgacctcgcgcagtttcagggcgaagagcgggagcggcgtgccgagctgaaggaacgcttcgcgctgcccgctgccctgcggaaaggaggcggtcgcattgtcaccctgcaagaccgcaacgaagcctttgcggcccgctttcggcgctgaccgcgccccggtgctctgccccctgtgtggtcggcctctgccggtctgggccatcccggaagccagcgcccggggcatctgggtcaaatgcaagaacccggcctgccgcaaagaaatcgaaataaaactctaagcctgtgccactgtgcctgcgctctttttcacagaaagaggtggacaccgtggccgcagatttttccatcaccggcgaagtaaagctcaacagtgacccggctgagaaagccacgagcaagtggacagtggccgcaggccagcttatcgcggactttgccaagaaagctgcatccagcctgcaaagcgtggtcaagagcggtctggactacaaccgcagcatggaaagctatctgaccaacttcaaggtcatgctgggcgacgaacagcttgccgccgagaagctggaagagatacgccggatggccgcaagcacgcccttctccctgtccgacctgaccgagggcacccagaccctcttgcagttcggcatcgcggcggacgacaccaccggcgtactgaaacgtctgggcgatatttcgctgggcaacgcggacaagctccagaccctcgtgcgggcctatggcaagatgtccagcgcccagaaggtcacgctggaaaacgtcaacatgatgatcgacgcgggcttcaacccgctcaatcagatctgcgacgccaccggcgaaagcatgagcgccctctacaagcgcatctcggacggcaaggtcagcttcaatgagctggaagccgccgtggctgctgccaccagcgagggcgggcagttctacaacggtatgctggaggccagccagaccttcaacggcaggctgagcacgctgaaggac

SEQ ID NO: 10586 - DNA, 481 bp, Unknown
  gut microbiota DNA sequence
cgtaatcccaattagcggaagtgaattgccgataacgtacaatctcttgcgcactttcacagcagcatagcctagataccaaaagacacggctccggccttcggtatgattcgagttgtctagattcgatcatattaggaggcagagccatgtccgatcccatcgtatcattcgacgaggccgccatgcgcggcgagctcaaggagctcgtcagaagaacagtcgaggacaccctgaacgcccttctcgaggaggaggccgacgacctgataggcgccgaccgctacgagcggacggcagggcgcgaggcctaccgcgccggccactacgagcgcgggctcaccaccacctcgggccaggtgaccctcaggatgcccaagctcaagggaatgcggttcgccaccgccatcatcgagcggtacaagcgccgggaggcctccgtcgaggaggccatgatcgagatgtacctggccggggtctc

SEQ ID NO: 10587 - DNA, 177 bp, Unknown
  gut microbiota DNA sequence
cgaacgctttctcgttcaagttcgacacggtggccgccgacacgctcgcgccccacaggatctcggagacgtcctcgatgcgcctcgtagagaccccggccaggtacatctcgatcatggcctcctcgacggaggcctcccggcgcttgtaccgctcgatgatggcggtggcgaacc

SEQ ID NO: 10588 - DNA, 2143 bp, Unknown
  gut microbiota DNA sequence
ggagctgaccagcgaccatttgaatctgctccacatgaacacgtcgttcgatgacacgctcgtcgaggtacgcaagtacgagggagaggtgaagtaaatgactcgctatggaatggtgattgacaccaagaagtgcgttggctgccacgtatgtgctatggcgtgcaaaacagagaacaacttgcccaacgatgtatggtggaaccgcattttcactgataacggaggcgagatgggattcgatatggtgggcggatcttatcccgacaacctgcagtttggctacgttcccgtagcctgccagcattgtgagaatcctgcctgcgtgaaggtgtgcccggtaggtgccacctacaaggatccagagaccggcgtggtgcgccaggactacgacaagtgcatcggttgtcgcatgtgcatgtcggcttgcccctacaacggcgtgcgctccttcaactgggaggagccggcattccatatggactacgccatgggcagcaaggatgtgcccgagcatcagaagcatgtggtggaaaagtgcaccttctgctaccaccgcacctcccagggcatcgagcccgcctgcatgcacctgtgtgttggccgcgcccgattctggggcgacctggacgatccgaactcggaggtgagccaacttatcgccacacgctctcataagcgcttgcttgaggagcgcggcaccgagccctctacctattatctcgtgtaacgggaaggagttgaactatgtctgagtatatgcaaggcggagctatcgctgaggacgatttcgatttctcggcgacgcgcgagcgagcgcgcacggttggacgcgcgtcggcggcggcgaagagtccggcgctgaacgttgccattggcgtatcggcggcggtggtcgtcgtgggtgtggtgctgtgggcaatgcagctgtctggcggcatggtacagactgccatgcgcaatctcgattcctggggtctctacatcaccggctttatgttcttcgtgggcttgtcggccggcggtctcattataagctcggtgcccaaggcgttcggcatcgcaggcttcggcggcatttccaaggtggccgtgttctcgtccatcgcctgcacggtgtgcgccattggtctggtggtcgtggatatgggccagcccttccgtgtgtgggagttattcgtgtattctaacttgggaagccctctcatgtgggatatcatcgttctctctacgtaccttattctgtcgtgcgtgtatctctgggcccagattcaggccgagcgcggcaagatgagtgcggttgcgttgcgcgtcatcagcgtcattgcgctcgtctgcgccgtgctcgtgcactccgtgaccgcctggatcttcgggcttcagcagggccgcgagatgtggcacacggcgctcttggccccctggttcgtatcgtcggcgcttgtgtgcggcacagcccttgtgatggctatagccatcgggctgcgtaaagctggctatctggatcttgaccaggcgaacatcgtaaagcttgcgaagctgctcggcgccttcgtgctcgtggacctgtatttcttcggctgcgacctgcttaccgaggcgttcccggctggctctggtctcgaggtcgtgcaaatgctcatctttggcccgcttgccccgtacttttgggtggaggttatcggctgcgtcctgtgtgccgttgtgtgcctgactccggccttgcgcacaaacgggcttctggttggcgcgtcgctgcttgccattgcggccatcttctgcaaacgcgtgcagctgctcgttggtggcttccagatcaccaatctcggcgaaatgacgccctttgcaaattccatgagcattacccattgggagggaaccatggccgatgcctacgctggcatggtctactggccgacgccgctcgagttcggcgtgacgctcggcgtcgtggcccttgggttcctcatcttcttcctgggtctgaagttcctgcccctgcgcccggccgaggaggtctcgccttccaagtagccgccttcttacgtgcaggcccgcgtcgccccttcccggcgcgggcccctttgccggcatgcgagatgatttcgcagctgcccgctgttaaaccaccattgacatatag

SEQ ID NO: 10589 - DNA, 6913 bp, Unknown
  gut microbiota DNA sequence
gatgtaaagaaaagtgcgatcgtgcgagttttctacgatgaaaaactcgcacaatcgcacttttttctgcacagagaaggtttttagcgcttcaggactcgcataatcgcacttttctttgcattgaaatcaaaaaagttgtttttggccggtctagcatcgcgtggttgcagtcgccgctgactgattttggcgataaactgggcaagttggtcattttttcgcagcgtatccttccttacaataagggaaactactgctgaataccgaaggatccactatgcccgttattgatgcccattcccacatttatcccgacaagatcgcctgcaaggcctcctcggcggtgggcgatttctacggcgtggacatgaacgccaagaacgcttccgccgcctcgatgctcgcggcctgcgagggctcgcccatcactcaccacctcgtgcattccgtggccacaacgccgggccaggtgcccattatcaacgacttcatcgccgagcagtgccgcgcccacgacaactttgtcggcttcgctaccatgcatcaagatttcgaagacgtggaaggcgaaattgatcgagcgattcagctgggactgaagggcgtgaagattcaccccgacacccaaaaggtgaacatggacgacccgcggctcatgcgcctgtacgagattatcgaaggccggctgcccatcgtcattcatacgggcgactaccgctacgattactcgcatccgcgccgcctgaagcgcatcctacacacgttcccgaagctggtagtagatgcggcccacttcggcggctggtcggtgttcgattatgccctggagtatttggaagacgagaactgctacgtagacacctcaagcgccctggaattcttgggcccccgccgcaccgtggagctcgcccgcgcctacggcatcgagcgcgtgatgttcggcagcgacttccccatgtggagtcccgtcaacgaatacaacatgctcgccgccatgcccttcacagaagacgagttcgaagccatcacctggcacaacgcccaacgcttcattggccaaaaaatcaagtagctgctgttcagcttagaacagcgcacgagccccgacgcgcgctatgggggagggagttgcgcgtcggggttcgagttatcgcaatggagtatgcatcgcttaggcttgctcggctagatatttaccagtcagatagccgtaagtgagcgcagcagcatggctggcgccggataaggtgaaggggtagtcctccacgaagcgtccgccttgcacgttgccaacggcaaacaggccgggaatgggctccatgtcgtcgttgagcacgcgagcattgtcgtcggttacgaggccgcccatggtaacgagcagtcgcatgcagctcacatcttccaccgacgtgtgcttgagcatatcgtaggtgatcgcgtagaagggaggatcgaccacggggaacatcttctctgctgccttgccgaaatcctcatcgactcctttttcgcacagctcgttgtagcgcgcgaccgctgcggttaaattctgggtggcatctgcgctgagttccagctgagaggcgagctcttcgagtgaatcggcttgagctgaaaaaccctcgccgtcgccatagctgcggatattttccatgaccatctcgagcatcgggtactgctcgggccagtggctgtctatgatttggaaaaccttgctgcctggttggttctgcatgaccttagcgatattggtcatgctgaggtcctcgttggtgaagcgctcgccgtgctcgttgacctgcaggaagaactcctggccgaactggagaatatgagccattaccgcatggggtcccacgtccaggtggccgccgacgttcatgcccatctgctggccgtcgccggtatcggcggggttgccgtcgtgatccgtcacctcgtatgagaacaggaatttgtcctggttcttcagaatccacggagcatactgccccagcattttctcgttgtgggaatagccgcccgtggcgagcaccacgcccttggagacacgatagcgcgtgtagccctcgccctcatcattgcggcagatcacggcggttatctggccgtcagcagcctcgagcttcacggctggcgaatagaattgtacctgcgcgttgccggtggccacggctgtatcgacattggcctgcagaatgggcgtatgggtctcgtctcctccgctgatgcagcagcatccggcaaagaggcgctcgtggtcgatgccgaagcgatagatgccgctcgtgagcgtatcggcgcagacgaacaactgactaggatcttcgggaagctcgtcttccatgccgagccacaggagtccgtcgtatgcggaggtgtaccactcgaaagcctctccgcagttcttcagccacttcgtggttatgcgatagtctgcgcgatgcgacatttgcgtcatgagctcgttggccacctcggtggggctgatgtcctcgattccgatggagcgcgtcttctcggtgccgaaggcggcgaacatgttcgagcgagcactgggcttgctgcccttctcgacgccgactaccttgagtcctccttcagcggcagaacgcagggctcctacccccgccacgcccaggccaaccacgcacacgtcgcaatcaaccgtctcgataatcttgtcctcggggatgtcggtttccaccagggtgccagtgtcagcgagggcggtctggtcgtcgccagctgcctcggttggctgcttcggggcgcagccggcgaggcctgcgccggctgctgaagcgcctgccaggccgagtgctgctaaaaagcttcgacggctgattgctcccttcttcccaaactccttcatcgtcacggtatcctccttttgtcgtatatcaggacggcacctatatcaccgcattcggaagtcgcgcaaaacaggagaaacgtatgaaatacaagaaaaagcaccctatacgaaaagtacgacaatcatctgaccaggtggtttattccttcgaggtcgtttcaacgagtgagataagctcttggcgcgaatggacgccgcatttggtgtagatgtgctgcaggtgagatttcaccgtgctctcgctgattacgagcttctctgcaatgtagggggcgcttcgtccgacgatatagagattgaatacatcgcgttcgcgagtagtcaggcccctgctgtcgctgaatgattcaaggagacgacccgagagtgaggtgagcttcgcgccgccgcttgcggacaacagcagcgacatggttcgatcctccagaatccaaatggatgccacgacgagcagaagggccatgaagagcatggcgaccctgcttgcgatgtggggtccgaaaaaagcggaagccagcagggggagggaccctaaagtccccacacaccaagcagtggctaagattctcacacgagtaccaggatacagtcgccccaggagcaatcccatgtagagggcgccgcattccaaaagagagtatgcgatgccggccaacacgtaggcaaggtaggtgagagtcgatgagaacagcactaagataagagcgaccagcgaaagggtcgcaactactttcgtccatacctgcagattgaagtctcgcccgcggttaaagagccagagcacgagtgcgagcgatatggcggtaatgatgacggggaacatctcgccttctgcctgctgcaggaagaccgagtactgcaaggatcctaccaccagtccgataacaaaaaagctgcagaggattttcgccaacgaagatggctcgagggtaaaagaccgctcggcctccgatgaggaaggcgcggggcgctggatgaggcaaagtgccaccgcagaggctgccacgctcatgccggcgagggcttggcaccatgacgcagacagaagcgaggggagaatcgccgccgccgatgcgagcacctcgacctctatcatcagttcgacaatgccgatatcgcgctgggcgcagactgccgccagccagcagaagagaagaacggttcccccggcagacatgaggatgagtccgaaaatggagaggggctctcctgtgccttgtacggccaggcccattaggcagcatgaggcgcttgctatggcgaggggaacactcgcgagtgcgcgtccccctcggttgcccgcgatgatcaaagcgcaagaaacgagggaggcgacggctacgtctacaatggtcgccggcacgctgccttgtcccaggggaagataccaggaaatctcgcagggcgcctcaaatgactgggccgccagaagggcggagatacccgccacagctatcaggagatttctgccgagccaccgcccatgattgcgctgcaacggtatgccccttcctgttgtggccctcgatcatacggggacattatacatggggccgtcgctcggtcgaagggcggcccgaagaccgcccggatacgaagctctcggggccgcccgctactcctcctcgggacggtcgatggccatgcagatgcggtcgatgcgcaagcggtccatggcgagcacggtgaatgtcaccttggtgccgcgatcttccagcaccgccacgtcgccctccttgggaatgcggtcgaacagcgacagcagaaggccgccggcggtttccacgtcgttggccgcctcgggctcgaagccgagcagctccaccaaatcgtcaatggcgagcgtgccattgatctggtaggtgccgtcgggcagctcctcgatgtcgtcgtcggtgtcgtgcacgtactcgtcgtcgatgcggccaacgatctgctccatgatgtcgctcatggtgacgatgcccgccgtgccgccgtgctcatctacgacaacgcacatctcggtgcgaccctcctgcatggcctgcaaaagcttcgcgatgggcgcgccctcgggcaccggcggcagctcgcgaatcttccaatcgctcatgggggcgtccttgggctcgtctacgagatccttcgtgtgcacgaagccgacgatgcggtccttcgagccgtcgcacaccgggtagcgcgtgtacttgtactggcgcacgacgtcccagttctcttccaaggtgtcttccagatcgaggcagatgacgtcggtgcgcggggtcatgatgccctcagcgtccttgtcgcccaagtcgaaaatgttgtcgacgaactcgttctgctccggatcgatgaggccgctttccgtggactcgtcaataagcagcttgatctcctcgccggtgtacacctcgtgctcatcggccgggtcatggccgaacaggcgcatgaccccgttggtgatgccgttgaagatgaccatgatcgggtaggtgatgcggtagaacacgcgcagggggccggcggtgtgcagggcgtacttctcggtggcgaagatggcgaaggatttcggaatgagctcgccgaccaccacgtgcagggtggtcacgatgaagaagcctacggccacgcagatggggtataccgtcgcctcggggaagccccaggacagtagcggtgcctccagaacggcggacacggccggctcgcccaaccagccgatggccagggaggccagcgtgatgccgagctggcaggccgacaggtaggcgttgatgtgcgtggtcacgtcgcgggcggcctcggcgccgcgccgcttctcggcgacggccatgtcgatttggctcttgcgcacgcgcaccagcgcgaattccgcgatgacgaagaacgcgttcatcagcaggaagaacaccacgagtaacaggcatatagcggtttgcataccgatcaatcatcctttcagggcaaaaactctgttccgcattatagaggtgcgggagataacatgagcgaatccatagatgattttcccaaacagtcgccgaactgataccgcagaaggcagcggcgacgctcatactaagaaaaaacaagcgagagcggggcataaagcgaatgaggtgttgtgtatgaagctaacgcgcaagcaatggatgatgctggcggtgctcgtatcgggcgccttcgtgacggtgctgaaccagacgctggtgacgccggcgctgccgtccatcatggtggagatgagcgtcgaccaatcgacggcccagtggctgaccaccgggttcacgctggtgaacgccatcatgatccccattacggcgtttctgcaggatcgattctccacgcggaagctgttcgtgttctcaatgagcctgtttgccgtgggcacgctgctggcggccgtgggcctcaactttccggtgcttctgggcggccgtctcgtgcaagctgccggcgccggcatcctcatgccggtgaccatgaccgtgcttatgctggtgtttcccgtggatcgccgcggttcagccatgggcatcttcggcctggtcatcgccttcgcgccggccatcggccccacagtggcgggcttcgtcatcgaccaagccgactggcacatcctgttctacctcattttcgctctggccatcgtcattatcatcccgtcgctgttccttgtcgatgacaaggcgccggcgaacaagggcgactcggtgctcgatccgctgtcgctggcgctttccaccttgggcttcgggctcatgctttacggcttctcggcgctgggctcggccgggctcacgccggtgccgctgcttacctgtgccctcggcatcgtcggtgtggtgtggttcttcattcgccagacgcgcctgccgcacccaatgctgcgcgtcgatgtgctgaagaaccgccgcttcctcgtgggcactatcatcggcatgctcgtgcagggcgcgctgctggccgccggcatcctcatgcccatttacgtgcagtcgcttcacgggctgtcggccacggtgtcgggcctcgtgctcatgcccg

SEQ ID NO: 10590 - DNA, 4535 bp, Unknown
  gut microbiota DNA sequence
atgaacgtcatcaacctcatcgacggcctggacggtctggcggcgggcattgccgctattgcggcgctcttcctgttcctgatcgcctttgggcgcgggttggaggagacggcgatgctgtcgatcatcctgctgggcgtgacgctcgcgtttctgcgctacaacttcgcgccggcgagcattttcatgggagactccggctcgctgctcttaggcgccatgatcggcgtcatctcgctcatgggcgtcatgcgctcgccaacggtcatcgtgctggcggtgccgctcgtgatagcggccatacccatcgccgacacggcggcggccattatccgccgcgtgtaccaccatcagcctatccagcaggccgaccggaagcacctgcaccatatgcttttgcgcaaaggctatggcgtgcgcaagagcgtcgtcatcgtgtacgcctggacggcgctcttgggcgtgggcgcctgggtcatgagcagcactcacggccttgccgtgtgggtcatgatcgccatcatgctggtgggatcgtttttaatactgtggcgcctcggcatcttcgatcaggtgctacgccaccactaccacggccgacacacccgccaagaggacaagccccgctggtacggccggcacgggcggtagggaatggaagagctgtccaaatacgcgctctttgatggacggctctataggtgcctcggaatgctcccccatgttgggggcggtccaacgccatcggtcgtgatctgcgaatcgcccgaaggcgaccggcgctatgcgacgggcgaagagtggtctcgtgtggcgcgggcattcgatgaagaggcgagtgcccaaggtctggttacggcagtgagcccggctcctgacaagttaagtttgttccgaagcctgttcaagggtcgcgaggacgtgcacgcccatggttatcggcgcaaagatgggggcatcgcctatgcgcctgcttgctctaacgagtgggttcgcggtgtgtgcccgaaatgtcagaacgtgcggtcgaagtgcgccgattgcccgtcgcggtcgttcgcgccgctgagcgatcgcgagctgatagaccatttcaaaggacgcgatccctctttcagggatgttgtaggtctttatgttctcgatagcgagtgcaagacgtcagtgctcgtggccgatttcgacaaggcagggtggcgggaagccgtctccgcctatcgtgatgcagcggagcggctggggaccccagttgctgtggagaggtctcgctcaggcaatggaggccatgcttgggttttcttcgatgagcctatagcagcctctttggcgcgcgatctggggagtgcggtaataagcgagggcatggcccacgacgtggcgctctcgttttcctcctatgacaggatgttcccaacgcagtcgactattcctgctgggggcttcgggaacctgatagcgcttccttttcagggtgtagcccagcgccaagggaattcggtgttcgtggacaaggcgttcgagccttacgaggatcaatggttctttctctcgagggtcacgaaggtaagcgaagagaaggcgagagaggtggtgaagcgaagcgctggaggcccgttgggtggattggcctatggacgccagatagcgcgctccggttcggatgacgagccgtggaaacaccccaagagagccccgttgacctccaaagactttcctccgatggtttgtgtcgtcaaggcggacatgctttacgttcccaaagagggactgtcaccagcggcgcgcaatcggctgctgcgacttgccgccttcggcaacccggaattttatcgtgcgcaggtcatgcaccaatcggtgttcggaaagccaaggatcatttccctcgccgaggaacgaggcggatatatcgcgttgccgagaggcgcggagaagaggctcgtcgaactcttgaaagaatccggcgctttttatcgagtaagggacgaacgctttgtgggacctgtcattcggatgagtttcaatggcgagctgcgggacggccaagcagaagcggtggagcggttgctcgagttcgagaacgggattctctcggctcctacagggtttggcaagaccgtaataggagctgctgttatagcgcggctcaaaatgccgacgctggtgatcgtgccgaagacggccctcgtgccccaatggaaggagcggctcggcgagttcctagacatcgatgaggagctgccaccgttgctcactccgaccggtcgcaagagccgtcggaagcgatcgctcattgtgcagatcggcggagggaaaaacgaacgaagtgggatcatcgatatcgccaccttccaatctttggttgaaaaggacgacgggggctgcccgagagcgaaaggcttcgttaaggaatacgggcttattgtcgttgacgaatgccatcatggagcggcgccgcagctcgaatgtattttgaaagcggtgaacgcgcaaaatgtctacgggctgagtgctacgccgaagcgcgctgatgggctggagggtatcacctatctgctttgcgggccggtgcgcgttcgaatcgatcctaagcagcaagcccagctgcagaattatcggcgagttctccggccgcgctttacgggcgtgcggctgcccgatttggaggcggatgcgtcctattcccaagttctagagcggctctgtgcccacgagaagagaaacgctctgatagcagaggatgttcgtgaggcagtagccgctgggcgaacgcctttagtcgtctcgaagcggaaggatcacgctcggatgctccaccatgccctgcgctcccttggtctggatgcgagactgttgatcggggagggtacgcccaagcagaggcgtgaggccatcgaaagggccaagcaatctgaagatgggcgacccttcatcttggtggcaacggagagctatctgggagagggcttcgatatgccgcggctcgacgcgctgttcctgacgacgcccgtatcctgggacggcaacgtcacccagcagtcgggtcggctgcatcgcgagttcgagggcaagaccgaggtgatcgtctacgactatgtggacgtttcggtttccatgctcgagcgcatgtacaagaaacgattgaagacctatgggaacctcggctacgaagtgtgttcgccggcagatgaggacgaaggggcgaaaggaggttcctttgttgggaagggtgattggctcggaagattcgaagcggatatccgaaaggctaagcgctcgatacttgtgagggctccttatgcgagcgagatagcggtgaagaagcttctgcctgcgctgcgggacgcatgcgaaagaggactgaaggtgacttgcgcggtgcggaagcgtacggcgagcgagcggttgggttcccgagatatcgccgctgccgctctgctggaagaggctggcgttgaagctacttggttcgaggacggaccgacgcgcttggcaattattgatgacgctcttatttggtacggttctttggcgctgctcgcctttccggaatccgacgattgcagcctgcgcctgcacgatgcagaactggcggcggagttgaaggacgagttcgacggctaagaaatcgcagcatccctgaggaaatatttctacatcgaatggggaaatatttttgcattagataagtgtggcgcctcggcggatcctgttccgccaccgcctcggccgctacgctctttaagaggacaagccctgctggtacggccagcacgggcgagagaggtgcagaaaaactaaggaggatcctctttcgaagcccctcctttgcaaaacgctttgcgtttttcacggcaactatgatagcagatttgtggaggaggatagaaaatcgttctgtgcggtatcctgcctcctgcggtcgaacaatcgcgtatgggtactgtgatggcggcgaagcaatggtagaataaaggctcgctgattatcggttgcgagaaacgaggatcgtgggcacgctctcggagatactcaaggaacagtgggaatggcgcaagcaaatcttgagcctggggctgttcgatctgaagaaaatttcagcgggcgcggtgcttggccccctgtggttcttcgcgaagccagcggtgtacattctggtattttggttcgcgctcgaggttgggctgcgcagcgccgaccagacgggttccgatgttccctatatcctctggcttatgggaggccttattccctggttctacattcaggaaattctcggcacgggcatcaatatcttcaaacgctactcgtatctggttacgaagatcaaatttccgctcgcaggcattccgacgattttcagcatttcgacgttcgtcattcagctggggcttgtggcggcgctgctcgtcgtttatttcctgtgtggtcagccgctcgatctctatttgcttcagctgccggtagcgcttgtgctcatgtttgtgttcttcaatatgttctcgctggtgacgagcttgctctcggctatcagcaag

SEQ ID NO: 10591 - DNA, 12330 bp, Unknown
  gut microbiota DNA sequence
cgaggcaaaactgccacgcccctcttacggtcgcgccttcttgcgtccctacaggatcatgttgcgggcgatctccagggcctcgtcgatgccgtcggggttcttgccgccggcctgggccatggtgggcttgccgccgccaccgccctggatggccgggcccatggccttgatgatggccccggcgttgaagcccgccgccacggcctcgtcggtgccggcggccatgagcacgggcttgccgtcgttcacaccggccaccaccatggcgccgggcgcgtccatgcggctgcgcacgacgtcccacatattgcgcatctgcccgccgtcgcgcacctcggtgcgcgcgatgatgacgggataccccgccggcgcctgctgcacttgggaaagcaacgtcgcgaacatatcgtcgccgatcatgctcttggcgcgcttggccttggtgcgcatctccttcagggccttctggtcagccgccacgcgctcggacacgtcgaagggcggcacgcgcaaggtggccgcggcctccttcagctcggcctccaccttgttcacataggcgagcgcgccgtagctcgtcacggcctcgatgcggcgcacgttggcgcccaccgacgactcgctcgtgatcttcaaaaagccgatctcggcggtattgcccacatggcagccgccgcacagctcacgggaaaggtcgcccgcctccaccacgcgcacgacctcgccgtacttctcgccgaacagccccgtgacgccggcggcgcgggcctcctccagcgacgtctcgtaaatagtggtgggagtggcgctcatgatgtgctcgttggcctcgcgctccacctcggccagctgctcgggcgtgcacgcctcgaaatgggtgaagtcgaagcgcaggcgatcgggacccacgtacgagccggcctgcttcacatggtcgccgagcacgcggcgcaaagcggcgtgcaggatatgggtggcggtgtggttgcgctcgatggcggcgcgacggttcgcgtccacgcgggccaccaccgtatcgccctcggcgagaccggtctcctcggcgcgcaccgcgtgcacgaacagacccttctcgggggccttcgtgtccagcacgtaaaggcgcccctcgccgttctcgatgacgccggtgtcccccacttctccgcccatctcggcgtagaagggcgtggcggccagcaccacttcgccggtctgtcccggcgccagggcgcccacgcgctcaccgtcgacgacgacggccagcacgcgcgtctcggcggcggtggtgtcgtagccgatgaactccgtggggccgaactcgttcagcaggtcgctatagatgcccccgtaggtggaccaggccgcctcggcgtccttcgcgccggcggcgcgggcgcgctcgcgctgggcctccatggcggcctcgaatgcctccatgtccaccttcacgccgcggccttccgcaatttcctgggtcacttccacggggaagccgtaggtgtcgtgcagggtgaaggcctcctccccggagagcacgtcgccctctagcttgccgagggcctcctccaggtaggcctgcccctggcgcagggtggcgccgaagcgatcctcctcggccatgatgaggccgcgctcaagctcgcggttctccacgatctcggggtacacatctcccatgagtcgcacgatctcgtccacgtactcgttgaggaaatgcccctcgatgccgataagctgggccttcatgatggcgcggcgcagcagacggcgcagcacgtagccgcggccctcgttgcccggcaaaatgccgtcggcgatcatgaaggtgaccgagcgggagtgatcggcaatgatgcgcagggccaggtcggtctcggcgtcctcgccgtaggtcacgccggccagacgctcgcccacggccaccaggctgcgcagcacgtcggtctcgtagttggactgcacgccctgcatgatggcggccatgcgctcgagccccatgcccgtgtcgatgttcttcttgggaaggggcgccaaggtgccgtcctcctggccgtcgtactgggtgaacacgcagttccagtactcgaggaaccggtcgcagtcgcagcccggcgcgcagtcggggctgccgcagccgaactcggggccctggtcgtagtagatctccgagcaggggccgcaggggccggtggggccggcgcgccagaagttgtcgtcctcgccgaggcgcgagatatggtcctcgggcacgcccaggttcttccaaatctcgatggtctcgtcgtcgtcctcgaacaccgtgaagtacaaacgctccggcggcagccccagcacgttcacggagaagtcgtaggcccaggcgcacatctcttccttgaagtactcgccgaaggagaagttgccgagcatctcgaagaagctcagatggcggcccgtggtgccgatgatgtcgatgtcgttggtgcgcacgcacttctgcacggaggtggtgccgatataaggcgcctccagctgcttctgctgcaggaagtagggcttgaactgcaccatgccggcactcgtcagcagaagtgacgggtcgtcggggatgagcgaggaggagggcacgagtttgcagcccttctcctggaagtagttcaggtacttctcgcgaatctcagcggtggtcatgtaacgcataggtattctatccgtcctttacggtcaaagaaaacagtcgctggagattatagcgctagttgcgcgctactttttgggagaggtggtgtcatcgtgggaatggcgcgcggtcaccttgccgtgggactgcgagcgcagcttcggcagccccttgctgaacaagggggaatcctccagcttgatgggcttcagcgagccggtggtggtgcccggcgaggtggcgtcggcgatggggttcacctgctcgttgtccgagggcacccccttgaagaacacgccgtcctcggccaccagatggcgccctgtcctcttctcgaagtagtagacgaacaccgacttggccaccgccacgagcgggatggacgcgagcatgcccacgagcgatcccataaggccgctcatagcaccgccgagcgccgagcccaccatgagggcgaacagggtcagggccgggtggatgtccaccgagttcgccatgatcttcggcgagacgaacgtgtagacgagctgctggatgacgacggtgcccgccagcgctatgagcgcggccaatgggctcacgaaaatggccgcgatcgccgccagcgcgccgccgagccacgggccgataatggggatgatgttcagaacgccggtgataaggccgagcacggcggcattcgggatgccggccacggtgaaaagaatgccgcagcccacgccgatgacggcgcactgcagcagcgtgcccttgatgtagccgcccatcaccctcgtaaaggtggcgtggaagaactcagcgtcctcggcgcgcttcggcccgatgagacggcgggtctcgcggcccatggcgggcagctcgaggaggatccagaaggcaatgaccagcgcgaagcccagggccatgaggccgttggcgagcgtcgtcgagaaagccacgatgccgctcgcgctgccctgggcgagcgaggatgcgaacgaggcggccgacttctgcacctcgctgatgacgctcttcaccgtctcgtcctcgagcaccggcgcgtaacgggtgtacaggtcgttgccccaggcgatgaccgcatcaacataatggggcaggttgctgaccaagtcgttgaactgggcgttcaggccgaacataggcgagaacagaaggaagccgataagggcgagcacgagcgccatgatgacataggcgatcgtggtgcccaaaccgcggttgatatggcgcttctccagcccgttcacaatgccgcgcaggcagaagacgatgatgacggtccagatgagaatggccacgggcaccgacaggatgttcagcagatagacggtcgccgccaaaagcagaatggccgccaccacggcccacaggtcgaagaagcgcgtgcgggcgcgggcctgcttggtgcgcgagatggcattggcggcagcggtggccgcggcggccgcgctgcgcgggttgttgacggaagcgggcgcgtcggctcctccctgcgattgagacgcgtcggtgctcatgggaatctcctcgggtgcaagctactgaacggtgtaggggctgttccccgcggaggccggcttggcctgagccgcggcggcgttgggagagatggccggcggggcagcggctgcggggtcggcaggggccgtcgcggccggcgcggccggcgcgtcggtgtcgatgtcggcgttggcgttggccacggccgcatcggcgatggtgccggcggtgccggagagctggtcttcgaagtcgcgggcacgttcttggctggctgcgttggcggccttgacagcggcgcggcggtctttgccctcggcgacgacggcgcgggcggcatcccccatggccgagacggcgtcggcaacggtcgccccgcgctcgggcgcgcggccggccttcgcggcggcgctggcgtcggcagcggctcccaagctcacggactcatcggaggcgtagcgcggcttgaacttgctgcgcaacttgcccgtgagcgagttcaccaaatcgatcggagcgctcgtcacggtatcgacggcaccggcggccttcgagacggaatcggtgatctgggtcacatcttccagaatctggtcgacgcgcatgagttccaaattcgccgcgtccaccgtgagcgacagacgctccaccagcggatcgacgcggcccacggcgggcttggcctcctcggcgatctcgttcacgcgggtaagcagcgggtcgatctgatcggtcaccagggcatccacatgggcgatgaggggatcgacctgggcggtgatcttctccacgttcttcagcgtgggggtgagctccttatgggcgtcgtcgatggtcgagcgcgtcgagcggatggtgagcgccaattccacgacaaaccatacgagcaccgcgccgacgagcacgtagatgacgggcagcgcgatgtccacgatccctgcgaaatccatgatgagcctccttataattccgaagacctgactataccattactggagtcattctaattaagttgcgcagggcctccacggaacgcgccgctacggtagccattccgtaaacggaagttgacatcgtgtcacacgcgagcggcatcgccagcggcacccgtgctggggcgccctcgaccgaacgtcgccccagcacgatgcctggctcgctgcgcggtgcccgcaatgcggcggacgcaacacgccgagccgcgactcaactcccctggcggtcgcgggcggcggcgtcggtgcggtaagcctcccagccgcgctcgccgggttggtagaagcagccgcgctcaaggccctcgggcagatagcgctgatcgacccagccggccgggtagctgtgggggtacttgtactcgccgtagttttccgagccggggcgatgacgatcgcgcaggtagtcgggcaccttgcgcaccgggccgttgcgcacttcgcgcagcgccgcatcgatcgcggcctcggcgctgttggacttcggcgccagcgccaagtaaatggcggcctgggccaagttgatgcggcactccgggtagccgatgacctcggcagcccggaaggcggcctcggccacgagcagggcctgggggtcggcgttcccgatatcctccgaggcagcgatgtacatgcggcgggcgatgaacttcggatcctctcccccgtcgatcatgcgggcgagccagtacacggcggcatccggatcgctgccccgcatgctcttgatgaacgcggagatgatgtcgtagtgcatgtccttgttcttgtcgtagggcagcgcgcggtggggcgtggcggcccgcaccatggcctcggtgatggaaacgggggcctccttcgtgcccggcgccaccataccagcggccaactccaacgttgtgagcgccccgcggccgtcgccgccggccagggtgacgatggccgcggtagcggcctcctccagagcatagcagccacccagcccccgcgcgtcttccacagcgcgacccaccagctcggcgatctcgtcgtcggacagcgaatgcagctccacgatgcgcgagcgggagatgagggctgagttcacttcgaaaaaagggttttccgtggtggcgcccacgagcaccacgagccggtcttccaccgcatgcagcaacgcgtcctgctggctgcggttgaagcggtggatctcatcgacgaacaggatggtgcgcaagccccccatgacgagacgcttctccgccgcgtcgatttcccggcgcaagtcggacaccgtgcccccgatagccgacacctccacgaaggtggcgcgggtcgattcagcgatgacgtgggcaagcgacgtcttgcccgtgcccgccggcccgaagaggatgacggagcttaacgtgtcgttctcgatggccgcgcgcagccagctgccctcgcccacggcctccgtctgcccgaccacctcgtcgagcgtgcgcggccgcatgcgcaccgcgagcggagccacatcgcgcttccgatcattttccatagcagtaaacaaagtatccatagcccgtaatggtaccacggagcccgccaaaataatagaacaaatgttttatcaatgcgaaatgcacgacaaaaagaagcggcccggcggagggggccgccgggccagaaggaggggggatgcgactctcgcggagccgctttctgctttaaagagacaaagcaggcaagtgatcggagggggttgtctcacttgctgacgtcagtataacagccacccttgaattccctatgatgcacccatggtgaacttgtggattcataggctcatcgttaagtaattcttcacattttagaagaaacctcatcagcggtaatacgacggcgagcctgagcgacggcaccgttgatggagcgccatcagcaccctaccccgcgccgccgaatgccgaatcgtacctatccctgacgacgcgcgaacagcacgttgttcgtctcgagccagctctccacggtgcccgtgtcgaagccgtcggccgaatccaccacaagcgcgtacatttcctcctcggcaagcaccgcgtccagcgcgtcggtgagctgaatctcgccgcccacccccggctccacatcggccagcagttccatcacgcggggcgagagcaggtagcggccgaacaccgccagattcgacggcgcatcctctagcgccggcttttccaccagcgagtccaccttccacacattctcggccaccgcctccccggcgatgacgccgaagcggctcacctggtcgtcgggcacgggcatgaccgcgataacgctggccccgccatgggcgtcggaaaccgccttcatagccggcagcatctcattgcccggcacgagcacatcgccgagcagcacgtagaacggctcgtcgcccgtcttctctgccgcgcagcgcacggcatgtcccagccccagcgcctcctcctgatacacgtagctgaccggcaggttgccgacatattccaccgcatcggcataggcgtccttgccgcgctcgcgcagaagcgccaccagctccgggttcggcgtgaaatggtcctcaatggccttcttctcgcggctgttgacgatcacgacctcgtcagcgccggaagccagaccctcttccaccacatactggatggccggacgatccaccaccagcagcatttctttgggctgggccttggtggccggcagaaagcgggtaccgagccccgccgcgggaatgagtgccttcatcgagcgcctttctcttcgttgttcgcgtgccgcccatgatactacagatggcgcgcgcgtcgcccctccccttcaccgagttcgctatactgttcgccatgagcaaaacggacgcacatattctcgaccccatccccgacgagcagtacctggaggcccgcgatgccaccggaggcaagccggcgggcgtgcgctttctggcattcaataccatcatcgacatcgaagcctacggcgaagcggcggcgtgccgagcggccttcgaggaggcccgggcgctctgccgcctctacgagcgcctgttcagccgcacgcttccccactccgacatcgcacgcataaacagcgcgcacggccagcccgtggccatcgaccctttgacctacgacctgctcgagagggcgctttcctactgcgcggaaagcgagggcgccttcgacattaccgtaggcccggcggtgcgcctgtggaattttcacgagggcacagtgcccgatgatggtgcactcaccgaggcggtgcgccacgtcgactggcacgcgctcagattgtggaagacgccggcagtcacagcggccgagagcgatgccgatgccgcaaccgaggcggtgcccgggttcgagacagtgcccgaacccaaggcctgcttcgcgcagctggccgaccccgatgccgccgtggatgccggcggcatcgccaaaggatggatcgccgatgcgctcgtggcggccatggaggcccacgggctctcgggcatcatcgtgaacctcggcggcaacgtggccgtgagcggcaccaagcccacaggcgacccttggcgcgtgggcatccgcgatccgcgcgacccctcccagctcatcggcgccgtgcccctggttgcgggatcggccgtcacgagtggcgtctacgagcgctgcttcaccgcgcccgacggcaccttctactaccatatcctcgacccgcgcacggggcgccccgtcgaaaccgacgtggccggcgtcaccgtcatctgcgagaaatccatcgacgcggagggcttctctaccaccctgctcgccctcggcctcgaacgcggactcgccctcgcccgtcgacaccccgaaattctgcaggccttcttcatcgcccccgacggcactatcaccaacgcccgctgaacaacaaaacttttcgcatttttggtcacaaaaccgagttttgaactttccgaagacctgttttaatgcaactggcgcttttcaagcaatcgccgatcccggtgcgaacgacaagcttccgtaaaacaccaggtcaaagttggagagattgaaccttgcatttcgtgcccccgcaagcaagagttcagaactcggttttgtgaccattttttcgaaaaagcgtgcagaacgagctgtgaagtctttgtaacgagcgagatcgtcgcctcttcgaaccgtcggagaacgctagactaatcgttgcatcaatgaactaactttccgacagccgaaagggcgcaatggccgaggccgcgaacaaattcaacctggactccacatacttcgtggccttcgaaatggcccatgaggccctgcgccgcgggttggagcaggcgagcgacctgaacatcacccagtaccgcgttttaacgaagctgatgcaggcctcggcgcccgtaagccagggggagctcggaaagattctaggcatgaagcccaatgtggtgacccaggccgtcgacgccctcgtcgcccatgggtacgcgacgcgagaggccggtgcagctgatggccgtacgcggttcctcgccgtcaccgacgacggcgccgagcacgtcgctgccgtcaaccagtccctggtagagagcttgtacgccaccttcccaacccaagatcccacgtatcgcaccattctggaagcggcggttgccgccgcagcccacatcgaacccccactgcacgccgggcgcgcccagcgtttccctgccacgcgctcgctcgtatccatcgagctcatccgcgccgagacagagcgcaccctgcgcgatgccacaggcgcgtcgctcaacgagtgccgcatcgtccaacgcctcggcgagacggatcatcccgaacgcgtcggaaccctggcagagcagctgatgatgtcgccggtgaacgcggcgcgcgccgtggatcgcctcgtgggccgcggctgggccaaacgcctgaagtcgccccacgacaagaaggccgtgtacgtggccctcaccgacgagggcgtttaccagggatttctcatcagcgccaccgtgaacgagctggctgccaccaagctgtgggtgcgcctgactcccgagcagagggacgccatcgagcgcgtgggccatgtggtggtggccgacctgaacgcccagcggcaagcaaaggagcaggccgcctacgacctgctccaggaaatctagacgaggatcatcttgtccgcatagaccttcgcgccgaagagcatggccacatttgccacgacatccgccgcgaaccagccgcccagcgccggcaggctgatgctcgccacgttcagggccgagaaggtgccgaccgtgagcgctgcgacgacggcaccgcacgcggccacagccacaacgagagccatctccaggctgtgccccgcgcgccagcgagccacgcaggcgcacaccaccatggaggcggcgcccagaagcgtgccgaggaaggcggcgaacccgatgacgccgacgacgatgatcggcagtccgggcagcttcgatgacatagagcccacctgcaccgccgacaggatgccgagcaccacaatcattaggcacaccagcgccacgagcgccgtggcccagccccacaggaatgccgtcagcgggcgcgggcgcaccgcgggagcgcccgcatcgccctgcgcccgcgaggccagcgcgccgtagagcaccgcgccggccgtcgacacgcaaagcgcgaggccggccgcgaacagaaaggccacgaaggccgagcccgtgaggatagagcagatcacatcgagcaccggcacgcccgaggccgagatgtagtcgaaggcgagcacgccggtgcccccggccaccgcaagcccaatgcgtcccagaagcgcaatcacgagcgccatggcatacagcgcgagaaacggccgcgccatcgctttcatatctttcataacgaactcctatccgtacgcgcgctcgcgcccttacgcctggccgccgttgatctcgttctccaccgcagaggtgccgcacagatacccgccgcagaaggcgagccccacgtcccccacgagcgatcccagaatcgggtcgccgatgtagctgttctcgccgcaagcgcccccggcggtgtgccagccggcgtacagaccgggaatcacacggccatcggtgcccaccacctgcatctggtcgttgatgagcagtcccgccttcgtgccgtacaggttgccgccgatgcggcaaccgtagaaaggcggctccacaatagggtgcagccactcggcgggcatggggtacagaaagtcgtcctcgccgcgctcgcaggcgtcgttccactgagccacggcctcggtgagcacgccctcggcgagacccaaatcgcgctccagctcctccaaactgtcgcggcgcttcagcacgtcggcgtcgatggcgtcctgcacgccgtggtgccagtcgcggtagtgctccggcaccttctcgatttgctccaggtcgggggtgagaagcttccggcagtgctcctgggcaaatcccgccaggtgatcctcgtagttggcgtcgaagacgatgtaggagcggtggcccggcggggtcatctggatggtggcgaggtcgcccaaagcgtagatggcgttggcgccgtcctcggccacacgggagtccatgtagcgcaggcggttgccgcagcggtcgatagtcagccacggctggcgcgagagctgggtcatgccgtcgtagaggaaccgcgcccaggtgccgccctcggcctgccagtcgaccccgccgtcgaaggaagcggagctgttgaacccggacacgtcggcacccacgcccagccccatgcggaagcactcgccgcgctccccggccgtcaagtagctggaggcgcagcccatggccgccgtggggatgtacttgtccaagagcgccttgttgttgcagaagccgcccgccgtgaggatgacagcgcggtcggcgcggatgtagcgctcggtctcgtagtcctcgttcaccacgacgcccacgatgcgtccgtcgtcgtcctgcacgagggccacagcggggctttggaagtggaaatcgacgccgtgggcgtagccgtagttgtacatggcgtcggtggcgtccttcatcttcagcacgtggtggtccagcgtcgagcgcttcggggccacgtacaccggcacctcgcccagacgccagtgcacgccgca

SEQ ID NO: 10592 - DNA, 1811 bp, Unknown
  gut microbiota DNA sequence
cagttcagaaggtgttcgtaccataaactcgtggtggagatgatgggattcgaacccacgacccccacgttgcgaacgtgatgctctcccagctgagctacatccccacgaaggtgtgcgctttcgcgcaaggcagtagtttgcccgatttcgaaacgattgtcaaccgtttcgcttaagagaccacacgctcttccaacgggtaatccaccagctccatcgactcgtccacgaacggcgcgaacagcggctcgccgttctgggacagctcaaccatgccggtgagcacgtcgacgtactggtaagactggcgagcggtgcggccgcgcttgcggtcgacctccatgatgaacagctgcggatgaacctgcgtcagcacgccttcgctctcgacgatcttcgaacggcccatgttggcgcgcactttcaatcgttgaccgacgaaatcattcaaggtatcatgaatgccatcgacgatctttgcctgcttggccaaatccattgactaacttcctcacatgttggcggtacaagtacagccccatatcataccacgattgtcaacccccgcaacttttttcggccgcgggaaacgtgacagcctttagcgggctcccgcgtaagcgcataccaccgattatgacaagtttcgcgaacgcgagatccccaagcccattcttggggacattttcattcagtgaagagacacgctccggagacgcaatcacctgaagcaccgctacaatggcgctcaagcaataggtggagcgggcaagcattcgggaggcatctcatggcaacgatcgtgatggcggacttcgatttcgatgactgcgactttgaacgaaagatggtggaagcggccggcatccaattcaagagcttcgacgatgcccgcaaccgcacccccgccgagatcatcgagcatttgcacggggccgatggcgccatcacctcctacgggcgcttcaccgccgaggtgtttgcggcgcttccccagctgaaggtggtcagcaagaccggcaccggcgtggacaacatcgatgtcgcggcggccacggccgacggatgcgccgtgtgcaacgtgcccggctacggcacggaagtggtgagcgatcacgccatagcgcttgcgctcgcgtgtctgcggcgcatcaacgagatcgatgccgacatgcgcgccggcatctgggatttccatcgtcgccgtcccttgggccaggtgcacgggcgcaccttcggtgtggtgggctacggcaacatcggccgtgcggtggcccggaaagcgcgcgggctcgggttcaacgtcgtggtgtgggatcacgagggagtcccggggcgcttcacgccggaggacttcccctacgcgaccctcgaggagctgctgaagaccgccgacgtggtcagcttccacacggcgctcgtgccggcaacccatcatttgctgaacgccgacaacatcaagctcatgaaagacaacgccatcgtggtgaacacctcgcgtggcgcggtcatcgacaacgacgccgtggctgccgccctttgtgcaggcaagctctggggcgccggcatcgacgtgttcgagcacgagccggtctcgccggacgcccccatcatgcacgcgcctcacaccgtgctcacctcgcacgccgcctactggtccgaggagtccgccgtcgagctgcgtcgccgctgcacccaaaacgccatcgacgttgtgctcggccgcacccccgaggcctgcgtgaaccccgaggcgctcccccgcgcactcgcgaagtagctggacaaggaaaggcccgaccgcagcc

SEQ ID NO: 10593 - DNA, 6767 bp, Unknown
  gut microbiota DNA sequence
gttactcgtgtccaccacggaaatgacgcgggcctcgggaaaccggggctcgctttgttttgccggcattccgtccgtagggggcaatctcagttgccccttgccaggagtgggggtcggctgcaaattgggagagcggcgcaagcaccgcccctacgagaggcgagcggaaggggatgccgatggatgcaacaacgggcaaggcgctgatgcgggcgcagttcaaggcggtgcgcgaggggcttatcccaggggagcggcgcgccatcgatgaggcgatcgcgcggaatgtggcggcgctgccggagttcgcagcggccgatgcggtgttcacctatctgagcttcggtgcggaagtggatacgcgcgggctcatccagcgcgcgtgggaagcggggaaaaccgtgtgcctgccgcgcgttgttccgggcacgcgcgagatgcgctggtatacggtgcaatccctcgacaggctcgtgcgcagctccttcggcgtggaagaaccccctgacgacccctctcgtgaagtgcatcccgccgacttcgcccgtcccgtggctcttgtgcccgggcttgccctcgaccgcgaaggcttccgtctgggctacggcggcggcttctacgacacgttcctgcctgctttccccggcacctccatcggcctcatccgcgcctgccagctggtcgagcggctcgccgtgcgagacgtccatgatgcacccgtcaacatcgttgcgttagagcaaggcagtgcatacgttgcgaaccggtagaaagggctgttctcggacgttggtcgtagtacgaggcacctttttgccacaatcgtagaagaactccgacaaaaagacgcttcgtgctacggctgatgggtccaaatcaggcaaaaatccgtagcacgacatgggtttttgccaaaacgaagtagcacgaggggacataatgcccaaatcggtggtgatgcttggcaaaaaggcgtgtcgtgctacgggtggcggctgagaccgcagcagctatcgccgcctacccgaaccacgcgcgggccagggcggcgatgccggggcggatgtctgcctcggcgatggaggagaaccctacgagcacgacgcccttggtggcgcaggcggggttggcccagtacttcttggtgggatacaccgccacatcggcggcagccgcagcggccacgagttcgtcctggctgcgcccgtcgcgcacgcgcacgagcaggtgaagccccgtgccgcattccagcacgtccaccttgtcgcccatgtactcgcgcagcgccgccgtgagcgcgtcgtacttgcggcggtttctcgtctgcacgcgacggaggtggcgatcccacgagccgtcggtcatgaagcgcgcgagcacctgctggttgagccagggcaccggcgagtacgagctggcgaaggcctcgcgccatcgcttaagaaggggcgtgggcagcacgaggtagttcatccgcaaagcgggcgagagcgatttcgagaacgtgcccatgtagatcacgcgccctcgcccgtccatggaggccagcggcgccagcgaacgctcccggtagcggaagtcgcggcagtaatcgtcctccaggatgtaggcgtcggcggcctcagcccacgcgagcacgcgctcgcgcacgtcggtcggcatgatgcggcaagtggggaactggctcgaaggggtgaggtaggccaggcgcgcccccgaggactcgaggtcggaaaggaacacacggacatcgtcggtcacccggcagggcctgatggcgaagcgcgcccgttcaatgaccgagcgcacgccgtcgtagccggggtcttccatggccacggcgtcccgggcggcatcgaagagggtcagcaggttctggacgctggtctgcgtgccgccctgcacgacgatttgctcgggggtgcaatcgatgtcgcgctgcgtgaccagccgccacgcgatggccgcgcgcagactctcctccccgaacgggtcgttgtaggcgtcgcagccggcggcttccaccgacagcaggatgtcgtcggtgatggcccgccaggcggcggcggggaaggtgccgggctccaggttgccgtaggtgaagtcgtagcgggctttccgccgagggcctcccagcagcacggcgcaggagggcgccgaggcgtccggctgcaggtaggccacattctgcacgacgtacccgctgccggggcggcttgccacgtagccttcctgcacgagcaggtggtaggcctgctcgacggtgttgcgcgcgcagcccaaatcggccgccagcccccggatggaggggaggcgcgagccggtggggtaggtgccgctctcgatgccttcccgcagctgggcctccagctggcggtagaagggggtgtcgctgtgctcgtccagatgcatggggcctcccggttgtgaatcgcgctccctctccgcgttgccatggttggaggaggacggttctttatttcctgagtgagaagcttagcaaatgtggaagccccatgaaggtgtccccctcaggtttttcaaccgtccccatgaaataacgggcaactgtcccttcgcgatggggacagttgccgtctagactgtgcgccgaaacaatccggttcgagagagagcgtcgcgggatcgccggcgagacggctgcggaaagagcgccgcagcgcgctgcccgcgcgccggccgtacgaacaagcagagggggttcggctatgcgtttgacgggaatcgccgctttggccgccgcgggcgtcttcgcggcgagcgcggtcgcctccgccgcgccatcgcccttgcccttgttgcggccgcccggcgccggcgcgcccgagcacttcgccgcgcgctgcgtgcgctgtgggcgctgtcttgaggcgtgcccttaccaggccattcatgcggcccctctgaacgcggggcgcgaggcttccacgcccttcgtgaacgcgcgggcccaggcctgccgcctgtgcgtggaattcccctgcgcggcggcttgccctacgggcgctttggacgtgcctgccgagcgccgcgacgccggcatgggtgtggccgtcatcaacgaggacacctgcctgtcgtttcagggcatgcgctgcgaggtgtgctatcgcgcctgcccgctcatcgacgaggccatcaccatcgactaccggccccgcgagggcgacgatatccacgcggtgttcgcaccgcaggtggtgcccgatgggtgcccgggatgcggcctgtgcgagcagcgctgcccggtgagcgatcctgcgcccgccattgtggtggtgcccgcaggcgcccaagaggaaacctacgtggcccgtcgcaacggcgcggcctagcagatacgcaaaggcggggcgatacgatgccctcgaccgaaagggaggaacaagatggaactgactcgacgcaccttcgttaagagcaccgccgtggccctcgcctcggcggccgccgccggcaccatggccggctgctcgtcgctcgccggcaccggcggggatgcggcaacctcgggtggcgactccgtgaagaccgtgggcgtgtgccgcttctgcggctgcggctgcggcgtcatcgtggaggccaaggacggcaaggtgatctcggtcacgggcgacccggagaacggctcgagccgcggcctgaactgcgtgaagggctactacttggccggcgcgctgtacggcgaggatcgcttcaccaccccgctcatccgcgatgacaagtccaccaagggcacgcccgacggcctgcgcgaggccacctgggacgaggcgctcgatctggtggcgggcaagctccgcgacacgtggaaggccgacaagagccgcctggcgttctggggaagcggccagcagcccatcgtggagggctactgcacggcgaagttctggaaggcgggcctgctctccaacaacatcgaccccaacgcgcgtctgtgcatggcctcggccgtcgtgggcttcatgaacgtcttccagaccgacgagccggccggctgctacgccgacatcgacgagaccgacgtcttcgtcacctggggcgccaacatggccgaggcccatcccatgctgtactcgcgcctgacggcccgcaagctcgccgacgaggccgtgcgccactacgacgtgaccaccatgaccacccgcacctcggcctcggccgacaaggtgctcaccttccgcccgggcagcgacatcgccatcgccaacgccatcgcgaactacctcatcgtgaatgacaagtacgaccacgacttcgtggccgaccacgtgcagttcaagcagggcaccgagaacatcggcaacgccaccgacgacggctacgacaagagcgacatcggccaggccgtcgacaatgtggagcccatcactttcgaagccttcgccgcgcgtctggccccctacaccctggagtacgcctccgagctttccggcgtgccggccgaggatatccaggagctggccgaggtgttcgccgacaagagccgcaaggttctctcgctttggaccatgggcgtgaaccagcacaaccgcggcacctggatgaaccactgcatttacaacattcaccttttgaccggccgctacgcccgtcccggcgacggcgccttctcgctgaccggccagcccacggcctgcggaacggcccgcgaggtgggcaccttctcgcaccgccttcccgccgacctggtggtgaagaacccggatcaccgccgctataccgaggccatttgggacttgcccaacggctacctggacgccatcgagaaacccggttaccacacggtgaagatgttccgcgaactttccaagggcggcatcgatttcctctggagcgcccacaacaactgggccgtgtcgatgcccaacctcacccgtttcctcgggcgcggcgacctcacgggcatcaacgacgccttcatctgcgtgtccgaggtgtacccgacgctgtcctgccagtacgccgacgtggtgctgccggcggccatgtgggtcgagcgcgagggcgccttcggtaacggcgagcgccgcacggccgtgttcgagaaggccgtggacgccccgggcgaggccaagtgggatctctggatgctcatggaagtggccaagcgcgtgctggccggcgagcagatcggcggcgaggacgccttcaaccacctgttcggcgcctggtacgacgccgaggccggcgctttcaagggtaccgaccgcgaggtgtgctcgagcatctgggaggagtaccgcaccttcagcaacccgagcctgaacccggatgccgaggccatcaacgccgaagcgaagctgaagatggaggccaagcagctggccccctatgaggagtacatctacaatcatggcctcacctggcccgtgcgcgaggtggacgggaagtggctgccgacgctgtggcgcttctgcgacggcccccaggaggacggcttcgatgagtacggcgtggaaacctacggcgagcacgacaaggccggcggcgtgagcttctacaaatccgccgacaagaagccctcggcggtgttccgtccctacgagccgccggcggaggaacccagcgacgagtatccgttctggttctgcacgggtcgtctgctggagcactggcacaccggatcgatgacccgtcgcgtgcccgagctcaatcgcgcgctgcccgaggcgctgctggacatgaacccggccgactgcgagcgcctcggcgtgaccgacggcgatcgcgtgcgcctcacctcgcgtttcggcacctgcgacatcacggtgtccacggccggccgcacccgtccgcccgcgggcatggtgttcgcgccgttcttcgcggaggagacgctgatcaacctcgtggtgcaggacacctactgcccgctttcgaaagagcccgatttcaagaagacctgcgtttccatcgagaagatttaaggaggggtacccatgcggaccatgaagaagtcgaagatgatctgcgccgccgtgctgaccggcgtgctgggggccgcggcgctggccgggtgcgcccacgagacggccgacaccggtgccacctacaatcccggggagccgccgctcatgacggcgagccacgagggccgctacgagagcctgggcgcggccggctgcttcggctgccacggcggcagcgacgaggtggaggtgttcctggcggccgccacgccgctgcctgccgaccactacgtgggcggggatgtgtccacccacgagatcgacggccctcgcgccgagtgcatcacctgccatccggtggcccaggagtaggttatggaagacgagaaggtggtcatctcctcgctggtggtggaggcgcggccggaatcggtggatgcggtggcgcgggccctggcggctatggagggggtggaggtgcacgaggtgaacgggtacaagatcgtcgtcaccatcgaggcttcctccaccggcgcctcgcacgagatttcgagccggttcattcagattccaggggtgctgaacgtgaacctcgtgtacgtcaactttgaggatgagacactcgggtagaaagtcgcccaaaagcggagctacggggtaccttgattcgctcagacagtcctcgctcggcgaaacagcccactgggctgtttcgttcgctgcggaactcgctcggtcaaggcaccccgtatctcctttgatcattgccttggttgggaggaatgacctgtgactcggtctatgggaaagataacggttgtgcggcgggtg

SEQ ID NO: 10594 - DNA, 10538 bp, Unknown
  gut microbiota DNA sequence
actcaactaaggttgagcgaagcgggatgcgggatgccgctcaccaagcgagttccgcagatggtatcgaaggcggtaagcgaaggggatcgaatagccccgccgccttcgataccagcgaggactgtctgagcgaatcaaggtacccggcgtttccgcccccggtgagtttcgaggagatttagatcaaggcatggaactgagagatattcagaaggagatcgagaaggcgcagggtcggctgtccgatgccttctcgttcttgcgtatcgacgagaagcgcgacgagctggtcgcgctggacgagcagacggcccgtccggacttttggaacgacgcggcggcggcccaggcggtctcgaagaaggcggcggggcttcgcgccaccatcgaggactacgagcgggcctgcggtcttctggacgacgcggcggcggcgtgcgagctggccggcgacgatgcggccttcgccgaggaggccgagcgcaccgccgccgagctgacggcgctgctcgatcagctggagatcgagtcctggttctccggcgagttcgacgagggcgacgccatcctcacggtgaaccccggccagggcggcctcgaggcccaggactggacccgcatgctctaccagatgtacgtccactacgccgaggacaagggctggaaggtgacggtgctcgatctcgtgcccggcgagggcatagggctcgatcgggccacgatccagatcgagggccgctacgcctacggcatgctgcgcagcgagatcggcatccaccgcctcgtgcgcatcagccccaccgacgccaagaagcgtcgccagaccaccttcgcctcggtggaggtgctgccggtcatcgccgacgacatcgaggtcgacttgaaccccgccgacgtgcgggtggacgtgtaccgctccagcggcccgggcggccagtgcgtgaacaccaccgactcggccgtgcgccttacccacgagcccacgggcatcgtggtgacctgccagaacgagaagagccagctgcagaacaaggaggccgccttccgcgtgctgcgcgccaagctctacgagctggaggagcgcaagcgggccgaggagctggacgagctgcgcggcgagcgcatggacaattccttcggcagccagattcgcaactacgtgctcttcccgtaccagctcgtgaaggatctccgaagcggcgttgagacgggaaatgtggacgccgtcctttccggcgccctggaacctttcgtcatcgggtatcatacgtggagagtagccaactcctagcagcgaacgggaaagggaagcttatggatactgccgccttgcaggcgaaggccaccgacattcgcaaggatattctgaccatgatcacggaagcgggcagcgggcacccgggcgggtcgctctcctgcaccgatatcctcacggcgctgtacttcggcggcgtcatggactacaacccggccgacccgcacaagtccggccgcgaccggttcatcctggccaaggggcatgcggcgccggcgctctacgcgacgctggcccacgccggcttcttcccgaccgacgagctgcacaccctgcgcaagctcggcacgcgcctgcaggggcatcccgattccaacctgctgcccggcgtggaggtgtccaccggctcgctcggccaggggctttccgtggccgcgggccttgcggccggcctgcgcctgaccggcgaggacggcctcgtcttcacggtgctcggtgacggcgagtgcgaggagggccaggtgtgggaggcggccatgttcgccgcccatcagaagctcgggcgcctcgtggccatcatcgacaacaacgagctgcagatcgacggctgcatccacgacgtgtgcgatccgggggatttgggcgagaaattcgccgccttcggctgggacgtgcagcgcgtctgcggccacgacatccccgcgctcatcgagcttttcggccgcatcaaggccgaggcggccgatacggcccgtccggtatgcgtgatcgcgcgcacggtgaagggcaagggcgtctccttcatggagaaccaggccggctggcacggcaaggcgccgaagcccgaggaacttgagaaggctctggcggagctgtccgccgacgcggaataggaggcccgtcatggtgaaactcgcaaacaccgagaccgctgcccagaagaaggccacgcgcgccgcgtacggcgccacgctcgcggagctcgccactgagggcgtgcccgtcgtggccgtggacgccgacctgaccggctcgaccaccaccaagaagctcgccgacgcgggatacgccgggcgcctgttcaactgcggcatcgccgagcagaacatgatcgacgtggccgcgggcctctcgctggccggcaacatcgcgttcacgggctccttcgccgtgttcggcaccgggcgcgcctacgaccagatccgcaacaccgtgtgctactcgaacctgaacgtgaagatcgcccccacccatgcgggcatctccgtgggccccgacggcggctcgcatcagatgctcgaggacgtctccctcatgcgcggccttcccggcatgcgcgtgctcgtgcccgccgactacgccgccgcccgcgctgccctgcgcctcgctgccgccacgccgggccccgtctacgtgcgcatgggccgcgccgccgtgccctgcgtctacgacgacgaggtggagctggaaatcggtcgcgcctacgtgctgcgcgaggggagcgatgtcaccatcgtggccaacggcgtggagatccgcgaggcgctcgccgccgccgacgcgctggccgccgacggcatctccgccgaggtcatcgacgcgttctcggtgaagccgcttgacgcggcgaccattctcgaatcggtggcgaagacccgttgcgtcgtgacggccgaggagcattccgtcatcggaggcttgggctcggcggtctgcgagcttctggccggcgccgaccccgtgtgcgtggaatgcgtggccgtgcgcgaccgtttcggcaagtccggcgagttcgaggaactgctcggctatttcaacattgacgctacggccattgttgaagctgtgaaaaaggttcgtgagcgtgcgggcctttgctaaaatacttcagtctcagtaacgaacaacctgaacggagcaagctgtgacgaacgaacggaaccagggaattcctggtcatgccggccgtcacgccggcgcgccggcccagggcaacaacccgcgcgcccgcgcggcggcgccccagcccggccacgcccagaaggcgtcgatgacctcccagctgtcccaggctttgcccatgctcgaagtggacgagatggccgcccccatgggcgcgccggtcatcaccttcgatcatgtgaccaagacctacccggcccagccgaagaagcccgccttaagcgatgtgaccctgcagatcttcgccggcgagttcatcttcctcgtgggccactccggatctggcaaatccaccttcatccgcctgctcacccgcgagatcaagcccacctcgggcaagatctacgtggctgacgaggatctgaccaccatgcgcaactggcgcgtgccctacctgcggcgcaacatcggctgcgtgttccaggacttcaagctcctgccgaacaagacggtcttcgagaacgtcgccttcgccctggaggttatcggcaagagccggcacgtcatcaagacgcaagtgcccgaggtgctgcgcctcgtgggcctctccgacaagctgaacagctatcccgatcagctttccggcggccagcagcagcgcgtctccattgcgcgcgccatcgtgaaccggccgcctctgctcatctgcgacgagcccacgggaaatctggatccgcagacctcccgcggcattatggatctgctcgagcgcatcaaccgcacgggcaccacggtgctcgtggccactcacgaccgtgagatggtcgacaacatgcgccgtcgcgtcatcgcgctcgaccgcgggcatctcacccgcgaccaggaccggggggtgtacggcttcgatgtctagtctcttctacttcttcaaggagtcgctccagggcttcgcgcgcaacctctccacgacgctcggctccatcatcaccatcttcctgtcgctgctcatcatcggcgtgttcctcgtgggcggcaccattgtggagcgcctcgtgtcctccatcgaggacgaggtctccatcaccgcctacgtggccgacgatgcgccgcaggagtccatcgacgccgtcaccgcgatgatccagggcatggacggcgtggaaagcgtcggcttcaccaccaaggagcaggctctggagaacttcagcaactccatgaccaccaaccccgagatcatcgagcagctggacggcacgaacccgctgcccgcctccatcgacgtgagcctcgccgacccgcagaaggtcgacgagatcgccgccgccatcgaggccgacgagacgttccgctccatctgcgacgagcccgacaacccggccgattcgctgaagtacggccagaagacggtggaccgcctgttctcggtgaccaagtacgtgcgctatttgggcgtggccctggtgctgctgctcgtgttcatcgcgctcgtgttcatcaacaacaccattcgtctggccatcatggcccggcgcaaggagatcgccatcatgcgcctggtgggcgcgtccaacgggttcatccgcgggcccttcctcatggagggcgccctgcacgcccttatcggctcgcttctggccgtgggcgtcctgcaggtgctgcgcatgtacggcatcccgaagctgcaaagcgccctgtccttcctctcgctggacgtctcgggcaacacctacatcatgatctacatcgtgctggtggtagccggtctcgtaatcggccttctcggctccgctttcgccatgaggcggtacctgaaggtgtagaatcttgtcttaaaggtttggaacgtcggcgcgacccccgcggcactgatgagccgagggggtcgcgcttttcagattgacggagtcacgtgcaaggagcggccatggccaaagaacgcaacgggcggcatctcacccccaacccccgggcccgcagcgagcggcgggttgatcaggcgacgagccacgggctgctccgcgtgttcctcgcggtcatcctcgtcgccgtctccttcgtcgggggcttcgccctgcgcagccagaccgaactggtggcgagctggggcatcccggtttccgatggcgagcgggaggcgcttgcggccgcggcggccagcaacaccttcgagtccgtctcggcccgggtgggcgatgtggaggacatcctctccacgtactccatggacgagatcgaccttacgtcggccacctattccatgctcgacgacttgatgaagtccacaggcgacccctatgccacctactacaaccccgatctgtacaacacctacatcaaggagaccaccgagcgcagctacgccggcatcggggtggtgttcgccgactacaacgggcgcgcctacgtgtcggatgtcttcgagggctccgaggccgaggccaaaggcgtgcaacagggcgacttcctcacctccatcgacagcgaggacgtatcggcctggtcgatgaccgaggtggtgaacgcgctggccaaagacgagggcgcgacggtgtcggtgacctggatgcgcccggcgagcctggacgcccagaccggcgagcagttcaccacgacgctcacctgcaaggtctacgaggaggcgaacctcaccaccgcgctttccgacggcgtgggcgtcgtgaaggtgcgccagatctcgagcaatgccgcggagttggtggatcaggcgacgaaatcgctcgtcgagcagggggccggggccatcgtgctcgatctgcgggacaacgccggcggatacctcacccaggccgtcgatatcgcgagcctgttcgtgaactccggcgtcctcgtgcagattcagggcaacgacgggccggccaccaccaaatcggccgcgggcgacgcgccgtacaaggacgtgccgcttgtcgtggtggtgaaccgctacacggccgccgccgccgaggtgctcgccgcgtcgctgcaggacaacgagcgggccgacgtggtgggggagacgagcatgggcaagggctcggtgcaggtggtgcgcgagctggacttcggcggggccgtgcgctacaccgccgcctactacctcacgccccaaggcgagcccatcgacaacgtgggcatcgtgccccaggtgggggtggtaaacggcgagggggaggatggagcggactcccagctggccaccggcatcgacatcgcccgctcgctcattccggcggcctaggatcggccgcgcaacgcgcacgggcgccttcgcgtctcgtaagggaagggagatagggtgagccgtaacaggaagcacacgcgccgtcgccccaaggcgaatccccggggcgttctcaccgtgagcgccggcggcttcggtttcgtgcagacggccgagggggagtacttcatccccgtctcgggcctcgccggcgctttcgacggcgatctggtggaaatcgcgcctctgcggaccggggcatcgaagggacggcgagtcgcggatgacgacggggatatggcgggtcgtcccgccgcccgggtgctctcggtggtcgaccgggcccacgacacgctggtggggcgctacgaggtggccgagcccttcggagtggtggttcccgccgatccgcgcattccctacgacgtgttcaccatgcgcgccgagtcgcccaaggtgcccgacggggcgctcgtgcgggtgcgcatcgcccagttcccgacgcgccgcagcgccgccacgggctttgtggaagaggtgctcgccgatacctccgacgcgccgggggccggcatcgacctcatcgtcggccgccacaagctggagacggtgttctcggaaggggccctggccgacgcggccgcggcgaccttggacgcggaaggggccctggccgccggctaccgcgacttgcgcgaccgcttcaccttcaccatcgatccggccgacgccaaagatttcgacgatgcgctgtccttggattatttggaggaagaggggctgtggcggctcggcgtgcacatcgccgacgtgagccactacgtgccctggggctcctcggtcgatttggacgcgcgtcggcgcgccacgagcgtgtatctggccgaccgcgtcatccccatgctgcccccggctctttccgacgagctgtgctcgctcgcgcccggcgccgagcggcgctccatgacggccgacctgttcctgaacgatgagggagagctcgtgcgcttctcgctgtacccggccctcatccgctcggacgcgcgcctttcctacggcgaggccgacgacatcctcatcgattacaaggtcgccatcgccgccggaggcgatattgcctggcggctcgtggaatgctcgcggctcgcccgcgcccgggaggcggcccgcgcccgggccgggggcatcgacttcgccacgaccgaggccaaggtggtcctcgatgcggagggacggccgaccgacatcgcgctgcgccgcaagaccgacgccacgcgcctggtggaggaggccatgatcctggccaacgagacggtggccggctacctggagcggcgcggctttccctgcctgtaccgcgtccacgaacctccggcctccgatgccttgggctcgctcattcccgtgttccaggaattcgattggttcgaaaagcccatggaggcgcgtctggtggcgggggatccgaaggtcatccaagagattttggcggcaagcgcgccccgcagcgagggggagctcgtcagctcgcttctgctgcgggccatgaaaagggccgactaccggcccgagaaccagggccattacgggcttgccagcgaggcgtactgccatttcacgagccccatccgccgctaccccgatttggtggtgcaccgcatgctgcgcgccgcgctcacgcgccgtccggagaaattcgaccaggaggtggcggcgcttccctggatcgccgagcactcctcggccatggagcgggtggccgaggcggcggcccgcgagtcccaggagctgaagatggtcgagtacctggccgcgttcgtgggccagtccttctcggccgtgatctccggtgtggcggcctgggggctctacgtgcgcctcgattgcacggccgagggcgtccttcccgtgcgggccttgggcgacgagtacttcgtcttcgacccggtgcgctacacgcttgtcggcgacgagtcggggaaggtctaccggctgggccagtgcgtcgccgtcacgctgaagagcgccgacgcgaccaccgcctccctggagttcgtgctggccggtagccgttaagggccgaggtgccggatcgcgcggcgcctgccacagatgaccgcagattaacgggtcgtcaaggggtcatcgtcggataggctcatcgcgaggcggcgacggctgcggcacggtatggtggatgcacgcgcaagacccgatgaagggagattcaccatgagtttcatcgataagatgaaggaagccggcgaggacatcaaggaggcgttccaggacggcgcccacgatttggccgataaggcgggcgacctgaaggacgccgctgctgagaaggccgccgacttgaaggatgctgccgctgagaaggccgccgacttgaaggatgctgccgccgagaaggccggcgatctgaaggatgctgccgccgatgccgccgctaaggccaaggacgccgccgccgacgccgccgaaaaggccaaggacgcggccgataccgccaaggagaaggctgccgatgccgccgatgccgccaaggacaaggctgacgacgccaagaaggccgccgaggacaagtaacgcgccagacgctccgggccacagtgttcggggcgcttggatggaaaagggaaagcccgctgcttggaaatccccgagcagcgggcttctctgttctgttagcatgatctctcgtgaaaaatcagcggtcgtgctcgtcggggcgcggctcgtttaaaggagacgttattggaacgtgagcgattcggcagccgtctggggttcatcctcatctccgctggctgcgccataggcctcggcaacgtctggcgcttcccctacatcaccggcgagtacggaggcgcggccttcctcgtcatgtacctggtctttctggtggtcttgggcctgcccatcatggtcatggagttcgctgtgggccgcggttcccagcgctccatcgcccgcgccttcaacgtgctggagccggcgggcactcactggcacaagtacaagtgggtgggcatcgccgggtgctatctgctcatgatgttctacaccacggtggccgggtggatgctcgcctacgtgccgaagttcgcctccgggcagttcgtgggggccgactcgcaggccacctcggccgtcttcgacgcgatgctggcctcgccggtggaatgcgtcttctggatggtagtggtgtgcgtcgtctccatcctcatctgctcgctgggggtgcaaaagggcgtggagcgcatcaccaaggccatgatgctcgccctgctcgccattttgggggtgctcgtggtgcgcgcgctcacccttccgggggcggccgacggcgtggccttctacctgctgccggacttctcgaagatcttcggcagcccggatatgttcttcgaggcggcctacgcggccatgggccaggccttcttcaccctgtccatcggcatgggctccatgaccattttcggcagctacatcgacaagcaccgctcgctcatgggcgaggcggccacgatcggcgtgctcgacaccggcgttgccctggccacggggctcatcatcttcccggcctgcttcgccttcggcgtggcgccggactcgggccccgggcttgtgttcatcacgctgccgagcgtgttcgagcagatgtggggaggacaggtgtggggcacgctgttcttcgtgttcatgtcattcgcggcgctttccacggtcatcgccgtgttcgagggcattctgaggttctcgatggaccaatggggatggtcgcgcaagcgggccgtcacggtgaacctcattgccatcccgctgctgtcgctgccctgtgcgctcgggttcaacgtgctttcggatgtggtcatgccgggagtgggcgacatccagacggtggaggacttccttgtgtccagcaacatcatgcccttgggctcgctggtctacgtgctgttctgcgtgtcccggcgcggctggggctggaagaacttccttgccgaggccaacgagggcgaagggctcaagttccctcggtggctgcgcccgtggatgcgcttcggcgtgccggtgctcgtggtcatcatcctcatcatgggctgggtgcccatcgtcagctcctggatgtgagcaaagcgactggtgcct

SEQ ID NO: 10595 - DNA, 1012 bp, Unknown
  gut microbiota DNA sequence
ggcagtctttttcgaagctggtgcagacctgctgggcggcgtcgaggagggcgtcgaagtcttcggtgtcggcatcgatgagcagtttgctggtcatgaaggagatggaggccttgttcacgccgggcagttcggagatgccggcttccatcttggcggcgcagttggcgcagtcgaggttctcgagtttgaaggactttctcatggtcgttcctttcgaagtgcttgctttccgcctactgtcttgctcggcagcagcagaaggttacggcaggggaggggctattcgcagacgtgggtcatgccctgggcgagcatggtgaagacgtggtcgtcggatagggagtagatgacgttcttgccgtcgcggacggcctttacgaggcgcgcttgcttcagggtgcgcagctggtggctgacggcgctttgagtgcaaccgacgacggcggtgatttcgttcacgctgagtccgccgcccatcagcgcgaacagaatcttgatgcgggtggtgtccgagaagaccttgaacaggtcggctacgtcgaaaagcagctcctcatcgggcatttcggtgaacagggaggccgtggcctcgcggttgcagccgcaggggcagtcgatcatctgggcgcaggcgctttccacgacctttccggcttccttctctatggttgtcgtctcgctcatcgcttctccttgtgaactttcaaacatatgagcaactgttcataagtataggcactgccatcgttctgtcaaggggaggattaaaacgattcttttggaggggcaaaggggaggaaagcgtaacggggccgtcgccacagggcgtatgggcgggagtaccatcgggtaaacgacgcgcgccgcgcgtgggtgcttcagttcgaaaggtgttgctatgaaggcttacaaaatcgtcgatgccgactttgtgaaacgggaaattgggcgcatgcccctggtggacgtgcggccgccgctgcgctttgacgcggggcatattcccggg

SEQ ID NO: 10596 - DNA, 1616 bp, Unknown
  gut microbiota DNA sequence
aaaactatattcggggcgtcgggtcgggccttcccattgtgcgggagtacctcgaatcgtcccatggcaccattaccatcgaggacaatttgggaaccggcgccgtcgtcaccgtcagtttggtgcgtgaagaagacgatcccctggacgactgggacgaaaccgacgtgctgggcagcaagggagagtacgccccgagctcgtcctacgcttcggaaaccgccgcggtccatcagccctacggagcgaccctcacagctggcgccgaaccctacccctccaacccagccggcatctattcctccgtgggctcatccagcgcaccaggagcggctccctacccacccgcctacgcgccgcaaggctacagcgcggtacccgcggcccccgctcccgtaccgactccctcttacggagccccttaccagggatatccgagctatggagcctacggcgccgccccaacggcctatccgacctacggagcagcaccggcaccagcggcgtatccgggttacccgggcgccgtcatgccggcgcccgccctctccgaacgcgagcgaatattcctgaaacttctccttaaggaaggaaccctccggaacaaggatttcagcgacctgaccgagacgccggcctccaccaccaacaccaccctcaaccggctgcgagaggcaggtttggtggaaatggtcgggaagcagcgggccctcaccccttacggccgtcagatcgcacagggtctctaagacccaagccttgccaatttgctagaattgccctgaaagcggagaaccacggcaaaaccgccggcggaaggatgatgtatggatagcgagacgctcaacgaacaatgggcgcgcatttgcgcccaagtcaaaagctaccaggatatcgacccctcccaggtttccgcctttttctcgcggctcgttccccaagccatgagcgattcattcctcatgctcaccgccgacaacgactttataaagacatgggtcgagcagcattacaccgaggtgatcgtgcgcgctctgcgcgatctcaccggcgtcgtattcgcggtggccattgccgtcgatcctactcaagagcagcgcaaaagcgctgccgtaggacaaccatccccagcggctcccctttcggcaccctcacaaccgatgccggtaccagcacctgcgcagccagcggcaacgacgatggagcctctcccctctcagcccatcgcggcatttgcccccccaccgccggcctatggtgctcccctgtctcaggcggcccccttcgaaccatccggcatggtcgctcatcccttcgtagaggacgtcatggtcgatcactacgcgcctcccgcgcccgcaccgctctcccaggagccggtcgccgagcggtcttcgaatccctcgtcttccctcacgttcgagaacttcgttatcggggaatcgaaccgcatggcctattccatggccgtcgaagttgcagagtcccccggacggcttccccttaatcccctgttcatttacgggaagagcggcttggggaaaacccacctcatgagggccattcagaactacatcgaggaaacgcggccctcgatgcgaacggtctatgtggat

SEQ ID NO: 10597 - DNA, 5747 bp, Unknown
  gut microbiota DNA sequence
ctcgaagtactcagaggccggcgccatcaaggatcaggagaaggtcagcttccgcaacttccgcgcctactacgagcaggcggacatcctcctcctcgatgatgtccagcaccttcaaggcaagaaggaatccatgaacatgcttttccagctgttcaacacgctgaccagccagggcaagcaggtggtgctttccgccgaccgcgctcccaagaacatccaattcgacgagcgtctgaaatctcgcttctacagcggcggcaccattgatatccagccgccggaagtggaaaccaaactcggcatcgtcaaatccttcaccgacgaattcagccgcagcgagggcctggggaacttcaccctctccgacgacattcaaatgtacatcgccgagaactccggatccaacatccgcgagctcaagggcgccgtgaatactgtcatctatcgcatgatctactgcgatcgcagcgatatctccattgatgaagtacgcgagcttctagccaatcatttcaccggcggcatgtcacgaagcttgaccgtggaggacatccagcgggaagtggagaacttcttcaaggtgagccatagcgacatggtaggccccaagcgatcccaatccattgtgagaccgcgacagatcgccatctacctgtgccggcaactgctcgacctcccctacggcgatatcggcaagaaattcaatcgcgaccattcgaccgccatccactcggcaacaagcatcgaagagcgtttgaagaccgatcgcgatacccaggaagagattgaggtgctgcagaagatcatctgcgagctggactagtttgttcacaaactcttgataagaagggaaaacctgcgcataacaggacgacttttcaacgacaacaggagacagcagaggatggccgctagcgcatggttcacaagcgcgctcgataactcaccaagcagtaagtacgccagcaagctccccacctgcggctatgccagttatcgactaatccactcgtcttattgagactactatttggattctatttttagaatgcctcctcaatgggaacgactttttagttctgcacagccgttaccggtatttcatggtttcgcctccctaccgcaacccccttcgcagccatcttccttattcttctgttcgccccgttgacagtacttttttgcgttgtataattcaaaagctactctttaaaccatgaaagggaaagaaacaatgaaacgcacctatcaaccgaacaaacgcaagcgcgccaagtgccatggcttccgtgcccgtatggctaccaagggtggtcgcgctgttctcgcttcccgtcgtgctaaggggcgcaagcgtctcaccgtctaggagatctttaggtgcagactattaaatccagcactgaaatctcccagctcttctctacggggcatcgtcttcatacgccatactttacggttattgtaggcgcgcaggacgacaagcagagcaatcatgagcgacacggccattccggtcgtgtcgcttttattgcggggaagaagttggggaatgccgtttggaggaaccgcgccaaacgccgcttgcgagcactctgcatggagatgggtgggccgtgggccggctttgacgtgatatttctggcaaaatcgggcctcactcgggcttcttatagtaaagtgctgaaagcatgcggaaatgtcgctgagcgccttgcccaaggcgaagggaagaacaccgttgaagaagctgctcgtacgcattaagaggattccgactctggtcgctatcggtcttattatgttttaccgaatggctctttcacccctccttcccccctcttgccgcttcattcccacatgttctgagtacggactcactgcgttcaagcggtatgggttttgcaaagggttcgtgctcactgcaaagaggatactgcgatgccgccctggcggtccgtgtgggtacgatcccgttccctgagtcgccggtgcatttggaaaggtaagttatgtgggatatctttaaagactggatcttcgacattatccagttcttctataacttctgccatgactggggcctggcgaccatcattgtcacgattatcttccgtatcatcgtcgcgcccctcatgcataagcaagcgaagtccaattatgctatgcagaaggtgcagccgaagattcaggccctgaaagaccgtttccccgatgatcccacgcgtcaatcccaggagatgcagaagatctacgcggagatgaagttcaacccgctcgctggttgtcttccgatgctgcttcagatgccgatctttattgccctattccaggtgcttcgcgagatgggcgatcgcattggcgagggcacgtactcgttctacaacttggtgcctaatctcgtcacgacgccctcccaggccttcggcgagggattcggaacatttgttccctatctcattctcatgattatctttgctggtgccaccttccttccgatggttcttcagcagttgaaaaccgaaaacacccagcagaaaaatcagacgctcatgatgggcgcgatcatgtctcttatgatgctttggatttcctggggttcgccggcgggcgtgttgctgttctggggcgcatcctcccttatcggtatcggtcagaatcagttgacgcttgcgcgatgccgtgctgctgatcggcgtaaagaggaggaagaagctctcgttgtcaagccgatagaggttaacgtcacgcgcaaagagaagaagaagcgtcccaagaaaaagcgctagaccttactgattttagggagtgtttcacatgaaacactccctttgtacgttccgcggcatcatttcaaccgcggtgtttaaggttaggagcctgtaatgactgaagagttcgaggacatgattgaagaggtagaagacgaggtggtggaggattctcagtcttctgcagaccccattaataccgaagaagttgttgaagaggacgagcttatcgtgacggacgagatgctcgatactattgccgacactgctatcgcggcgctccaagatattctccagtatttcaatgtcggcgaagtgactattgatgaatacgagggcgacgagggcgaactgattcttgatatcagcggcaaagatatggctgtccttattggtcgccatgggaaaactcttgacgcgctgcaattcattatgtcgatgataacggtacgtaccattggcttccgttatccggttattgtcgatgttgagggctacaagaaccgccagcgccagaaactcgagtcgattgcgcacagctctgctaatcgtgctgcttctcagcaccgcaaagttggattgcgcccgatgactccttatgagcgccggattatccacattgccttgagagacgatgatcgcgtcgagactgtttctgaaggagagggcccttcccgtcatgtagtcgtggttcctctgtaaaaactgttcggatacttttaacgtgctgatgggacgcgcaaagcacgtcccatttcctttattatggacacgttcgcctatgggaaggagttgagatggcagaagatcagacgatgagcttgatgcaacgctatcttgattcaatccttgaagcaaataaggtcacgaatcttactcgcattactgatggggagcaagcgcgccttcttcatatagaggattcgctggtaggtttgccagaggtcaatgaagctcctactggtctctatggagaccttggctcgggaggtggcttccctggagttcctcttgcgcttgcaacaggaagaaagacacttctcgttgactcggtgaagaagaaaatggctattgttcaatctgccctcgatgatctttcgttgagtgagcagatttctacatcaagcgagcgcatcgaggatcttcctctggagtacaaggagaaatttgctgtcctcacagcacgagctctgtctaagctcgtttctcttatagagcttgcttcgccccttttgaaaaaaggcggtcgcttagtgtgctataaggcccagctatcatcagaggagcttgaggaagcgcttgctgtgcaagaccttgttggtatgaaaatgatctctcagcgtgagatttgcttgagcgatggagagactacaagaacgattgtggtgtttgagaaaatcggcaagtcacgcatcaagctccctcgaagaattggcttggctcagaaacagccacttcgccctcgaagctgaatatagtatgtgatcgtgtttcacgtgaaacacgatcaatttgaatccttctgtcgaacatcgcctgaacaggcttgaggcgatgatatactgtgctccaatcaaggaaggaggttcctgtgggattctttgatggtcttaaacgagacacaaaacaagcccggactgtcgaagaggttgatcgacctcagactcaggaacaagaagtggtagtcgctgaagaggaattcgttgacgatcctgaaaatattgaagtggttgtcagggaggttgaggattacgcagctcctgtgattcctcaagaacctttgaagagctataaagacaaggcgccggtgcgtcatgttgtcggacagacgaagatcatcgccatcattaaccaaaaaggtggcgtagggaagtcgacaacggcaatcaaccttggagctgcactgggagagatgggcaaacaggtgcttcttgtcgatcttgaccctcagggaaattgctccagtggccttggcgttgagaagagtctcatacagcagtgtatctacgatgttctccttaatgatgttcctcttgaagaggtaattattcctgatatcgccgaggggttagacattgctcctgctacgattaatctcgcgggagcggaagttgagctggtctcggaaatggcgcgggagaatcgcctcaaggatgctgtgggcggtatgaggggcaaatatgatttcattctcatcgactgcccgccttctttgggtcttttaacagtcaatgctctcgtagcggccgataaattgcttattcctatccaatgcgagttctatgctttggaaggtgtgacaaaacttctcgaatcaatgaagcgtgtcaaatcccgccttaatcctactctggatatctacggcattcttcttactatgtacgatagccgtacaacgctctcgaagcaggttgtcgatgaagtgcgtgagtattttgggcgcttggtgtttgccacgcctattcctcgcacggttaaattgtcggaagctccgagttttgggcagccgattacccaatatgatcccaagggaagaggcgctctttcctatattgaattagcgaaggaagtgattgctcgtggctaagcccgaacgtcgtggaggactcggtcgaggtctgggttccctcctccccggttcctatgaatcacctgcccctgtttcccctgcgcctgagcgccagagagtgacaattgaagtagatgaagaggcagcgcgagaggcccctgtttccacgtggcccgtacggacgatggttgagcttgaggaagaaccagtaaaggtctctgagcccattgtgcgagaagctattattgaggaatcaaggattgatgaggttcctgtacgggaaactgatgaggtggggattgatagaatcgctcctaatcccgatcagccgagaacccaatttaaaaaagaggaaatagaagaactcgctgcttctattgaaaaagatggtctgcttcaaccta

SEQ ID NO: 10598 - DNA, 7916 bp, Unknown
  gut microbiota DNA sequence
tgtcggaaccgcagcgtcaggacgttcattcggcaatggccgaatgaacgtcaagttgttggccatgggcgcagtagtcgtcttgggccaggatgtcgccgtcgtggtagtaggcggcgcgggcgcggcagccgccgcagccgtccttgtagtcgcacgtcccgcaggcgccggagtaggcctgggtgcgtaggcgctcgaacaccgggctcgtcttccaaatctcgtcgaagggctgctcccgcacgtcgccggcctcctcggtcatgtaggcgcaggggcgaacgatcccctcgctgcccacgacgcagtaggtgaggccggccagacagccgcgggtgaagcgcgtgtcgatgcccagctgcttggccacgcgggtgaactgcggcgcgcaggtgggcttcacgtcgatggacacctccgccgacttctccatgatctcgcgaaggagcgcctcgttttccagcacttccaagctcgtctcctggatgtactcgccgcggccgacggggatcaggaagaagatgtagtgggcctgcgcgccaatctgttcggcgaaatcggtgatggcgcacacctcgtcgcggttccaatcgaccacggtggtgtgcagctggaagggcaggccggcgcgcttgcaggcctcgatgccggccagggtgagggcgtgggcgttcgggaggccgcggaacttgtcgtgcttggtggcatccaggctgtccaccgagatgcccatggcgcaggcgccggcgtccttcaggcggcaagccacctcgtcggtgatgagcgtgccgttgctgccgaacaccgggcgcaaaccgcgggaggccgcatgggccaccagctcgtagatgtcgggacgcaaaagcggctcgccaccagagaagatcatgatcttgaagcccgtccgggcgatctcgtcgatcatcttcttcgcttcatcggtggaaagctcgcgctcggtggcctcctcggcgtcctggtagcagtggacgcacttcaaattgcattggttcgtggtcatccacgatacgatcatgtcggggtctcctctcccacgcatggacgcggccgcaggtttggcagcaggcttgccgcagggccgacggcgggtttgccgcagactcggccgcaacgtggctccaaggatacccagagcgcttttcgtgggaatcgcccgaacgggttaggttgggaatgagagggccatcacagccagaagcggggaaacgccgtgcaacctattcgcccaactccagagcaaaagcgcgacccgcatcggtgaaaaggcgctcgcgggcgtcgtcggcaccgagacgcgcccagggggcgtctcgcgtgatagcggccaggtcggcggcggtatagaggaagacgtcgtcgagggaggcgatgcggcgatcgacgagcgagccgtccgcactggcatcgacgagcagcatcggacggccccgacgcaggcggacgacgcccttcatgagccgacgatcgagcgcggcgccttccacggcgctttccgccaagacgatgtcggcatcgacgagcagtgccgaaagcagctgagggtcggccatggccgcgtcgaacgcgcgggcggcggcgccatgctcctcgttgccgagcaactggaagcgttctacaccagcacttaggaacgcaccggcgagggccagcgagaaatcgcccgggccggcaacgagcacgcatcggcgctcaaggtggccgaacacgcgccgggccagctccacggccgtctcggccagcgccgccgtcgaagcggaggtgtcggccgccgacagagcgctcgacagacgggagaccgccgcagcgagcagggtcaggtcgtcgcccaacgtgcccgcctgccgcgcctccgacagggcgcgcgcccagcatgcggacagcgcatccgacgagcccggcgcaccgagagccccacggcctgccggctgcgacagatcccccgcagcaagcgagtcgccttcccgaagaagcgacgcccccgcctggggctcccgggcgaattcgtccaagccgcacaaggcggcgaacaggtgggaagccgcatcgattccctcggcgaaatagagcgcgccggccacttccccatcggccacggcaccgaaaagcccggcggcgatatcgtaggcgtcgcacccctcctctgccaccgcgtacagctccacgcgcgcgccactcgccacgatgagcccctcggagaggctccggtgggccgacacctcggccagaagcgcgcgccgagaagctccgtcggcgagacgctggcttatcggcgagaagacggcgcgacgcgggttcacgcccgcaacgaacagacccatggccctaccccgccgacaccgcaatgagcagcaccgccgccgcaaggccggcgatggcgagggcatcgcgggcccgcgccgacgcagcccagggcgcgaggaacgacagggcgcagaacaccgaccagatggccgtcgtcgccagggaaagggccacgcgcggcaccagatagcccaggttgccctcggtgcctatttgggccatggccgcatagagcgccaccaggtgcgtgaacccgatgagcatggcggcgatgagcaccgcgaggcccaccagccccgccaagcgcgagatgagggcgagcgtgtccagcgctggcgtgttcagctcgagcaccttggcgctgcgggccgccatgagacggcgctggtaccaatcgagcgccgccgatatagccgaagtggcgaaacaggccagggcgacgaacacgagcacgatatggggcacgaggagcggccagtggtagaaggccatgttgtccgcgcccgcgggatcgaggatgcgcagccactgggacaccaggatgagcagcgccaccaccggcgcggcgacagtggagaaggcgagcccgcgacgggtgacgagcagccccgccgccgtcaccacggcgagcacccacgaggccagcatgacgatgttggggccggacagaagcgtgccttccgtgctcaccgattccatgccgatgaccgcggaatgcgccgccacggcaaccaggtagacgcccttggccgcccgcgcggcccgacggtgatcgcgcctgaggccgaacgctcccaaggcgctcgccgcgccgtagagcaggatgcagagtatttcgaagacgaacaaggtcacaagcgcgctttcctccccgcgagagagtcccagtttacccgaggccgcctcccccgccatcccccgttcgggctaatcagcggcgacgaagcaggccagtctcaaagccgtaggcgacgagcgccgcgcggttcgcgcgaccgcacttcgtggtcatatgggacaggtgcgccttcaccgtctgctcggagagggagagccgcccggcgatctccttgttcgagagaccgccggcaatgtagtagaggatctgctgctcgcgcaaggtgaacgcggaggcagggtcggcgacgaagatcatcgagcgtccttcgaaccgcgcccttaggcgaagtcgtacaggtccttggcggcttcctggaagtccgcgtaggcctcggctgcgatgacctcgtcgtcaaccagctcgaaagagcagggctgaccgtcctcgtcgacctcggtcacttccagcaccaccacctcgccggaagacgtggccggatgctcgtcgtccaccgggaagaagaacccgaacgagctctctcccttcagcacgagcccgaggaactccagttccacctgctcgcccttctcgtcgacgagcgtaatggtgatgccctcctcggtaggcggacaaaagttgggagccgaaccttcacgaaccataattactgcgcccttccgtggcggtgcttctttttcttgttgttcaccggcttgggcttggcggccgccgccaccgctgcggcatcgggtgcctcgccggtcgcttccttctgctcagctacgtaggcctcggcgcgcgcgttggcctcaaggcgcgccagcggcacctgggcgatgcccgtggaagccgagtggtcgaactcgaacaggcccacttccgtgccgtacttcttctgcagcttcgcgaacttcggctcgcgcgtcttccacaggcagtagagcgggcacgcgatggcgatggacgaatacgagccggcgataaggccgatggccatggcgaaggcgaagtccttcagcgtctcgccgccgaacagcagcatggcgaacaccgggatgaacgaggtgagcgtcgtgttgatggtgcggatgaacacctggttcatggagtggttggccatggtcatgaaggtgcagcggatgtcctcgcccttcatgttgtcgttgatgcggtggaacacgaccacggtgtcgtagagcgagtagccgaggatcgtgagcagcgcggcgatggtgttcgggttcacctcgcgacccacgagcgcgtagatgcccaccaccaggatgaggtcgtggaacagcgcgacaatggccatgacgcccatcttgtactcgaagcggatggcgatgtagacgatgatgagcaggatggacacgaggaaggcgatgagcgagctctggatgacgcttgcgccccagtccgggccgatggtggtcacttcgaagtcgctcgaggtcatgccgagcgcctcggccacctggttggcgtgggccgtggcgtcctcggccgaggtggtcgtggtgcgcacgaggaagccgggctcgccgccggtctcggtggtctggatgacggcgtcgggctcgccggcgtcgttgaaggcctcgcgcatctgctcggtggtgatgtcgccggtgccgtggaaggccaccgacgtgccgccaacgaactcgatgccgaagttcaggccgcggaagcccacgatggcaaggcaggccaccatggccacggcggccacggtgaggaacaccttgcggtagccgaggaagttgatgtcgcgcttgatgaagcggcccttgatcttgcgcacggcggtgacggcaaccgagcccggctcgccctcgccctcggcgatgacgcgggtctcggcggcgttcatctgggcgccggcctcggcctcggcctcaggcacgccctcggcagcggccagttcggcgtaacccttcgacgcgtcgatggagtccttgatgccccagaagccggggtgcctcgcgatgaccttcggcgccagcagacggatgagcggtgccttgaagatgagcatcatggcgatgtcgcagatgatgcccaaagccagcgtcatgccgaagcccttgacggaggcggcggccaggaagaacaggcacagcgctgacaccatggtcacgaggtcggcgtcgatggaggtgaagatggcgtgcttcacgccggtgatggaggccgccttcaccgagcggcccatgcggatctcctcgcggaagcgctccaccgtgaggatggaggagtccgccgccataccgatggtcagcacgatgccggcgatgcccgccaaagagaggctaaacaggtggaaggcggaaagggccgccaggatgccgaggtagagcacggcgaacacgcccatggccgcggcggtgatgatgccgagccccttgtagaagaacagcaggtacagcatgacaagcgccaggccgataagggccacgatgacgccggagacgagcgcatcctggcccaaggtggggccgacgacctgggactgggcgtactcgaaggacaccggcagcgagccggactccaggatggtctgcagcgccttggcgtcttccaaagagtactggccggtgatggacacctcgccgttggggatttcggactgcacggccggggcggactgcacctcgccgtccaagatgatgacgatcttgccgtggtcggccaccagatcgcgcgaggcgtcggcaaaggccttggcgccctgggagttcaacgtgatgttcacgctgtagtaggtgctgccctcgctctcgcggccgatggtgacgttggtgatgtcggcgccggtgacgatgggcgtgtaggtgcccggctccacggccatgtgctgcacctggccagaggggaaggcgttgccgaactcgtcggtcaccgtgccctcgccggaggtctggccggagtcgatggcgttgcgggtgtcctcgtcggtgaacgagtcaagccgggcgaactccagcgagccggtgcgcccgatggtggcgagcgcctcctccgtgtcggccaggccggggatctgcacgagaatctggtcggagccctgctcctgcaccgtggcctccgaggcgcccagcgcgttcacgcggctctcgatgatggcgcgggacttctccatgtcctcgggggtgaccggcgcaccgtccgtggacttcgccgtgagcaccaccgacaggccgccctggatatccaggccctggttgatcttctcgttgggcggggtgaacagcaccaccgacacgacgatgagcagagtggtgaggatgagcagccacacgttgcggcgatccgccgtacgggccggcttcttcttgacgttgcgttccaatgccatgggatgcgaccttcttctttcgcgttcctagtttcccgcgcgttccttagtcccgtgcgttccttttctcttgcgcgaagagcgccccagcctcccccgaagcggcgcttttgcgttaacttgcctattgtgccataaatgaaccgaaggtcaaagccctattccgacatcgcaacaacttatgcggcataatcggaagcgccttggaagcctcgagggggcctcaacgccacaacgctcctccaatcggcggcgagcctccgctgagcgggcgcgccctatctcgcgcccaaaagcgccacgagctcgcggcggttcgcgacgccgcacttctcgtagatgtggctcatgtgggccttgaaggtgccctcggcgatgaacagctcctgcatgatggccgggccgttcttgccctgggccaccagcgccagaatctcggtttcccgcggggtgaggcgggcatgctcggccagctcggccgcccgctcgtcgcgccgcagctcttccggggtcttctccacgaggccgcccgcatccaggatgcgcacgccccagcggctcgccagctccttctcggacagcaggatgagcgtggccgccagcatcatggccaccaccgcaaccgcgatgaccgcgtcctgggcgccggcgttcatgccggccgcggccatggcctcggcgacccccttgccccagatgacgaacacctgctcggcgcctttgatggcggcgaagatgacgaccgtgaccccgaggcgcttcgagatgtcgtacagaagcagcgccacgataatgcccacgagcgagtagctcatggagatgagatagctggacgccgccgtgccgaagacgccctcgacaggcacaagcagaaagccgcacacgatgagcacgagcggcgagcggtacagcgtcccgatgttgaagcggttcgagaagaagtaggcgctcgcgaacagcaccgccatgacgatggccgtcgagaccgacgagtgcatgccggcgccggcggccagctggtgctggcgcagcccgtaggcgaaggagtacagggccagaagcacgaagatcttccacgggtaggtgaacttcggaatgaccggcgaggggcgatcggcgacgggcagcgccgagaaggcccggcgcaggcagagcagcgccaccggcggcaggatcaccaaagcgcaggccacgcgcaaatcgtccaggccgtcgcagaagaacacgcagacgacggccaccagctgggaggccgtcgtgtacaggaaaatgcggatgagcgagatgcagcttaagacctcggcccaaagaagcaggaagaggccgaagcccgcacctcccgccgccgcgcccgcggccacaagggcaatggccgcgggccctccgacc

SEQ ID NO: 10599 - DNA, 1545 bp, Unknown
  gut microbiota DNA sequence
tgtggtcttgggcgtggggcttcttaatggctctgtgcagctggatgtgcttttcggcaacctcgcggggagcgcatgcgctggttccgccgcggcgtcttctgaggtggccttcctgtcggcgctcatctgcctcgtggctctcgttggcattgcggcgccccagcgcgaaccgattgaagtgcggccgatggctgcggcgggctcggatgcgcttgagcactcgctcatggtggggtgcgaggttctgcaggagagattcggcctgtccgatcgcgagacggaaatctcctttcttttggctcgcggttacaatcgcccctatatccgcgaaaagctgttcatctccaagaacacggtggcaacgcatatcaggcacatctatggaaaactcgacattcactcgaaagaggagcttatcgacctagttaccgaggcggcaaggaagtaaaagctcgggattgtccccttccccgagtgctctgcgcgaggagactcgctgtagggggaatttgatacttttcactcacaatggactattggggttcgcccgcgataaacctatgctcggaatatctgccggtttccgagggggcaagagggcgggctatgaatttggatacgagtttccgcggcgggcgcgtgccgtcgctcggcattgcgggcgcggcgctatggatcgcgtggatcacgcttatttacagcaccgacctctcgctgggcgagggaggggcatcgcaacagtcgactgcgagcgcctttctgtactcgacatcggctttgggggtgacgctcatgatactgagctttgctccctcctgggcgcgacggcatctgctcgcacggcgccccctgacgttgtcgtcttgcattgcggcagccatgactctggtggtgctcaacggctcggcggtgcccctgccggtgttcgccgtttgcgcggcgctgaccgggtgcatgacagcccttctgggcctgcgattggccatcgtgttctccgaagtggagagcagggggatgctcatgggcatgggcgcggccttgcttttgggcgtgctcatttacgcgttcgccacgatgttgctgctctgcgggcttatggtcgtggcggccatgattctcgtgctgttggtgcctctggcggtattcttcctgacccttgaaagcgacgatgcctcctcggctttcaatgaggagacgggggagggggaaacggagggatccttccgccctctgtcggcgacgcttgtgcgtctggctgtgttcgccgcgatgtcgctctttctgctgagcctcacgcgggggtattatccctacttgattgagccgagcgcctttaccgtgtcccgctgcgtggtggctctgggtctggtgcttgtggcggtggcggttatggtggctgcttgggtgtctccgcgggatgcggccttcggcgagctgtgctactggctgctcatcgcgtcggtgctcgtggtgctggtgctggccttgctgaaggtgaacgcaacggtgatgggcgatgtctcctcggtgctgttcggcttg

SEQ ID NO: 10600 - DNA, 6219 bp, Unknown
  gut microbiota DNA sequence
gaacgagcaaagtggtggctgctagtgcatgccatggggcattagctcagctgggagagcgcgggctttgcaagcctgaggtcaggggttcgatccccctatgctccaccaatcacctaacgaccgccttttccggcggtcgtttttcattgacgcaccatttcactcatatgccgttcatttttcatggtcaataccatgtcaataagctgtcatcttctcgaaaactctgacaaattcacatttatatatatgataggggcgataacgcatctcctgatgccagtcggttcatttaaagaagaatagacgcctagacaacaaaaatctctcggcgctacaataaatgactacgaacatcagggatgaactgcggaagcggtattttcgcagagagaagggaagggcaggattcgtctcctgccgaagcagaggaacggtgaactatgaaagcaatggctcaaggctttccatacgagttctcgaaggcgaagaaggtcgtcgcatcagttgtcgcggcggctcttgtcatctcgttcggcaacttcgccttaggcggtggcaaggccatcgccgacgacggcaccgttgaggttcgcttcaatataacggcgcccggggcgacggtgaccctgtctacgggcgagaaattcactgccgagtccgacgacaacctttatcaggcgcccacggatgcagacctttccttcacggcggtctccgacgacggtgccgagctgaaggtgacccatgatgcccccgagcctgtcgagccgcaggttcaaaccatgggaagcaagcagccgtccggtaaccttgttatcggagagccgtcctctagggacggctctgaagacaattccaatgcaaacgaggaagccgcgcccgaacccgaggctgaggctgctagcgaggaagatgcccccgtcgagttgagccctgtggtgcgctcttcctctgaagatgagcccatcgcctccactgcggaaattttcaagcagaaggctgcatctggtgaagagcccgttatcgtggggcaggaagatgagtctgcggtccaggccgaggttatggaagatgaggccgttcccatggccgccactcctctggccgccaccggcgccgacgaagctgtcgtggaaacggtggtgactcccgacgacgagggcaactacatcattcccgctgccgctcttgccgcggccgccgcgcaggatgccgtcatcgtggtgaccatcgccgcagccaacgatgagggaaccatcggcagctgggacgagcttaccgctgctcttaccggcgatgagactgaggccaagctgaacaaggacatcgtggcctcctcagatgctattaccgtcgcgggcaccaagaccctcgatctgaacggccatgacatcacggcccagaccatggacaacctcttcgtggttcccgagggtgcctcctttaccattactgatacgagcgaaaaggccgtcgctaaggatgttgccatcgacgatcccgagttcgacggcaagaagattccctctccggctgatgatttggacggcttcaagaagatggtcggtaagaaggctgtctacgagcccaattaccgcacgcttcagtactacgtcactaagtcctacaccaatcgtcccgtgaagggccaaaccgaggagtacctctacgagcacatgatcgacctgtccgcggccggcgccattgaggtcgcccagggcaagacgctcgtgcaggtgaacggcggcacgctgaacgtgcagggcggccgtcttaccctgatcgagggcgagcacgccattgccatggacggcggcacgctgaccgttgaccagaacggcttcctgacggggtcgaagggtatcgacggcgcggccatcaacgcccagaaggcaaccatcatcatcgacggcaacgccgttatcgccggcaacatggtagccgatgacaacaatggcggtgtcatctggatcgacaagtccgaccttaccattcagggcaaagctcttctcgctgccaaccaggctggcgaaaaggtgtttgccgacacgaccccgggcgatatggccggggtgagcaacggcggggccatctacgtcaacgcggaatcgaacgtgactatcgctggagagagcgtgctggcaggcaacgtggccaatgccgacggcggtgccgtgtacgtgcaggggcgtctgaagagcaatttcaatcagaagaagagcgtgctcacggtgaaggacaacgccgtcatcaccaacaaccgctccgagaacgacaaatccgctatccatccccaggtacgtcccgacactaataaggacgtgaactggaagcagttcggcggaggcggtggcggcatcctgtccaaggacgagaccgttatcgacggtgcccagttaacgggcaactacgcctctgacggcgtcggcgcgcttttgatcacgggtcacggcgtttataccggcgctttcaagcagtacgtctacccgttgttgaagatggagacgggtgttgttgcctccaactacgccggcacgagcgagggcggcggtatttgcgctaccaccgacaagagcagctacatcagctccggctatctgacgaacaacgtgacggataccgacttcgactacggcggaggcggcctgttcctcccgtctgccacccacggcaaagagactggtgtcaccgtacgttatccgctggtgaccggcaacacggcccgcggcttcggcggcggcgtgggtgtgtgcaccaacggcgtggtggtcacttccgatgcggctatcttcgacaacacggccctgcagaaaaatgccacgactaatcccaacgagtacggcgaccaatgggccttcgacttcgagacctacgggcttaaaattgaggacaacgcctccgacgatttcttctgcgccaaggagagcacggtattcaacgccatgctcggcggcggctaccatcgttggaccggctataccaacggtactatcacctacgttcccgatcgggagtacaagggaacactgagcgcatggcgtgatcgcggatgggaaaacggtgtgaatcgcacggaaactggtctcactcttgatgggaaggatctgggcaaggtaactaacgtactgttcgatccccaaacgaaagaagctgagatttatattcctgcacttcatgcgggtaatggcgatttcaaagactactacgttaccattgaggtaaagaaaaaagtgaatgacacttaccccaagggaaaatggtctggtaaagtggagagttgtcgggagggctctaacagcactgcagaattcaagaactacttccttaagctcgacacttcggcgaaggcccctggcactcaggagcttgttcccttcgatggggatccccagaagctcgtggcttccacgcgtaccgagagcgagcaggaatatctcatttaccacgtgaccgaccccgacaagttccccaaatacgagaacgccatgctgaaggccaatcggttcacggctttgaaggcgaaccctattcccggctacaaggagaaggccatcggcaaagcggtgctgttcgttactggcaactactccaacaccaatggcggcggcatggcctgtaacgaccgcatcgtcgtcggccgcgaccccgagattcccgataatcccgacgagtccaaccccgaggagccgaagaatcacacggcggcgctgacgcttaccaagagcctcgacaagttcgatgctgccagcggttctgctacggcggtgttcaacgtaaccggctacatcgacaagatctccgccgagaagaaggtgaaggatctcatggtgtacgccaacactatcgggttcacgttcaacgcagccacgggtgagcagtccttgaccgagcagttgacgaacctgcccgagggctactacgtcatcgaggaggcgttctacagcggcgacgggttcgagaccaaggccaaccgctgggccggttgggtgaagttcgaccctgccgagaattccaccgacgaggtgccggtcaccgcccccgtggaagtatccttcgagaacacgttcgacgatgaggacaagaatttcggcacgggcgtcgtgaacaagtacgccgatgagaacggtacgctcacctgggcgcccgatagaaactacaacgcgcgtcaacaggtgttggaagaggggaggtagtcatggcgcagcgtcatttcccgaagcgtcttgccgtcgcgttgtcgctgaccttggtggtttccctgggtttggccgccggtacggcgtgggcctactacaccgataccaacaaggccaacggcatgatccagttcagctatgatcccgaaccgccgaagaacgaggtcaaggaagacaaggacaacctggacaaggtcattaccgtgaaaaacaccggcgaagtggacgccatggtgcgcgtgaaggtgttcgctcccgtcattgacggcctcgcggtcacggagaacgccggcgcggcccctgactacgcccaggtggaaagcaacggctggacgcagaaggtgaacaacaacggcgagggctggtggtactacaccgagcccgttgcccccggcgattcaaccgagccgctccgcgtgcacgtagaggtggataccgagaaggtcacccatcccttcgacatcaccgtggtgcagcagtgcgccggcgcgaagctcttcgatccggcgaagcccttcctgggcaccttcgccgatggggacaagtacaaggaggctgagtaacctatgcagcgtctatttaagaacctctcgctgccgagtcgcatcgcgctcattgtgtgcgcggcggcgctggtcggctgccttgtcatgatggccgtcaccccggcccgctcggccctcgtctaccagagcaacgagtacgaggccgagattcagcagacccacatcggtgtggcccttaccgaaaacggcaaggaagtcagcggcgataacgacttgctgaaggaccaggtctacctgcttggcggcgacgacacgctgaagccgggcaagacctatcccgaagccctggctgtgaagaacatctcctccgacatggacgagtacgtgcgtcttaccgtgcgcaagtactgggccattggcgagaagcaggacgcccagggcaacgatgcccgcgtcaagtcggccctacgcgatccctccttcatcgagctggaattcgacgagaacagcacgggctcgtgggtgtactcggaggaggagagcacgcccgagcgcttggtgttctattacaaggacgtgctgaaggcgggccattcctccgagccggcggtgacgggcatccgcgtcagcgagcagatcaccaagaacgtgaaggaggattactcgaagtgctggctggccatttcggctcaggtagattccgtgcaggtgaacaacgcggccgatgcggcgaagagcgcctggggcgtggatatcgccgatctggggctcgattggtcggcgggcatgaccgacgagcccacgccggccggggaatagcggggaggcctcatgaacacgctgacgaacaagcgcacaggagcctgcgggctggccatgctgctggccttgacgctgtgcgcggctttgggggtcgtggcagtctcggccacgccggccctcgccaagacctacaacgagaagtggacggtggagttcaccggcgacaagatggtcgacgagggcacggccaacatcaccaagaccctctccggcatgcagcccggcgattccgcctgcttcaccattcagctgaaggaagggccccagggcaacgccgactggtacatgcgcaacaaggtgctctccaccatggaggattccttcgccaacgccaacgagcgttccggcggatcctgcagctacaagctgacctaccgcaaccccaagggcgaggacaaaatcatcctcaccaacgaggtggtctccggcgataagggcaccggcgagaccaagggcctgttcgacgccaccgacgcgacgggcgagtggttcttcctggaggatctggccccgaacgccacggcgtggatgatgctcgaggtgtccatcgacggcgagacccacggcaacacctatttcgacaccgacgcctcggttcagctggccttcgcggccgagcccaccgaggagccgggcacgccgggcaaccccgagcagccggatcccggcgaccccaagcaggatccccc

SEQ ID NO: 10601 - DNA, 6156 bp, Unknown
  gut microbiota DNA sequence
cggcgacatgctgcccatcggcattatcgtggccgtggccgtcatcgccgccggcgtggtgatcgtcgccgccgtgcgcagccgcaagaaggatcatgaggaggacgacgcccgatgaagaacttgaagaccttgggccgccgtgccgcggcggtaacctgcgccgcgcttctggcgacgtccctcatggctccggcggccttcgccgaccctgcggcaagcgagagctcgggcctggccgctgcctataagggcaccacctaccgcgtgaccgtctacagcggcaaccagggcaccttcgccgacggcgagacccaggtggtgttcgaagaccagaagcccggcgatacgttctcgttcgagggcatcacccttgaggtgcccgagagcagcaagtactacgccaagggtgtgcgcctggccgcgctggacaacgtgcggtccgacaagaaccgcgatggcaagaacatcgccggcaccgagacgcacctgtacgccaacgtcgctgccgacgggaagctcgtgggtagcgctcccataaccgaggacaccgacttcgtcgtggcctatggcattctcgccaaccgcgtggcctacaccgttacctataccgacaccgaaggcaaccagctggccgagccccagaccttcttcggcgatatcggcgacgtgcccgccacggccccggcttacatcgaaggctacgtgcccgacgccgcgctgctgacgaagaccctcgtggccgacgagtcccagaacgtgtttcccttcgtgtacacgaagctggcctcggggcagaccaccgagcaggatcccaacaccggcgatgtgaccatcaacacgccgaacggccccacaggcccgatctacaacccgaatacgggcctgccgaccatcaccttcccgaatctcggcggtactgaccaaggcggcaccacgactaccacgaccggcggcgccacgggcgcaggcacgggtgccggtgctggaaccaccgctcccgccgccgccgccgatgcgggtgctgcggccacgggcgcggccgtgcccctggtaaccgcggacggcaccgaagtggtcgacgagaacggcaacccgctggctgagccccgcgaggagagtctcgacgacaacgagactccccaggccgccggcgccgcccagcagcccggcgatgttgccccggcgctcaacaccgattggattccgtgggccattgccgctgcggttatcgccgccatcatggtggccatcattatcgtcaacgtgcgcaagaagaaggaagaggccgaaaccctgtaaggccccggctcatgttccccctgtcggccttccgctgccgcccctcccaacaggcagcggaaggctgctttgcgcagggcccccgtcaggcgttgatcggcggagttgcccgttccgacccacaggaacgccggcacgtggtacattgaactcatgtcaaaagacccccggaacatagcggagccacccgcatcggccgcaggatcggccgcgatgaccgatgctttttcccgggcggtcgaacggcgcctggcgcggatgcgcgtcatcgcgcggctgtgcacggcggtgggagctcttatgctcgtggcgctgggagttgtggggctgggcgcctcagtggtgccgcgcgttatggggatgcagtcctacgccatcatttccggctccatggaacccgcttatcccacgggcagcctggtgtacgccgagccggccgagggcgccgcgctgcaggcgggcgacgtggccgcgttctggcgcgaccaggacgtcattgtgcaccgcgtgcgggagaacgtctccgccgagggcgagcttgtcaccaagggtgacgccaacgacgaggtggacattcgccccgttccctaccagaacgtgctcggccgcgtggtgttttcggtgccctatgtgggctacttcctcatagccttagggtcgacgcccggcaagttgctgctcggctggatcgtgctcatgggcgtcgccttctgcgtggtgggctctgtcctcagctccctcgccgaccgccaccaaaacgaaagctagtgcccccacgcggatgacaatcaacccagcccactcactcttcgttattttgtacctgaaactctcgtttttttgcttgtaaaacctcgttattttgaatatcatcggtctaagtattcgaaaggggctgttcagcaatgggacaattacttgcgtctggcacttatcgtcctcgtattgccgatgcgcaaattgaacgctatctgcgccttttcggcgctgttgagatatcgggcacaaagtggtgcggcaaaacgtgggccgctatggcccatggcgaaagcatcacctacgtcgatcgcggcgcgaacctgcaaatcgtgcaggccgatcccgcttacgctcttgcgggagagcatccgcatgtcatcgacgaatggcagcgcgtgccgcaagtgtgggacaccgttcgtcacgctgtggacgatgcagctggaacgaagggcctctggatcctcactgggtcatcgactccattaaatccaggcgagcgttcccatagtggggccggccgcatcgggcgtattcgaatgagccctatgacgctttcggagacgggcgagtccggggcatctgtcagcctcgcggcccttttcgaaggagagttcgccgcgagtcagtgccccgatggccttgtcggcctctctgagcttgcgtgccgcggcggatggcccgaggcgactttcctttcggccgacgatgcgcagactatcgtgcgggaatacttaggtctcgttttcgaagagagcgttccccggttcggtggcgacggccttacggcaagaaggcttgctgcgtcgctcgcccgcaatctcggtcagtcccccacggcgaagacgctagccgccgacgtgtttgcgctgccgcaggacgccaaggcgacggagactcagctcaaggacatgtatcgccatctcgaaatcctgaaaaacatctaccttgtcgatgagatacccggctgggttccggcagcccgctctccgctgcgcatgcgcacaaagcccaagctctattttgcggatccctcccttgccgttggtcttttgggcggcaactcctcgtcccttcttcaggattggcaaacgttcggtcttgttttcgagaaccttgtcatgcgcgatctgggggtctacgcgcgcgcattgccgaatgtgagcgaccagccgctcaagtactatcgggatgatgccggcctggaggtcgatgccatcattgagcgagccgacggcagctgggcggcaatcgaagtcaagctcagtcaagaaaaggtggaggccggggcgaagagcctgttgcgattgcgcagcaaactcctgaaggacgagctctcccgcacgcctgcgccagtgttcatggctgttataaccggaatgggcgaggccccctatcgtcgtcccgacggcatctacgtaatcccaatccgatctctggccgcgtgacggcaatcaactgctcctcttcaggaaccgagatctgatgcccgtcacgccaagattgggcgtttggcacccatctgccaagatcggggatttggtaccccgaattcgttttgggcttcgagttatggcgaatctcgaggtttggtaccccgatttctgccaacttcggtgatttggttccccggcctcggagaaacgcctggtcgcgatttgcccgggcggcttttgcgggtaccaaacctcgagatttgcccgacgacgggtaccaaacttgagatctcgccacgaaaaggaaccaaaccgcgtgatcctgccgcgaaaacggctctccggggtaccaaacctcccaagttggctgaggccaggcaaccagcttggcaaaaagcccgcgctaaacctctaatcttgcaaaaactgaacatatcatatcttacaatcttgcaaaaacgtaactaattgccttatactgctttgcaaaaaccgcattattgcagatagaagaagacttatgttcaaaagaaaagcctatgaaaagctgcttagatggaagcgcgactatagcaacgggtatgcggccttgttggagggcccgcggcgcgtgggaaagagcactatcgccaagcatttcgcggaggaggagtacgattccagcatcataatcgatttcgcgaacatcacgagcgatatgctggctgtgttcgacgatgtggcgaatctagatctgttctttcttcgactgcaagcgcagaccggtataacgctcataccgggaaagtcggttatcgtgttcgatgaggtgcagcttgtgccgaaggttcgacaggcaatcaaatactttgtggctgacgggcgctatgactatattgaaaccggatcgctcatatccattaagaagaacgtgaaggggattgtcattccttctgaggagcacaggatcgcgattcatcccatggactacgaggagttctgctgggcgtgcgacaacggcaggttcggggtgcttgagcaacttgctgcacttggacaaccggctggaaacgccactaataggagcctcatgcgcgatttccgcatatatatggccgtgggaggcatgccacaggccgtcgaggcgtacaggaggggcgagaatttcgaagccatcgatcgtgtgaagcgtgaaattattgagctgtacaaggccgatttcaagaagatagacgcgagcggccgtacctcggctatcttcgacgccatcccggcccagttggcagccaagaaaaaccagtttcgcatctctgccgcaacgggaaagcgactgaccaccaaagacgaggagcggcttttcgatttgatcgactccaaaaccgtgcttccttgctacaacacgaccaatccgggcgtcgcgctgtcccagaccaaggacttcggctcctacaagctctaccttgcggatacgggtcttttcgtgactatgatgttcaacagcgaagatggcgcgaatgtcgacctctatcagaggcttctaggggatagcctgagcgctgacttggggtatctttacgaaaatgcggcggcacagatcatagcaagctgcggaagggacttgtacttccatagctggcggccgaaggggaagactcatgcttatgaggttgacttcctgctggcggacaaggtcaaagcgaaaatcgttgctatagaagtgaagtcctcgggagctaacagccataagtcgattgatgagtttgctgtcaagtattctaatgtcatatcccggtgcatactcttttcgcagaaggacgtgtcgcgcagaggggcgcttgagatggagcctttgtacctcgcgccggtgatcattggcggcatcgggagaagctagcggtggctatggcgtagcctctatgggcgctccgatacggcattgctctgacgggtcttgtaagggcttttctcttttaccgttcacccctggaaaaataccgctcgaatagggtttagagcgtttagggaacattttcgtcgttctttaccctgtcatttgcctaccaatttgtttgggtccctcttaagaaagttccgcgaaacccctggtcagagctttgaaattcgaagcaatttcataatcgttgactttaacgtcatttttgtcagtggacaaataagcccagatcaataaagtaaacttagccatcggtaacgcgcgggtgcgatttgggtgtcgaaacggctacgaaaaggcccgtttcgaacacgctcccgacagcttgtttacaagttgtcaacgaggaatcgcccgaagcaaaccgcttcagcccgaagcctccgatgacagcgaggaaaggttcgcccgatcctcggtaagtaggtttaaatgtccggtctccaagccggtatttaaaaaggtagtaggaaacggagtagaaggaaggtgcggagtatgcggaccatagcgcggttcatggacgcgagaaacaccgccgagggcaagttcctgtcagtcttgctgtcggtgcttctggtgttctcgttcctgaacgtgaccatgttcacggactacgccaacgccacggacgagaacgccccggaggcgaccgtcgaggagaaccagagcctcgacgccgtcgaccctgcggcggacgagtccgagggggatgcgcagcccgag

SEQ ID NO: 10602 - DNA, 5569 bp, Unknown
  gut microbiota DNA sequence
gatcgggaaaccgtgtatgccgatgctccggttgtcgaggagcaagaggcgatgcccttggccttcgacctcgccgcggctccgaaagctgccgcatctgacactggcgcgaagacgatgaaggtgggggagaccgccgagatctccggtgcggaatccaattggtatcacagctggaagacgagcgacagcagcgtcgtctctctgtccggcaccgacaagcaggaagtgaagctgtcggcgctcaaggagggcacggtcactcttactcatacatactggtactatggggagcaaaaagaaaccttcacagtgaccgtgagcggcgggggagaggccgcggcgggcaccacacgcgtctacgtgtacgtgaagctcgacggcgaggtcgacgtttccgactggacggcgaacaagagcggctggttcacggtcggctacatcgacgttccgggactggggtccgctgccgatacgctggggcagcagcgatactagcgtttgggccaccgacgcgcaatgggccctcgtgaccgcgctcgtctcggcgaacaccgtggtgaggcacaccgccaacagcgggatcgcgctcgactatgccgcgatcaagtggagcgggacgcatagcggcacccaggtcggtctcaaggccgtcccgggtggcgccgatgactacgcggtctctgggacaacgtggcacctcgacggttacctcactgttcgtcccgattacaacgtcaaggtcacctatagctactgcgagggcgatgcagagagcgaggatcgcccgcagctcccggagaacatcgacagcacggtcaaggcgggtgatccgttcagcgaggagtggaggacgatcgacgggtacgtcgccgtttgcgacgacggccgcttcaacgccgacaacccgatctccttcgatcgcatcgccggcaacaaggatatccatgtagtgttccatcgcgacgccaacggcaacggtattcccgattgcgaggagaagcactacacagttacctatgaacccggcgaacacggagaattcgagaaacagattaccaagaacatcttgtatggtatgccgacgcctaagtttgtaggggagaccacgggtgcggatggctgggagttcgacggctgggattccaccgtctccagcaccgtgacgggaaatgcaacgtacaccgccaaatggaagcagacgaagttcacggttacctacgacctggacggtggcctgatccctggtgatgacacgcaggtgcgatttgagtgtgctaaggacgcgattacgccgcagcctgcggctgttcccatcaagtggggtttcgcgttcactggctggtctcctgaggtcgcgtccacggtgacagccgatgttacctacaccgctcagtgggaggcgttcaaatatcatcttgaaatcgccgccgacacgactgattcagtctatgatggcaacgagcgcagcggtgctcttgcaagtttggagtccgtcgagggtattggatacgctgtcaaagtccaggcgaaagagaatgggaagatcttctacataaccggctatgagcccaagattgtaaagggcgatggctcctatggcacggcaaccgatgctggcatctacactgtggttcctgtgaaaacggaagccggcgtgaaggtctacgatgaaaatggtgatctttatctcgggaaacatccctatgagatcagcgtgcaagagggaacgcatgaaatcaagccccgcccgctgtccctcgcctccgccaccctcaccaaggcctacgacggcaaggcgctcgccaacgccaacgccgccgacgagggcgtgaccgcctcggcgcagctcaacgccaacgggctggccacggagtccggctgggtcaaggacgagggcgcgacctactccttcgacaactcccagaccctcgtgggcgagaaggccaacgccttcaccgtcaccgcgaaggagggcaccgacctcggcaactacgaaatcagcaagaccgagggcaagctcgtcgtaactcggaaatccatcgatgagacccccaacctcgatgatggcacggtcactccggttctggacgtgaactacgtggacagcgtcgtctacaacggccaggatcagacgccgaccatgatcgtcatcgaccgcgacaacaagaacacgctgacctccgccgactacacggtcgagttccagcgcgacggcgagatgaccggcgacctcaccaccgcaggcccgatcaccatcgtcatcaccggccggggtaactacgagggcgagatcacccgctccttcgagatcacccgccgccccgtgaccatcacggccggcgacgcctcgaaggtcttcgggacgagcgaccccgaccgcttcggcgcttccgtcgcctacgccgtgaacgacgggttcaagttccaatactccgtggcccgcgaggtcggggagaacatcggcgagtacgcgatcgttcccacgggcgcggctgagcaaggtaggaactacaccgtgacctatgtgtccggaatcttcacgatcactcctgctggctctaacgttgttgagaacgtcaacatcgccggcgccgacgggctgacgaaggtctacgacggcgctccggctacggtgactgcctcggctgcggtcgagggctccacgttcgagtactcccttgatgggcagacctggacggcgacggcccccagcttcaccaacgccggcacctaccccgtgtgggtgcgcgccaacgcagccaactacagcaccaccccggcggttcgcgtggccgtgactatcagccggcgccccgcagtgatcgtcgtcggcagctccgcgaaggtggccggtacggccgacccgatcttcactggtacggtgaccggcttggttaacgccaacgacctgggcgctgtgacctactaccgcgcgaacaccgcgcagggcgccgcgttctacaccggagttctgaatgcccgctacgtggccaacccgaactacacggtgacggttgtccccggtaacttcaccatcactccggctctggccccggtggtgtccacggccgccgtgacgccggcaactccggctacgcctgccacgccggcgcccgcaaccccggctcccgccccggcagccgcgaccccggctccggccgccgagcccatcgaggacgacgcccccgaggccgtgcccgctgacggtcgccaggccctgtaagagacagccgcgaggggggcggtcccgccgcccccctccgtgaaggaaaggagagactgagatgagaaagagcaactggatcgtcgcagcgatcgcggccgtcgcctgcggagtgctcctgtgggcctggttcgcgctgggcttcaaccacatggacgacccgctggacctggtcgtggccgccgtggtgggcggcatcgtgtgggccgagggcaagcgccgcgagaagatgcgcctggcctttatcggcgagggcgtcgtgtacaacccggaggccgggctcgtgatgcccgacgccggcgagagcgagctggcggcgctggagcgcacgctctccggcatggcgttccccgacgaggtggccgccctggacgagcggatgtcccccgccttccgctgggtggtgcgctcccgcaagttcgaccgcaacggcgaggtctgggagggcgaggtcgtcgccgcccacgacccggacgccgagccgcgcccgttctcgtcccgcgagaacctggccgccctgctggcggcgtagggcgcgagacctgcgggcccttcggggccgagacatagccaaccgagagggggccggcgctctgacgagcgtcggccccctccttcttatggaaaggtaccaaacatgctgatcgatgcaatttgcgataattggatgcagggcaaacgttcgaagttggattccatgcaggctggtaaggatgagaggcaagggcaaagcgaaaaggcacgtctcgtcagtttcttgatcgtggaagcgccgccgtctgtggaatgcaggtaacacggcctcgtcgccgttttcgggcgacattgccgatgctataatgcccttatcgtcggggtcgtttcggacttaggcccaagggagccgatcgcggctagcacgaagcacccgaccgatgcgccttccgtatcatcttaacctccagcttcccctttcccctctgcgccgtcaccaggtaggcggtgccccgatctcctttctcacgagggacttcttgttgcccgccttgtccgtccgcgtgatcgcatgcgtcggactcgttgagaactttcgggatgagcgcgaagtcgttcgggacgatggactgctggccgcgcctctcctcgtttgccccatgcttgcgcctgatgtggcggatgtcgctgtcggttatgaacacgcattcgagctgtccctcgatctcctcgcctatcgtgtcggctagtcgctgccctacatcgatggagatgttgacccttgcatcgctgcccttccaaacgctctccgcggtgccaaccaggagcgactcctcggggtaattgccacggtttatggaatcgcacatagatgaaaccccttcgttaatagtttgacggactgatgctgctctgcgaattgtatcctagatcggcctggtcttgccgagaaagagcaactggatcgtcgcagcgatcgcggacgtcgcctgcgggctgctttgtgggcctggttcgcgctgggctccgaccacgtggacgacccgctgggcctgatcgtcgcgatcgtgtggtggctcgccgtggccgccgtcgggcccttcggggcctacggatccgaggcataaccaacgactcgaggaaggcggcgctctgacggacgccgccttccttttctatgaaacaggaggcaatttcagcggaaagatgctgggatgaaaatatcgttttactaaaccaagggaagcagcaaaaacgcccgaggaaggtaaactgcgtaccgttcgggcgtttgctggcgcaatcataccacagattcaaagaatggttgtgacgcttccgtgtcggtcgacgagcaggaggcgccttatccccttgatggtcttcgcgcaccttctcagctccctctcgattgcggcgtccgggacttttctcatgcgcctcgagtcgaggacgacgcagggcgattggttgcgggctcgcttcacgttccgctcgatggccttgagcgaatctgacctcggcgacttcatctcccaggtgtcgccgtccatgaggatgtcggctactcgctcgccctgcttgtctggtcgatccacgaacactatgtcgtagccagcgagtgcgagggccttggccgtttccatctcgtgcggccatatattggattcagctccgaatgttatgttccctgtgcaacgtttcatacattaagattgtagcagcaagatagaaatacgtagctgtggaatgatcctatcttcattaatgcaaaaggcttcgtcttgtaggtttctcaaatgccatgccgacatggcgttccccgacgaggtggtcgccctggacgagcgggcgcgccccgcgttccgc

SEQ ID NO: 10603 - DNA, 903 bp, Unknown
  gut microbiota DNA sequence
gggcccccgtcaattcctttgagttttagccttgcggccgtactccccaggcgggacgcttaatgcgttggctgcggcacggggggatggtccccccacacctagcgtccatcgtttacggctgggactaccagggtatctaatcctgttcgctcccccagctttcgcgcctcagcgtcagtggcggcccagcaggctgccttcgccatcggtgttcttcccgatatctgcgcattccaccgctacaccgggaattccgcctgcctctaccgcactcgagccgcccagtccggaacccggcccgaggttgagccccgggattagaggttccgcttaggcggccgcctacgcgcgctttacgcccaatgaatccggataacgctcgccccctacgtattaccgcggctgctggcacgtagttagccggagcttcttctgcaggtaccgtctatgtcttccctgctgaaagcggtttacaacccgaaggccttcgtcccgcacgcggcgttgctgcgtcagggttccccccattgcgcaaaattccccactgctgcctcccgtaggagtctgggccgtatctcagtcccaatgtggccggtcgacctctcagtccggctacccatcgcgggcacggtgggccgttaccccgccgtctacctaatgggccgcgaccccatcccgcgccgtcaaggctttcccggggaggccatggggcctccccggagcatccggtattagccgccgtttccagcggttgtcccggagcgcggggcaggttggtcacgtgttactcacccgttcgccactctatacacggccgaagccgtcttaatcgttcgacttgcatgtgttaagcacgccgccagcgttcatcctgagccaggatcaaactctccgttcgaa

SEQ ID NO: 10604 - DNA, 403 bp, Unknown
  gut microbiota DNA sequence
cgcagcgggggcatgaacgccatcgagggcctcggctcggagttgagctgggacatgacggccgccatgtcggcggcctccaggtcgtcgaatgatatgccgcgccgcttgggcaggagcttccgcagctcgacgtggttgcgctcgcagccccccttctgctgggactggcgcacgtcgcagtagtagactctgcagcgggcccccttgcccggcaggcacgacctctccagggactcccagtccgagaactccgcgccgttgtcggtgaggaccagcccgaacatgcgctggaacgccctcttcccgacggccgcctccagcacgtcgagcgcggccgccaccgcgctcgacgacctctcgggcaaaagcaggcacagctgcgcgcggcagcagcgcaggt

SEQ ID NO: 10605 - DNA, 1886 bp, Unknown
  gut microbiota DNA sequence
gcaaatcgtctcccttcagagccggctgcacctcttcgaagcacttctccatttcgcggcgattcgtgaacagggtgagcatcgacccattctgggcacggtgagcgtcgatgagcaggcgctgcagagaaccgagataactcggatcattgggttcgggcatatcgttgacaacatagacaaccatctgattgtcgaagtcgtagcttgaggcaagcagcagctcgtcggcaacggaaaactcgctctcgttcagccccatggcctgggagaagctgttgaagctgccgtcaacggtcagcgtggccgacgcatagaccaccgaatgggtccgcgcatacaaggtctcgttcagcgtctcccccaccgatacgagcaaggcctccagcttgttctgcggacgatcggtcttgcgacttaagctcgccgcatacacatagcgctcgggacattgcgtgcagatgacttcgacgttctgaatgatctccttcatctccatcgcaatggaggcaatttcgcgctgaatgacggcggcgccttcaatgtcctccaaataacccacgagttcctggcaaaccgtcaccatcttctcggcgcgctcggccatggcgcgaccaagacgggcaatgttttggaagagagagccgtggcgaatctcgtcattcaaccaaagatccaccgtctcgtagcccttcgagcgcttattggtgtcatagaagaacaggtcgggcagcgccttgcagaacgcctgggccgcttcgccgaattcagcgcccgcacggcgcgccttccccgtgagcccatagaacagcgtcgtcgaggattcattgcccggcacgacaacggtgcgctccgcccgcacgaagacgttgcgccgagattcctcggaagctacgcggcgcgcgagggagagaatgtcttcctctgccaactcaagggaaaatgcgcgccgtgcctcgctttcggcgctgtgggcctcatccaccacccaatagcggatgggcgggagcaagcctccgtcggcggcaagatcgcagaacaggaggctatggttggtaacgacgatattggcggcctcggccttgcgacgcgaaccgtggacgaagcaggacgtgccgaagaacgggcatttgcgacgcaggcaatcgtggctcgtggtggtgatcatccagcgcggcagcgtgcggtagtcgatcttcaggccgtcaatgtcgtcgtaagccgtctgctcaatgaaggaaagcaaggcggcaagagccggagcctgaggtttttgctccttccccacgatgcgcatgccggggccttccacaacgaggcgctccaccttgtgcagacagggataatgggagaaccccttgagagcagcataggtgaggtcggcaccgagctcctccgaaagagcgggaagctcatgatagaccagttggtcgaggagagcgttcgtcttagtagctacgccgacattaataccgttatctcgggcaatgatggccgccggcaaaagataggccatggatttgcccacgcctgttcctgcctccaccataagattgcgcgatcgggcaaacgcattgcgcactgcctcggccatagccacttgctcgccgcgctgctcgtactcttcgtacagggaacctactacgccctcagcggtgaacgcttgggccacagcatcggccgtggggagcaagagagatcgccctggatcggcggcgatttcatcggcatccacgagcggtcttagatcggtttttcctacacgttcgcgacgcagggtgcgcagcgagaaaggaagcggtttctcctcgctcgtctcaaccgcgcgctcggcaaaatacttgaacaccacaaccgtcggccaatcgttcggttccgccatagag

SEQ ID NO: 10606 - DNA, 8604 bp, Unknown
  gut microbiota DNA sequence
actgggatccgctgaagcgcgtcatcgtcggccgctgcgacaactccgtcatcccgccggaggagcccgccacctctgagaaggtgcccgtcgattccgagatgcgcggcatgtggggcctccgtccgctggagaccgtcgagcgcggcaacgagtgcctcgagaacctcgtgaagatcctcgaggaccgcggcgtcgtcgtcgaccgcccgaccccgctgcagtggaaccaggccatcggcacgccggacttccgcaacgactccatgatgacctgcatgcctccgcgcgacatcctgctgaccatcggcaacgagatcatggccgccgccaattccttccgctgccgctacttcgagtacctggcctactggcccctcatggaggagtacttcgagcaggatcccgacttcaagtggacccaggccccccgtccccgcctgaccgaccgctcctacaagcacaactactacgacgagaagatcacccttgaggagcgcctggtgcgcaccgccaacaaggacttcgtgaccaccgaggtcgagccgatgtgggacgccgccgacgtgatgcgcatgggcaaggacctgttcatccagcacggcctgaccaccaaccgcgccgccatggactggttccagcgctactaccccgagtaccgcgtgcacgccgtgaacttccccggcgacccctacccgatccacatcgacgcgaccttcgtgccgctgcgcccgggcctgatcatcaacaacccgcaccgcccgctgcccgagccgcagcgcgccatcttcgaggccaacgactggcagatcgtcgaggccgcccagcccgcgcacaccgagccgccggcgctgtgctactcctccgtgtggctgtccatgaactgcctggtcctcgacccgaagaccgtcatcgtggaggcctccgaggtgcatcagcaggagcagatggacaagctgggcatgaacgtcatcccctgcgacctgcgcgacgcctacccgttcggcggcggcctgcactgctccaccgccgacgtctaccgcgagggcgagtgcctcgactacttcccgaaccgcgtcgaggatcccaccctcgtgcgccccgagatgtggaagtaagcacgacgtttatcgtgggctcccaggttcgaaaagcagcctgagagttagaatcgccgatcagcagctaagggcagctgcctgagaggcacaagttagaaaagaaaggggaacaggtttcaacgcaaaggcgcggcctgttccccttctttatttcacggaactagggcaagttccgtgtccggggcgcctctcttaagggcgaggggacgttccattcaacctatctcacctcagaggaaagaaaaaggagggattatggcacaggaaaacaccaacgccaccgagggctatcagatgaagaccgggtggggtaccattgccatgctcatctctgcaaccggcatgggcctcgtgcccctgttcagccgctgggccacgcgaacggatatgttcgatggcaccctgggcctgaacgccggtgactccatcggcgctctcatggcctgcggccgcatgggcatgggcgtgctgttcttcgttatcctgatggtcgccactcacaaggtgaagaccttcaaggaactcaagctcactcccgccatcgctctcggcggtttgatgattggtatgtccttggcatgctacgtgacgtccacgctgctcacgaccgttgccaatgccgtactgttcatctacaccggcccggtgatctgcgtgttggcggcccgcatcttccgcaaggagcccatgagcggcctgcagtggatctgcctgctcgtcgtgttcatcggcatgctgttcggcgagggcctgctcggcttcggcgtgggcggccagttcttcggcctcgacttcagcctcgagacctcgacgcccgagttcccgcagaagggcgtgggcgacgccttcggtctgctgtccggcctgttctacggcctgtcgatgttcttcaatggctatcgcaaggatgctgataccacggctcgcggcgtgtggaacttcatcttcgccgtgctgggcgctggcctcatcaccatcatcctgaactccctgggctctcagcccggcatggagaactgggcgctgtccgtgcacttcaccaccttcaactggatcggtgctgtgctcctgtggatcatctgcggtcctatcgctctgggcttcctcttggtggccggccgcaacctgccggctgctgactacggcaccatcgcctactgggaggtgcccgtggccatcttcgtgggtctggtcgtcttcggcgaggcgctgaccgtgaacaccatcatcggtggtttcatgatcatcgccggtggcgccatcccgtccgtcaagggcatggttgccgagcgcaaagcgaagcagcagcaggagatcgccgagaacctcaccgcccgcattgccgagcaagaggacatcgagggtctgtaagcagcgcgtcagaaatgactgccgtataggaagaggcttcttatgaagatgactaagaacctgacgcacatcgcctcgtcggtggagttcgagcccgcgatgaccgaggagcagctggaggctgtgttcgctcagaacggcgtggccggcttccccgcagagctcgacatcgccgagcgcaccgaggagcatgtgcagatggtgtcgctggagaagttcatcgccttcgccaaggcgtccgggctctccgccgtcacctacgacgtgacctatttcccccatgccgatgacgccgaggtggagtatcagctcaagcagctggcccgcgacctcgagatcagcgtggaggtgatccgcgacgtgtgcgccgacgagatcgccgagtacatcaagctcgatgccgagcgcgatgcctcgcttcccgtgcacagcatcgtggagtgctacaccggcggcactgcgttcgcttggtacggcatgaatccgtatccgcgtctgaagcgcgtggtgctcggcaagctggctgccggcggcaagaaggccgagaaggcgttcgtgctgcgtgccagcaaggcccaagttgactacatgggcgactactaggatgtaaccgaggccgtgcgaagcgttcgtgcggcctcggcgcattaagggcgcgcacggcccgaaccgtgcggtacgtgtgctggctggcacgaggtacaacctcccgaccccgggacgtgccggcttgcacgaagaaagggaggttcgcgtatctgtgagtcacggatgccgggcctccctcgtttctaaagggggtgtttcccgatgaggaaaacacaaagtaaaaaggggttcggaaaggatctgggtgatttccatggcgtctagcgaaacagcggctgcggttcagcgggacagcgaggagcacgcgacactgaggcgcgtggcagtctcctccttcctcgggaacttcatcgagtggttcgactacgcgtcttattcctactttgcgacggtcatcgcgctcgtgctcatgcctccgggcgacccgaccgtggcgctgctggagaccttcggcgtgttcgcgctgtccttcctcatgcgtcccgtgggcgccttcttctgggggcacatgggcgacaagaagggccgcaagtgggcgttggccacctccatcctcatgatgtcggcggccactttcgtgatcgggcttttgcccaccttcgaagccgtgggcattctggcgccgatcctgcttctgtgcctgcgcatggtgcagtcgttctccgcttccggcgagtacgccggtgcggccaccttcctggccgagtacgccccgtctaaccaccgcggcctgtactgctcgctcgtgcccgcctcgacggctacgggcctgctcatcggctcggcgctcgccacgttcatgttcatgacgtggggccacgactcgtccttcgtgaccgagtggggctggcgcattccgttccttctggcgggtccgctcggactcatcacgcactacatccgtacccgcgtgtccgactcgccggtgtaccaggagatgcaggagaagctggaggccaagggcgagtccgacgacaagcccatcaagcttctgctcaccaagcacctgcggcctttgctcgtgtccttcggcgcctgcatgctgaacgccgtgggcttctacgccgtgctcacctacctgcctaactacctgcaggacaccgtgggctacgacgccggttcctcgtcgctcatcacaacgatctgcctggtggcctacatcgcgttcatcttcctgtccggccgcatctccgacaaggtgggccgcaagaagatgctcatcatcgcctgcgtgggcttcatcatcttcacggtgcccgcgttctacctgctgaactcgcagaacttcgcgatcatcctgatcgtggagctcgtcatgtgccttctgctcaccatcaacgacggcacgctctcgagctacctgtccgagacgttccccactgaggtgcgctactccggcttcgcgctgtccttcaacttcgccaacgccatcttcggcggctcggcgtcgttcatctccatcgccctcatcgaggcgacgggcaacgccatcgcgccggcctggtacatggtggccatctccgtggtcgcgttcatcgccatgtgcatgactcacgacaactcgaagaagaagttgaccgagatccaatagtcgggaagtgacattttctgcggcagccgggcgatcggggagggtcgctcggctgtcgcttgcttgtgcacttgcaccatgaagcgaaactttgacagcgcttcaagtatttccagaaaataactttcatctggggtttcattgttgggcgttttctggtagagtcacgccaagtaatcaaaaaggaagcgagtctcccatggctaagccgttgtccaagcccaaatccctgaaagctcagatcacgcgaacctcgctggtgctggctgcggccgctctgcttcgcgagcgcggcccggaggccgtcacctatcgcaaggtggcagaatgggccggtgcggcctcgtcctcggtgggctactatttcgactccgtcaccgagcttctctacgaagcaggctgctacaacattgaactgtggatcgcccgtgccgagaaggtggctcaggccgccgatgccttcagccccgaggaatgccgcgagcgcgtggtcgaccttcttttagaggcgtgccttcccgacgacacggtatccacgcccgcccattacgctcagctcatcgcctcggccgaagcgccggtggttaccgaggcctaccgcaagggacgcgaggccctcgacgcggccgtgaaccgcattctcgttcgcgccggcgtgaaccttaccccctcggttgtcgtcgccctcgtcgacgggggagcggtgaaggcgatctcggagggctacgatgtgcgcgagattgcccgtatgctcttggagtctgttctcgaccggtagctctggcgctttcgcctatcgtttcaaagggaagacgcccgctctttcgaataaggagtgggcgtcttttttgctgcttcaatcggttacggggtgtactacaaatattgtgcgattacaaaagatgatagatatccatagttgacaagatgacgatgatttttcaggaaatcgaaaactttcttcggtaaaaggcttttgtgcaactgcaagaaatgctatagtgcagctagtctcaaaagagacggaagagtgcctatgagataggagcacatgttatggcaaagatcgtcagctcttggaacgactgggatccgctgaagcgcgtcatcgtcggccgctgcgacaactccgtcatcccgccggaggagcccgccacctctgagaaggtgccggttgactccgagatgcgcggcatgtggggcctgcgtccctccgacaccgtggctcgcggcaacgagtgcctcgagaacctcgtgaagatcctcgaggaccgcggcgtcgtcgtcgaccgcccgaccccgctgcagtggaaccaggccatcggcacgccggacttccgcaacgactccatgatgacctgcatgcctccgcgcgacatcctgctgaccatcggcaacgagatcatggccgccgccaattccttccgctgccgctacttcgagtacctggcctactggcccctcatggaggagtacttcgagcaggatcccgacttcaagtggacccaggccccccgtccccgcctgaccgaccgctcctacaagcacaactactacgacgagaagatcacccttgaggagcgcctggtgcgcaccgccaacaaggacttcgtgaccaccgaggtcgagccgatgtgggacgccgccgacgtgatgcgcatgggcaaggacctgttcatccagcacggcctgaccaccaaccgcgccgccatggactggttccagcgctactaccccgagtaccgcgtgcacgccgtgaacttccccggcgacccctacccgatccacatcgacgcgaccttcgtgccgctgcgcccgggcctgatcatcaacaacccgcaccgcccgctgcccgagccgcagcgcgccatcttcgaggccaacgactggcagatcgtcgaggccgcccagcccgcgcacaccgagccgccggcgctgtgctactcctccgtgtggctgtccatgaactgcctggtcctcgacccgaagaccgtcatcgtggaggcctccgaggtgcatcagcaggagcagatggacaagctgggcatgaacgtcatcccctgcgacctgcgcgacgcctacccgttcggcggcggcctgcactgctccaccgccgacgtctaccgcgagggcgagtgcctcgactacttcccgaaccgcgtcgaggatcccaccctcgtgcgccccgagatgtggaagtaaatcccactcgcagctcacgcgatgcgtttgcgaaaggagcccgcttcggcgggctccttttttgcgcgcttgtcgctggaagttgaatcaagctccctgctctattggccatgattccaggtcacgactaaaaaaggtgatttgtgcgactaactatttcgccattcccgtctgcataaaatgattcctatggtaaggtaaacacttaagtcagggccttattgaaaggagaagccatgaccggaactttcacaacagagggcttggggttgggtgattgctatggcatctagcaccaacgaagcggtacagccggcaacgacgtacgctgaagcgaccgaagcagagaagcacgccgttctgcgcaaggtgacggggtcttccttcctcggtaacttcatcgaatggttcgactacgcgagctactcctatttggcgaccgttatcgccatggtgttcttcccggcggaagatcgtgccgtggccgtgatgagcaccttcggcgtgttcgcgctctcgttcctcgtgcgtcccatcggcgcgattttctggggcaacatgggcgacaagaagggtcgcaaatgggcgctttcggtgtccatcttgctgatgagcggtgcgaccttcctgatcggctgcctgcccggctatgctgtcatcggcgttggggctccgcttctgcttttgctgctgcgcatggtgcagtcgttctcggcggcgggcgaatatgctggcgctgccacctttatcgcggagtacgcgccgcataaccatcgcgggttctactgctcgatggtgccggcctccacggcaacaggcctgctcgtgggctcgcttctggccacgttcatgtttacggtttggggcgccgattcgtccttcgtcgtcgattggggctggcgtatcccgttctggctggcgcttcccttgggctacatcactcactacatccgtacccatctggaggattccccggtgtacgcccagatgcaggagcgcatgaaggaaatgggcgagaaggtggagcatcccattcgcacgctgttcaccaagcatctcagggtgctgctcatctcgttcggtgcctgcgtgctgaacgccgtgggcttctacgcggtgctcacgtatcttccgaactacttggagacgacgttgaactacccgccgagcgacgcgtcgacgatcaccaccatcgtgctcgtcgtctacatcgccttcatcttcctgtccggccgcatctccgacaaggtgggccgcaagaagatgctcatcggtgcctgtgtgggcttcatcgtgttcacggtgccggcatttatgctgctcggtacgatgaacttctgggtcattctgatcgtcgagctgttcatgtgccttctgctcaccatcaacgatggcaccctggccagctacctcaccgagacgttcccgaccgacgtgcgctactccggcttcgctctttcgtttaacttggcgaacgccatcttcggcggctcggcctcgttcatctcgttctggttgatcgaccttacgggcaacgccatcgcgccggcctggtacatggtggccatcgcggtcgtcgcgttcatcgccatgtgcatgacccacgatcattccggcaagaagctggacgacgtgaagtaagctttgccgtccatttgactgcattaagtgaagggcctcctgcgtggggcccttttttgcgacgggggg

SEQ ID NO: 10607 - DNA, 9390 bp, Unknown
  gut microbiota DNA sequence
agccgcaggggatttgggcggttagcgccctggaattagcggatgatgacgggccagtctcccataatgggcctcctctggtcgtttgcgtattcgctgatttcactataaaggctcgttcttaaattatcaatatctaaattcttgataataactttggtataaaataataataacattctcagttacaactatctttaagatcaacttttgatgataggagactccgaagctgatagaatgaaagagggagaactcaaggaaaggcggcgcgatggcggggaagtctgtgatgcggggaaagacggaggcggtgcctcggtcgacgaaggcgacaaagcggctctccgtggacgagctggtggcctttatgagcctgcccatattctacgagctgcgcacggcggtggacgtgggcatcttgctcttcgacgacttggacgaatacgatcttcccgagggctactcgaaggaggatatctggcgcagcctgctcgccgtgcgcaagcaggccgccgtgttcattcccgaggatccggagcgcacggccgacatgtggatggtcaccaccagctcgctgtcgttcaacaccgagatgcttgaggtgcgctcgaaggagggctcctcgctggcgcggtcgctcaaggacatgcaggggtcgcctttcgtgacgcgcttcatcgagcgcacgctggtgcgcggtctggcggatgagggcatcgcggtggacgaggagcgggtgcacgagctgttcgcgggcgcgccgccgctgacttccctcgatcagctggtgacaaattatttccgcctgtcgagcgactgcgacagcttggcgcggcgcgcggtaactcacgggctcatcgagacgctgtactacgagctttccgagggggtggacttgtccgagctgcccgaacgggtgctcgcgccgctggatccgcgtttggcgcctccggaatcccaagtgttgatggatctggtatgccagcgggcctgcgcggcgggggacgatatgcgtttcggccccgtactgcggctgcttaatattagctggttcttccgctatttcaacgtgctgccgcgcctgaatgtgctcgtggggctgcttttgcggaatattctggcgttgaagtggggttttcccgttctcagctggataccggagggcttcgatgcgactttggcggaggcgccggtggatgcggcccgctacgaggcggtgttcgaatcgtggtcgaccgactacggtttcggcttcgacttcacgccctattttgagctgaacgtgcgcctgtacctgcgcgagctggaggggctggcggcttccatcacctatctcgagcagctgaacgagcagatcgagcgcatcttcgaatcccatatcaacgcgcggcagaagtctattttggtggcgctgtgccgcgagccgggagctcttttgcgcatcgcgccgcatcagcgcgcattccgcatcgcctacggcacggcccgggccgatttcctggggctcgaacgcgaggggtatctggtgcgggagcaggaggggcgcgccttcgccttccgcgctcatcccgacttgcaggagaagatcgtccagctgggggccgccgtggtcggctcggcggaagcgagcctggatgcgacgccccttgtagtatcctgagagggaactgagagggcggtggcgttgagggccgccttgaggccagcccgcgcgctgcggctggcgagagcgtgcgaaagggattgccatgatcaacgagaagatgtacggattgggcgatgagccgagcgctattcgcgagctgttcgcctacgggatggcccgcaaggccgagatcggtgccgagaacgtgttcgacttctcgatcggcaacccctcggtgccggcacccggcttggtgcgtgaaaccatgctggagcttctggacatggatccggtgacccttcatgcctattcgccagcggcgggcctgcccgaggtgaagggggccattgcggcgtatctgtctgagcgctacgacacgacggcgacgtcgggtcacttgtacctgacggccggtgcggcggcggctttggcttcatccattgccgctgtgacccatccgggtgatgaggtggtcgtggtgtcaccgtacttccccgagtaccgcacgtggatcgaggcggccggctgcaccatcgtggaggtgccggcggcggttccgagcttccagcccgacatcgaggcgctgcgcgcggccatcggcccgaagacgagcgccgtgatcatcaacacgccgaacaacccggtgggcgccgtgtacacccgcgagagccttgaggccctgggggccatgctgcgcgagcgcgaggaagcgctgggacgtccgctgtacctcatcagcgacgagccctatcgcgagatcacctacggcatcgaggtgccctgggtgccgtcgatctacgcgcggaccattgtgtgctactcctattccaaggcgctctcgcttcccggcgagcgcatcgggtgggtgtacgtgtccgatgccgctgacgacggcgatgcggtggcggtggccgtggcgggcgcgggacgggcgctcggctacgtgtgcgcgccggtgctgctgcagcgcgtggcggctcgctgcgtgggggagccgtcggacgtggccgcctacgcggagaaccgccgtctgctgactgaggggctttccgcgctgggctacgagtacgtggagccggacggcgccttctacctgtgggtgcgcgccctggaagaggacgcccaggcgttctcggatcgcgcgaaggaatacgagctgctcatcgtgccctcggacagcttcggcgtcggcggctgggtgcgcctgtcctactgcatcgcccgcgacaccatcgaacgctcgatgcccgcattcaaagccctgaaggagagctacgaagccaaattgagttcgtagccatagcgcgccctcgttttctcagatttatccaagccgaccgctttaggaatttggttggtgcgcttctcgtcattttccaaagaaagtggctctacttacgcttgcggtgagcgagccagaagaagccggcgctggcgacgatgagaccggcgagggtcgccacgcggcctacgctggggtctttgtagccgatggcgaagacgccgaggcagaaggcggccacgatgacgcagagaatgccgagccagcgcaggtaacgttgtttctcttccatgagggcgtcctagcttccgtaagaattgaggtactcgaggatttcctggcgcgagtgcatgccgcacttgctgtagatgcgcttgatgtggctgtgcgcggtggcgggggtgatgaacagctcttcggccactttcttctgtgtgtgacccagcgcgtaaagggtgagcacgtccatctcgcggctggtgagcaggaagtgctcgcccatgcgctcaacgttgcggcgcatggaatcggacagctcgcccatggagagcggggaagggataggggatggctccaaggcggccgaggctgaagaggcgagaggcgatggcatcgtcgccgagggggaagacgaaggggcggaggcgagagagatcgaggaggggtcgatctggagaagctgctcccggatagcggcgcattcctcgttgcaacggatgcactggcgtgcttcggcggctttcagagcctcggaggccgtctgctgggcagaagcctcgcgttttgccgcgttgaacacgacgccttgcaatgtctgcgccgcttcggccagcgctgccgccgattcggccgcatcggcttcggcttggcgcttgacccgctcgttctcggcttccagacgatcgttctctgcggacgactcgccgcgctcggcgtgcatgaactgcacgagaaccacttgggtggaaatgaggacaagagccccgagaagcgagttgatgagcaagtcgttgccggtcaacgggtaagtgaagtacagcagcatgcgagcgagggagcgcgagccgaagcagattacccagccgcccatggcgtaaacataggggtcgcgggttccgaagctggtgaaggcgatgatgacgtaccagcagtaggcgcagatgacgatgttcagcgtgttgacggccacggccccgatctcccagtggtaggggaaggcgccgaacaggacgaggctgagagaggccagaagtgccatggtgataaacgcgtccacggtcatgacgcgctcgcggcggcgcacaacgagaagcatgagcagggcgcatatcagcatggagcacaaggcgtaggccagccgcgagctccaggtgaaggggatgggcaggccgtcggggtagccgcggagaaagccgtcgacgaatcccagaagcgccatgccgacagcgcaggcggcgaggaatcgggagtcctggatgttgctgcgggcgaaggtgaagaaggtgcgcgcccgacggtgcggccgctccgtgggatgctcggcgcgcaggccggccgggccgaggaaggcgaactgggccacgatgagcgccataccgatgatgttctgcgctcgggtgggcagaaacgaaagtaggtaaacgatgccgacgctgatgaagaaggccgagaacacgaacagggcggccgtcacttcgtcggtgccgcgcaggcagcgcagccagtagaacatgcacagcgacagggccagggtgcttgcaatgctgagggcaaaagccgtggccacaagggtttgatcggcgctgtcgagcagggagagggccatggaggctccggcggcgacggtgatgctccccaccatgatccactgcacggcggtagcaccgagctcgcggcgagatcgcgagaagatgagcagcgccacgatgaagagcgcgcaggtgacgaacatggagccgtcggtgaagatgccgtcgtcggtggaggcgtagctgccgtagcacgccacgatgagggctgtgcgtgcgcagatgatgcctgcgagcatgggccagaatgcctttgcgcgactcaaaagtccgctcacgacaacgctcatgaatccccctttcgcccgatgcgtgttccatcatggctttcccgcgattccccatcatagctctttttcgggcttgtgcgcggggaatcttggctgcggcgtatctgccgagagagccgttacgtttccgcaatctgacatcgcctgaaagaggggaggggcaacgagggggttctggtaatcttacaagtgaacaatcgaagaagaggaggagcccatgagcgagggtcgcgacatataccacgagccgaagcagaaagtgctgctgcgcacggccgatgtgtaccaaaccgaagtggacgacgaagtggccggatactcggataagcttctggccattgtggccgactaccacaacggcgggcgtcccgaggggatgaacgctcaggcaatggtcggcaaatcgaagcgcggcgaggtggcgttccgcttgttcggacgcatcaatcccgagacgcgcgtcatcgaggccgccggcttcaagacgcgcgggtgtctggcgatgacggggtgcgcgagtgccacctgctcgatgatcgaggggcgcaccttcgatgaggcgctggcgctcaccattgaggatgtgcgggaggccgtgggtggcgttcccgccgggaaggcgaacacgctgacgttctccgtggaagcggtgcgggcgctcatcggcgacttccttgcgcgggagggggccggtctggtcgagctggacgcggcggtgccctgcgactcctacagcgtcgcttgtctgatgtgcgagcattgctcgctgcgcgacacgcgcaccgacctgctcgtggcggccatggacggtgagtagccgtgcgcgaggaagacgagatccgcgcggcggtgatcgcgctggcggaagcccaggcggcgggcgaggacattgccgacgcgctgccccgtggcgaggccttggccgctgcgggcgcggcggccgatggtgaggccgtagatgacgccctcgatcccgagcaggcgcgtgaggaggccatcgcggcggtgcttgatgcggcgcgcgcggcctcgcgagcaagccgcctgtcgtgcccctgtgaatgggaggctgcgggccttgtgcccccgtcgatgacgcccgaagacttggagatggccgtctacgatgcgcttatggaattcggcgatcccaacggctcgcgtgatgcgggcgatgtggagggtcccgatgctggagccgctcctcgccgcgccgccaacaagcacgtgaagtccgccttctcctcttccaacggccgccccgtgggcgcatcccccttcaaacgcaaagccgtctcagcggatgcggcagaggttgggacggagcgatcggcgaaggcgaagccgagcggagaggctgagtgcgtcgatcgggcgagctccgcgacagaagaagacgtccaaggggctggcgggtgccctgaccgagcgagttccgcagcgaacgaaacagcccagtgggctgtttcgcagagcgaggactgtttgagcgaatcagggtacccgccagccccgccccaggagacttccaaccagactcccgaggaagacccgcatcccgagttcgcgcacatccgcctgctcatgggtgccgagagctactacctctacgacgattcggccatgaccgacgcctacgctcgctgggcgttcctcgccgctgaggatgaccccgtggccaccttcatcgaatgcgtgcgcgaggagtcgtcggtctacccccgccccatggcgcgggagaacttggccaacgacccgtttcgcatgaatgccgaagcggtggaggcggcctttgctgaggcccgcgcccaaggtcgcgccgacgacatcgagcgcgtggaagcttccaacggcgacgtctacttctattccacgacgtatttaacccctcgccgcgcccaggccctcgctgagtgggacgccgtcgagcgcattcgcaacgtgtaagcgactcattgagtttcgcgctaccatccaagtgcaaaaaggagcccccgcaaccggtttgcgggggctcctttcacgaagggggagctccttcggagctcgcgttagaaggggtcggctatcaggtgaggtgatgccgcttgggaggggcgatcgaggtcgccccctacggatcagccttcagcgcagatcggtttcgctctgcgcatctccctaggcgtccggaagcaggccgagggcggcgaggtcttccttcacgtcgggcatgtcgtagtagtccaggcactcggccgtcgggcaacccagctcgggatcccagccaaagcattcgtacatcatggtgagggccgtttggaaatcctctttgtccatcttgttggtgccttcggtgaacacctcgatgtccggatccatggtgaagggccactcggtaacgacgtcgtgcacgttgcggaagtcattggtacccatttgcccgttggcacccaccatgccgcgcgcggtgttggctcgctgtagcgtggtgattttcgcacccatcttgtacaggtcttccgtcgtcacgtcttcgccggtgacggccttcatgaatttggcctccagatccagatcgccgcgatagtcgcgagccttcgtggggctcatcgtcatgggccatacccagttgcacagcgtgagcgagtcgtgcagcacgtcggtgacgatggaccaccaggcgaagttcgctttatactcattcatgggggtgtagttcttgtccggatcgatggcgctcgcatcgccccacacttcggccgcgatctgctgcttaagctcgaagggcaagccgcagccctggaagttcacggcagagtggatcatgtcgtcgcggttgaagaccatgttatagagcaggcccacctgtccgaagcactcatgggcatggtgcaccggccagccgcgcacgttgatgagcgtggaagcgggggtgttccaccagtccggatcgttccaacgctcggtccagacgatggggccgtggccgatgtaggcgatctccgagtcgttggcggcgatcttcgccagaaggggcggcaccatggaggggtcgttattcttgaagccctcccaattgatttccgcgtactcctcggggggcagcaccttctggagcaggcccgtagcatagcagtgggcgatgtcgcggtatatctgcccgtagttgcaccacaggcccaaatcgtccatggtggagccgaatacctgatcccagatgagggcgtcttcgctgccggcttcaacggaagtgttgtcgcctaaaatcttgatcatgtagttggtgaacgggaagttcggcacgcaggtgttgcccgtgatctcgtagccgccgttggccgccgaggccggcacgcgcaagtcggagtagcaatggatggggcaactgtggcagccgtccatcttgatggtgtacttctcggcctccgggccttcgtctttgaaggccttcatgcagcggtagcccacggtgttgatctcgccgggcttcggctcaccggtgtcgatggggccgccttcggccagcgcccaggtaaggcccttctgggccgtccagcggctgcccttgtcgaagtactcggcccattcctgctgggtggaaggcacgacgtggttgttgttggagccgacgatctctcgcagcatgtagtcggacaggtcggccacctcttgcgggtcggccacgtagatgggctggctaccgcgcacgacgagcgccttcaacttcttcgagcccatgacggcggcggctccagcgccggcggaatggttgcgggaattgatgatgcaggcgtagggcagcaggttctcgccggcagggccgatggtggccacacagaaatcggtgccctccttgcgcgagagcgcctcggtggtggcgcgggtgccctggccccacacctgatcggcgggcttgatctcaacatcgtcatcgtcgatcttcagataaaccggttcgtcggaagcgccctcgatgacgatggcatcccagccggtcttcttgatggccgcaccgatcatgccgccggtgtgggcgtcaacaacttgatgatcggtggtataggtggaaagggaggcgatggtggtgcggccgccagggggacaccggtggcggtcagagggccgacggcgaacacgatcttgttctctggggagagcggatcggtgccggcgggcacttcgtcgtacatgatcttgttggctattcccataccgcccaaatactctttataagggtcggtgggcgagacggaaacggttttgtcggtcaggttgacgcggaggatcttaccggtccagccataggacttgttgggatccaattttgaatcagccatgatgaagctccaaatctcttcgtgtactcatgttgcgtggtac

SEQ ID NO: 10608 - DNA, 177 bp, Unknown
  gut microbiota DNA sequence
cagggccgccccctccaccatctaccgctggatagagcggggctacgccggcatgtccaacatggacctgcgccgcaaggtggggtacgggccgaggaggagggcggcgcccgcgccgacgccgcacggcccggagcgctccttctcggcgttctcggcgctcccggagggcgagcg

SEQ ID NO: 10609 - DNA, 285 bp, Unknown
  gut microbiota DNA sequence
cgctgcaagctcgtgtgcgccccgatgccgaacctgtacttcacccgcgacccgttcgcgatgatcggcaacggcgtgtccatcaaccgcatgtactcggtgacgcgcaaccgcgagaccatctacggcgactacatcttcaagtaccatccggacttcgccggcacgccgacctactacgatcgcaacgacaccttccacatcgagggcggcgacatcctgaacatcaacgagcacgtgctggccatcggcatctcccagcgcaccgagcccgacgccatcgac

SEQ ID NO: 10610 - DNA, 721 bp, Unknown
  gut microbiota DNA sequence
ccatcgaggtcaagtcgggcaagagctcgaagcgccacgccgcgctcgatgcgctgatcggcgtaaagaactacaaactggaaggggcaatagtgctgcatagaggaaacctggagcaagaaggcctcataacatacctccccatctacatggccgccctcttgtagtcactcccctgatcaaagcccaatcaacccgaggcagacactttacttgtttcgtcgcaaaaccctgttctcactttgtcagtttcgtcgcaagcgccacggggacgcgctttttcccggagcaacgcgctagcatagccaccagaaagtgcccgcagcacgcgggtccacctaccttcgcccaaggagcaaacgatgatcaagacgttcaagatgaagctgtatcccggcatggaagaggagtacgagcggcggcacaacgagctgtggcccgagatgatcgacatgatccacgagcacggcggccgcaactacaccattgcgctggatcccgacacgctgacgctgttcggctacatcgagatcgacgatcccgagcggtgggccgccggcgccgacaccgccatcaaccggaagtggtgggacttcatggccgacatcatggagaccaacccggacaactcgcccgtctccgtcgacctgcccgtgctgttccatttggactaattcggcaaaagcccacccgctgttaaaccaccattgacatatagccg

SEQ ID NO: 10611 - DNA, 246 bp, Unknown
  gut microbiota DNA sequence
ggccgaagccgtcttaatcgttcgacttgcatgtgttaagcacgccgccagcgttcatcctgagccaggatcaaactctccgttcgaacagcgcccggaggcgccgtcagatcgatgtgagtctcgattctgttttaaaactctccgtcggggcctcggggcccctgacagggaaaaagttaaagcttgctctctcgaatgtccgtctgacatccgagaagacgtttgttccgtctctcgaattcc

SEQ ID NO: 10612 - DNA, 2943 bp, Unknown
  gut microbiota DNA sequence
gcggccgcccaacgaaggcgacgggagttgttgaaggggaggcgatcgccgaccccatgaccgctcgccgaccacagaaagaagacgcaacctatgggatttctctccaaactgctcacgatgggcgagggcaagcagctgaagcgctaccaggccaaagtcgataagatcaacgcgctggaaccggagttccaggcgctttccgatgaggagctggccgctaagacgcaggagttccgcgagcgctacgccgccggcgagagcctggacgatttgctccccgaggccttcgccgccgtacgcgaggcttccgtgcgcaccatcgggcttcggcacttcgacgtgcagctcatcggcggcatggccctgaacgagggacagatcgccgagatgaagactggcgagggcaagacgctcgtgtccaccctggccggctatttgaacgccattcccgggcacaacgtgcacatcgtgaccgtcaacgattatctggcccggcgcgactgcgagtggatgggccagatctaccgcttcctcggcatgaagaccggccttatccagaacggcatgccgccggcggcgaagaagcccgcctacgaggccgacgtcacctacggcactaactccgagttcggcttcgactacctgcgcgacaacatggtcacgcgcggcagctcgcgggtgcagcgcgggcaccacttcgccatcgtcgacgaggtggactccatcctgatcgacgaggcccgcaccccgctcatcatctccggcgccggcacccaggccgccgacacctacaagaagttcgcccgggtcatgcccggcctcaaagagggcgtcgacttcgacatggacgaggccaagcgcaccatcaacgccacggagagcggccttgagaagatcgaggtcatgctcggcatcgagaacatctacgccgacccgtctggccagctggcgaaccacctgcagcaggcgctgaaggcccagttcctcttccaccgcgacgtggactacgtcgtcatggacggcgaggtgaagatcgtcgacgagttcaccggccgcatcatggagggacgccgctactccgagggcctgcaccaggcgctcgaggccaaagagcacgtgctcgtgcgcgaggagaaccagacgctggccaccatcacgctgcagaactacttccgcctctacgacaagctctccggcatgaccggtaccgccatgaccgaggacgcggagttccgccagatctacaagctgccggtcatggccattccccccaataggccggtcgtccgcgtcgacgagaacgatctggtgtaccgcaccatcgacggcaagttcaacgccgtggccgacgacatcgccgcgcgccacgcgaagggccagccgtgcctgatcggcaccgtgtccatcgagaactccgagaagctctcgcggcttctggacaagcgcggtatcaagcacgagacgctgaacgccaagcaccacgagcgcgaggcgcatatcgtggcccaggccgggcgccttggcgccgtcaccatcgccaccaacatggccggccgcggtaccgacatccgcttgggcggcgagccggacatgctcgccgaggacctgctgcgcgagcgcgggttcgacgtggacgcccaagagggcgacgaggaggcgcgcggccccatcccatcggcggccgaccgcgccgacgcccttacccgcgcccgcgagatctgcgacgcggagcaggagcaggtgctcgccgccgggggactttgcgtcatcggcaccgagcgccacgagtcccgccgcatcgacaaccagctgcgcggccgttccggccgtcagggcgacccgggcgtgacccagttctacctctcgctggaagacgatctgatgcgcctgttcggcggctcgaagatggactccatcgcgcatatgatggagaagaccaatcaagaggacgacatgcccatccaggccggcatggtgtcgaaatccatcgagagcgcccagcgccaggtggagtccatgcacttcgccgcccgtaagaacgtgctggaatacgacgacgtcatgaacctccagcgcaaggccatctacgaggagcgcaacgccatcctggacggcaagtccatgaccgagcgcattcccggcatcatccgcgacgccgtggacgccatcgtgggggagtgctgccccgggaattccgccagcgacgactgggacgtgcgcgccatcgacctgtgggccgcgaacatgaccggctgcaacgatttctccgtggcgaaggtcgatcacgaggacgaggcggaaaacgtcgccgaggctttgaacgacttcctcacctggatttacgagcagaagagcgagcagctgggccacgacctcatggagaacctctccgcccaggtgatgctgcgcatcatcgacacgcgctggatggcgcatctgcaggagatggactacctgaagaccggtatcggtctgcgcgccttcggccagcgcgacccgctcgtggaatacaagaacgaggcctacaacgccttccagaacctgacgagctcgatgtacgacgactacctgcgcacgttgctgcgcctggagatcgccgcgaagcccgcggcggagggcgcccccgccggtggcggccgcccggcccctgcggccctggcggagcaggaggatccgctggcccgcaagatgagctactcggcgccggaacaggctctggaggagtcgagcatccgcggtcgccgcgccgccgcggcccgcgccgcctccggtgttcccgccgcgcccccgcgccctgccgccggcaagccccagacctacgtcaaggacaaggaagacccctacgccaacgtggggcgcaatgatccctgtccctgcggctccggcaagaagttcaagaagtgccacggccagaacctttgacgcacactcaactaaggt

SEQ ID NO: 10613 - DNA, 15515 bp, Unknown
  gut microbiota DNA sequence
cctcgacgtactcgatgcaggcctcgaccttcgggagcatcgagccgggggcgaactggccctgggcgatgtactcgcgggcctgggacacggtcatctcggagatctgctcctgctcgggcgcgttgaagttgatgcacaccttctccacggcggtcaggatgatcagcatgtcggcgccgagctcggcggccatgagggcgctggagcggtccttgtcgatgaccgcgggggtcccgacgtagccgttctcggtctcgaagaccggcaccccgccgccgccggtggacacgaccacgtagccgtcctccaccaggtcgcgcacggcgtcgaactccacgatgcgcttggggatcggggaggcgaccacctggcgccagccgcggccggcgtcctccttgacggtgatgcccatggcctcggccttggccttggcggtctcctcgtccatgaacgcgcccacgggcttggtggggttctggaacgcggggtcgtcctcgtcgacgacggtctgggtcacgatgcaggcggtcgagcgcatgatgtcgcgggacttcaggtcgttcaggatggcctgggacagctggtagccgatgtagccctgggacatggcgccggcctcggggaagggcatgtccggggtcttgtcgtcgttggccgccgcgtaggcgaaggcgttgttgatcatgccgacctgcgggccgttgccgtgggagacgacgacgttggtgccgtcctggatcatgtccacgatgtgcttggcggtgttctgcacgagctcgagctgctcctgcggggtgttgccgagggcgttgccgcccagggcgatgacagcggtcttgccgttgcccttttcgtaagccatagatttcacctcaatctttcggtgaaccagccaatctcgcttctaggttgcatgtaagagagacgagactgcggttccaaacggaacataacatgcaacggatgtgattctaggtttcagggcgatgacgacgccgcgcagaagcattccgttgtcaaatcgtagggggtgactccgagaaggaaccacccccgaaaacccctccgtaggggctgaccttggtcagcccttcgctcgcaagtcaacctcgcttgcagaggggcgaccgaggtcgccccctacggaatggatcctgccgcaattagccgcagagggtggcgtacatgacggccttgatggtgtgcatgcggttctcggcctcgtcgaagaccttggaggccttggactcgaacacctcgtcctccacttccatctcggtgacgccgaagcgctcggcgatgtcagcaccgatggtggtgttggtgtcgtggaaggccggcaggcagtgcaggaagatggcgtcggggttggccatggccatgacttccttggtcacgcggaacttctcgagatgcttgatgcgctcggcccacacctcgtcgggctcgcccatggacacccacacgtcggtgtagatgacgtcggcgccggtgcaggcgtccttcacgtcgtcggtgcacttcacggtgcagccgttctcggcggcgatggcctcgcaggtcttcacgagctcggcgtcgggcatgttctccttcgggccgcaagccacgaagttcatgccgagcttggagcacacgaccatcagcgagcgggccacgttgttggcggcgtcgcccatgaacacgagggtcttgcccttgatgtcgtagttgaagttctcctgcacggtgagaatgtcggcgagcatctgggtgggatgccactcggtggtcagaccgttccacacgggcacgccggcgttctcggccagatcctccacgtcggtctgggcgaagccgcggaactcgatgccgtcgtagaagcggccgagcacgcgggcggtgtcctcgatggactccttcttgcccatctgggagctgcccggatcaaggtaggtcacgcccatgccgaggtccatggcgccgacctcgaaggcgcagcgggtgcgcgtggaggtcttctggaacagcagcacgatgttcttgccctcgaggtagcggtgcggggtgccggtgcgcttcaagtccttgaagttcttggagagcttcagcaggtactcgatctcctcggtggagaagtcgagcaggcggaggaacggacgaccgctgagattgataggcatgttctgtttcctttcccttgaaagagacatttgtatcgcgcggggcccccgagaaccggggaacccgcgcctcttttacggcccagcgctggctggctagactgggccggaaaagacggacgtaagagtgctccttgacggagcgggcgccttgcggcttacagagcctcgcgccaggccggcatggacatgcagcgcgggccgccacggccgcgggagagctcggccgagggcatctccaggcagttgatgccctgcttatacagcacgtcgttggtgacgttgttgcgctgatagaccaccacggtgccgggacggacgcagagcgtgttggagccgtcgttccactgctcgcgctcggccgcgatgcggtcgccgccgccgcaggggatgagcttcaccggctggccgacgtactcggagagcaccttctcgagatcctcgttgcgctcgcggatcttcgtgccgcccttgccgtccggggtgatctcgaacaccgtgagcgggcccatgatgccgggatggatggtgaacttgtcgtagtcgatctgggtgaacaccgtgtccaggtgcatgaaggcgcgggaggacgggatgttgaaggccagaatcgtgtcgatggtcgaggtctcatcgttgaacacgttgtgggcgatggcgtcgatggcgtcgggctcggtgcgctgggagatgccgatggccagcacgtgctcgttgatgttcaggatgtcgccgccctcgatgtggaaggtgtcgttgcgatcgtagtaggtcggcgtgccggcgaagtccggatggtacttgaagatgtagtcgccgtagatggtctcgcggttgcgcgtcaccgagtacatgcggttgatggacacgccgttgccgatcatcgcgaacgggtcgcgggtgaagtacaggttcggcatcggggcgcacacgagcttgcagcgatcggacaccatgtcgacgagcaggtgcgtgtccttctgcggcagctcctgcaggttgatgccggccatggtcttcatgaccatgtccttggtgcccgcgtaattggagttgatgtagtcggtgatgatgtcgtggtacatgtcggtgcggatgccggcctcatagatccactgatcgaggaactgctggcgcagctcgggcttggcatcgatgacctcggccatgaggtcctccaggtacacgacctcgacaccctcgccgcgaaggatgttcgcgaaggcgtcgtgctcctcctgggccacggggaggaacgggatgtcgtcgaacaagagctcctcaagcgtattgggggtgaggttcagcagctcgtcgccggggcggtgaaggatgaccttcttgaggttgccgatttcgctcttgacgtttactccttgcatgtgactctccaatccggcggcttgaagtccgccatcatagttgagaagctgcgggcgaatgccaccctcagcccatcgcggtcggcgcgatggatgcatctaatgtctcagaatccgggccagggggaagaggtaaagtggtattagatgagggtttaacttgtcattaccaaccctctgccagccttacacccttagtaaacgccccttgctacgtctccttcgccccaggtcaagcgtgcgacccgaagcttttgcatcggatgccttccttgcgcatcgacggtgctttgcttttcggccccctaataattacagccgaggtcgcaattcgtcgatgaacctaaagtatcatcatttttgttcacatgcaataaaaaagttccaatcgtttagggattcaatcaaatttcacgaatgcataagatggctgagccttcccttagagcgcgctcaagcttaaaaggtgattaatttgcatcgttttaccaggtagattgcgtgttccaaaatcccttctttccttttgcacccttattgacgatatagttcaacttgtcagttatcagagcatgcatcatctcgaagctcttgccctcatctttttccagtccaagctcacaaatttcgtagtgcagatgaacaattttacttcatggcgtatactgcatctgaaaaccaggctgcccttcgcgggtcggccggccgctccgtcgctcgccttcggaaggagacgcaccatggcaacttcctgccctgccgatcgaatcctcgttaccacagccttgttcaccggtgccgacgacgagccctcacccggagccgtggccatcggagacgaccgcgttctctgggccggccccctcgaagctatgcccgaagctctgcgcgacgacgctactgaaatcaccgattacggcgacgcccttatcatgccgggcttccacgacgcccatcttcattacttccactccgcgctgtacctctcccctctggctgagcgcttcgtgggcgagaacgaggccgacgcggtagcgcgcctggcgcccttggccgcacggcgaccggccggctcgtggctgctcacccagggctggcgcgactacttgtggaacccggccggcatgccgagccgcgcgtcgctggatgctgcctaccccgaccgacccgtggccatgtactccggcgacgcccacaccctgtggctgaacagctgcgcgctggaacgcttgggcatcacggaggaaagcgagccgcccgcaggcgggagctacgacaaagacgccgacgggcaccttacgggcattgtgcgcgaggcggcagccatggagctcatgccgcgcatcgtggcggaattctcgcgcgaggagctgctggacgcctaccgctccttcgagcgttatctgaacgagcacggcatcacgggcgtgtgcgacgtgtcgctcatggcgatgccgggcctcgatttcgtacgcgacgacctgttcggcgccttggaagaggccggcgagctcaccgtgcgcgtgtccatgttccccacgcttttggaagaccgcagccgtctggccgccctgcaggccgcccacacggggccgctcctttcggctcagggcttcaagcagttcttcgacggcgtttccagccagcacaccgcctgggttcacgacccctacaccaacgctcgcttcgagggcgactgcgggcgccccaccgtggcggctgaggtgatggaggcgctcgtggccccggcggcggccgagggctcgcccgtgcgcatccacgccatcggcgacgaggccatccaccgctgcctcgatatcgtcgaagcccacccggtggcctcccccgcccatcacaccatcgagcatttggagaacttccagcccgacgacatcgcgcgcatcgcgcgggcgaacgtcatcgccagcgtgcagccacgccacatcaccctggatcccggcggcccggagcgtgatttgggccccgagcgcatcccttatatgtggcccttccgcgccctgctcgattccggcgccaccctggccttcggcaccgactcccccgtcaccgacatcgatcccatcgacgccgtctacaccgccgtcacccgccgcgacgccgacacccacgagccgtgcgggggctggctgcccgaagagcgcatcaccttggccgaagccctgcgcgcctacaccgccggcagcgccgccgccgcccagcgcgccgacgagctggggcagctggccccgggcatgttcgccgacataacggtactctcccccaaccccttcaagctggctcccgacgacctgcagcaggcaaaggtacaagccacctacgtcgccggcaagaaggtgtacgaacaatgagattgggcctctttaggctaaaatgcgccgattccgtattttagcctaggctagcatccttccttccgccggctgcgccaactgagaagcgagcccgcgcaagcaggctcgctccaattcgatctatggaaaggcggcggaacgagggggaggaaggagaacgtcccgccgccagtttcccttcagcgattaggcgtcggtgcggccgtccttcttcatgacgccgcccgcggccatgtagccgcccacgaaggccaagcccagatcagcgaacacgccagtgagaggcttgcccgcggggttgccctcgcccgccgacccgccggcagtatgccaggcggcgtacagacccggaatgggcgcgccctcggtgctgatgacctgcatgtcggggttcaccttcaaaccgcacttcgagccgaacacatggccaccaacgatggctccatagtagggcggctcatctaaagcaagcagccactccttcggatatttgtaggtggcagcgtagtcctcgcccgctgcgcaggcagcgttccatttctccacgttgtccacgaggacgccctcgcgcagaccaagcgccgcctcaagctcctcaatggtgtcgcacttgcgaatgacgccagcctccaccatgtcgttgaacccggtgtgccagtcgcgcagatactccggcacgcgatcgtagaaggggtcgtcgtcagcgaggatcttgcccttgcggcaaatcacctggccaaagtagttgtccagcatgagctgctcgtacttcgaatcgaagatgcagtaggtcttgccgccgggctggctcatctcgatggcggcagtctcgcaaagcccctcagaggagggcgacgcatcgttcacatagggataaacgcgagcgctcgtgccgatatagggaacgcggttgccgtcgcggttgatgcgcagccagggctggcgcactacctggttgccgtccttgttgatgtggcagtccatctcggtatcgaactcgtcatagtcgcgccaccacacgccgccgtcgaaggcgccggtggaatcgtatccggccagatcggcccctacaccctggcccatgcggatgcactcgccagtgccgttgggcggcgtggcgatattcgcaataccctgaagagtcgtggcggagtacttggccatcatggcgcggttcacctccataccaccggcgcacaggatgacgcagttggtagcgtggatgaacttctcgccctcctcgtcggtgaccttcacgcccacgacggccccaccgtcgaaaacgagcgtgtccacgttgctgttggcgcgcacctcggccccgtctttctgcgcctgctcggtcagcagctgcagggggatcaggttcacgttgatgccgttggtgggcgtggacatcccctcccattccagcatgcccgcaccggcagggctcgggttcatgggcacccatttggccccggccttctcgttcatccagtcgatgcacttcgggccttccaccagcatggcgcgcacaagctccggatcaccggtctgctgctggcagctcatgacgtactctaggatgcgatccacatcgtagggatattccggataggcgaacttgcgctcttcagcggccttgtggccgcccatgttcgagaacaccgatgagtgcttcgagttgccgttcaactccatgttgcgctctaacacaagcacctggtaacccgcctggccgagccggatggcggcgttgatgcccgcggcgccggagccgaccacgatgacctcggcctcctcgtcccagttctcgggaacactagccggctcgatgggggcagcggcagcctcgaaggcctctcgttccttgtcgcgagcatcgctgccgccagtatcggccatctcggccttcggagcgcagccggcaagtcccgctgcagcagccgttcctccgagcagcgcccccttgaaaaacgttctgcgatcgatgttcataggtctcccctttccttcaggtttcgtcgctcctccatcataggggcgcccctgccgggaacgagggaggttaattgcgagcgccgtcggtttcctttgcatctctgttcaggttgacaacgcacgtgtaaagtaatctttacagcatgccgtatgaatggaatactggacgtctcgccgtcatgtttggaaggaacgcgccgtgaacacacgctatctggaggaattcctcgtcattgccgaggaattgaacttttctgcagcggccaagcggctttataccacgcgccccaccctcagcgagcacctggcggagctggaggatgaactgggctgcaagctcgtcgagcgcggtcggggaaagcccgcgctgacgccgcttgggaggcggttcctcggcaccgcttccgacttgctggggcaatgggacgaagttgtcgacgaataccgggatctctccgacaacctgctcaccgttaccgtgtcggccacaaaccttccctggcttgaagcgcctcttctgcgcgcacggcatcgcatcgccgaaaagtggcccgagggcaaaatcgacatcgtcaccgacaacggccccttggccaccgtagacgcgctgggcgagcggaagaacgacatcgtcgtcgtaggctgcaagaacttcagcgaggcaggacatcggcttctcacgaaagagcatccaggattcgtgctgaacgccgagaccacccacttgtttatggccgaggataacccgttgttcggacgcgataccattcacgccaccgacctcgacggcgccgtcctgctcctgccgcccgacgtccaccagagctacgagcgcgacggggtggccaaccgctttgccgtgaacggcgctcgcgtcacgctcaagacgatgcccttccgcgaccatgccgagtatttcgcccacgatttcgggtgcgccatcggcgttgcacccggcaccctcgtgccgcgcttcggactcgaccggcgccccgggctgcgcctgttcgacctcgacgatatggatttctcgacggacttcatcgccgtgttccgagacgaattcgtcgaaagcccccacggccgcgtccttttcgacgagatgaaggccgctgtggcccaaggagagcccggagcctagtttagctctccaggaccttcgaaagctgccagagttcttccatctcctccgtggagaggtcttccacgcgacgcccctggccggcggcggcgccttccatgaaggcccagcgggaacggaacttgccgcaggtggcgcgcagagcctcctcggcctggacgcccatcttgcgggctacgttcacgagcgagaacagcacgtcgcccatctccagttccaccgccgcggcagccgcgggatcggcggcggcatccactttgccgttcgcggacttcggcgcggcggcgtaggcggccttaagctcggcgacctcctcgtccaccttggcccacacgtcgtccaccgtttcccactcgaaaccggccgaggccgccttccgcgagatcttctgcgcctgtttcagcgccgggaagctcttcggcacgccgtcgagcagcccctggggcgcgtcggccgcagcgtcggcggactccttctcggccatctttatctgatcccatacgtccagcacctcgttggcgtcgcctgccaccacgtcaccgaacacatgaggatgccggcgcacgatcttcgcgttcacgtcgcggcacacgtcgttgatggtgaactcgccggcatccgcggcaatctgcgactgcagcaccacctgaagcagcacgtcgccgagctcttcgcgcatgtgcggcacgtcgtcggcctcgatggcatccacggcctcgtaggcctcctccaccatgttgccggaaatgctcttgtgggtctgctccttgtcccaggggcacccgtccggcgagcgcagcgcctcgatggtggccacgaactcgttgaaggccgggtgctcggtcggctgcacctcggctaccagcttctcagtcacagtgttgctcccttcgattgcaggttttcgcagcattatagcgctcctgctttcacgcgcccctccaacgtcttcgagcagcgccttccctcccctttttcgcagtttctcaagaagcttgagcagccgcattcgagctatttcgtcaccaaatccccatttcggagccttaaaagcgcacatttttctgcaaaaacgcgacattagcgggaaaaggggtgtacaacctgcggttttctattatgatcgtgtagctaaaaacggagaaacgctggtaccgaagccttctggtaccagcgttcttcgagtgaaggccctgttagaagggcaccgactagagaaagagaagtgatatgcccgcacctaccatgacccctgagcagcgcgccgccgccctcgagaaggctcgcgtcgttcgcgccaagcgctccgagatcaccaacaagctcgccatgggtctcaccaccccggccgaggttctcgatcagatcgacgacccgatcatcggccgcatgaaggtcaaggctttcgtgaacgccctgcccggcttcggcaaggtgaagaccgagaagctcatggaggaactgggcattccggccgagcgtcgtctgcagggcctcggctccaaccagatggccgccctgaaggccgccctttcctaagtctcaaccgaggcaatcttgcaagcgcccgcctataatagacgggcgcttttgttttggaaggaaccggcatgccccttatctatgtagacacattggaagacccacggctcgatgcgttcgcgcggctgaccgaggctcagctgcgcagtaagctggagccggagcgtgcgctgttcatcgccgagtcgcagaaggtgatcgaacgggccttcgagggcggcatggagccgatctcgcttcttatggaagagaagtggctgccttccatggcaccgctcatcgagcgcatggaagagcgggcgggcggccgggcgggcgcgcccgagatgccggtgttcgtcgcgcctcatgacgaacttgagcgactcaccggcttcgagctgacgcgcggcgccctcggggccttccgtcgccccgccctgcccaccgtggccgacgtgctgcacgaggcgcggctggtggcggtgcttgaagacatcacgaaccacaccaatgtgggggccatcttccgcagcgcagcggccctcggggtggacgccgtgctcgtcagccccgcctgctacgacccgttgtaccgccgcgccgtgcgcgtgtccatgggcaccgttttccaagtgccgtggacccgcatcggcgacgcagacgtaccgaatcgccccggctgcgggacctggagcgacgagggcatcgccgaactgcacgagcacggcttcacctgcgccgccatggcactctccgacgactcgatgacccccgacgagctgaacgcgcttttggccgcgcgcgaggccgccagcggcaccccggcgaagcttgcgctgctgttcggcaccgaaggcgaggggctctcccccgccaccatcgcccgctgcgaccacaccgtgcgcatccccatggcccacggcgtcgattccttgaacgtggccgcctccagcgccgtggccttctacgccttccggcagctgagccagctggagaggtagggcacaatgagatccttcaatccccgttctacggccctcccccaagatgacgccgaggcatcccctcgcagcgtcaagatagccatctgggtcgtgcgcctctgcttcgccttcgtgttcgttgtgaacgtgcagtgcgccctggggttcgcactcgcgcccgaggcctacatgggcgcctacgagctcggtggcgtgccaggtcgcgtggccactcagggcatcggtatcgccttcctcatgtggaactgcacctacccactcgtcatttggcgccccgagcgccaccgcgccctcgccagcgtcgtactggctcagcaagtcgtagggctcgtcggagagtcgctcatccgcgccaccctacccgccggccacgacctgctggccagcagcatcgacctgttcatcgccttcgacgccatcggcctcgttctcatggccgcctcatggggcatcttttttctgcttgaaaagcgcacatgcgctaggatccacgcctaggcgatttgccttcctgttttttgccaaatatttcgattgttagcacctcgaggaactaaattcctgcgctgctcccactcttcttactcgcaaggtaagcgaattatataatattcattattttattgtcattttatccctttaccctgctgagcgaacctctcgggcactgccctttctgctaacaatcgcaatatttgccgaaaaacacgggaaaggatcgcgcttggcgatcctttccaggagagagaaggggttctcgggttttgcttaattaggcggctcgagggcacttccgcaccggcgtgcaccactggttgacaggctgggcctacttcatcagctcagcgacagcctgggcgaaggcgagcgggttgtcgggcaggatgccctccacaaggagtgcctgatcgaacagaaggcccgcgtaggtgcgcaccttttcgtcgtcgccggactcatgagccgcttgcagcgtggcgaacaccgggtgcttggcattcacttccagcaccaggtgcatctcgggcaactcgtcagtgcccggctggctcttcagcacctgcaccatggccagcgacatgcctccctcgctcgtgaccacggccggcgcatcggtgaggcgggaggaaacgacgacgcgctccaccttgccgtcaagcgcctcctgcataatgccgaacagctcggcattggactcggtggcctcctcggcctccttcttctcctcatcggtggtgagacccaggtcctcggatcccacgttcttgatgaagtagggctgcttgttctcctcgtcgccatccaccgcatgctcgccgtaggcgcccatggccatcatgcagaactcgtcgacgtcctggtcgcacaaaagcacgtcgtagcccttcgcgagcaccgtggtcaccagcggcatgctcgccaagcgatcgagcgagtcgcccgccgcgaagaagatggagtcggctccggccggcgcatcggccagatactcgtccagggtgatcatcttctgctgcttagcggagtagaacagaagcaggtcggcaagcgtgtccttcgccatgccgtagctctggtagataccgaacttcagcgtacggccgaactgcttgaagaactcctcgtaggcctcacggtcatcgtcgcgcatgttcgccaggtcggccttgatcttcttctcgagacgacgggcgatggcgcgcagctggccgttgtgctgcagcgtctcgcgggagatgttcagcgtgaggtcggaggaatcaaccacgccgcgcacgaagccgaagtagtcgggcagaagctcctcgcacttgtccatgatgagcacgttggaggagtacagggcgagcccacgcttgtagtccttcgagtacatgtcccacggcgcgcggctcggcacgaacatgagggcgtcgtagttgagcgacccttccgcgtgcacggagatagtgcgggccgggttttcgaagtcgtggaagtcggtcttgtagaactcgtcgtactcctcctgggagacctcggacttcttgcgcttccaaattgggatcatggagttgatggtctccacctcggtgtagctctcccactgcggcgcggccggctggtcgccctcggccggctcgggggcctccaccttgcggctcttcgtcacttccatcttgatggggtagcgcacgtagttgctgtagcgcttgatgagctgcgtgagcccgtgctcgctggcgaaggtgccgaaggactcgtcggaggtgtcgtccttcaggtacacgatgacgtcggtgccgtgctcggcgcgctcggccgacttgatgtcgtagccgtcgatgccgtcggattcccaagcccaggcctcgtcgcttccgatggcgcgggagacgacgcgcaccttcttgcccaccatgaaggctgagtagaatccgacgccgaactggccgatgatgtccacatcggtgaggtcgtcgagtcccttcacctcgccgggctcgctttcagcagcagcctcggcctgggcggccttgaattcgaaagagtcggaatgggcgatggtgccgaggttcttgtccagctcgtctttggtcatgccgatgccgttgtcggacaccgtgaccgtgcgctcgtcgctgttgtagcccacagtgatggccaagtcgtcgcggcccacagccacggaagggtcggtaaggctgcggaagtacagcttgtccaccgcgtccgacgcattggagatgagctcgcgcaggaagatctcgcgattggtgtagatggagttgatcatgaggtcgagcagcttcttgctctctgtcttgaacttgcgcataggttcttgcccttctttcctagaggcggaagacgcataactgccccagtgtaggtcgcgcgccggcggtgtctcgcggtgcgttcggtctgtacgtcagtcgttgaccggcggcgacaaaagcgttagcagtctcccttactgagtgctaacaccacattctacgcagaaggaaacctaagtcaatacctatcaagttttctttaagtttagttgaggatacctttgagagcgtcagccttcccgctgctcccactcggccatgcgacggtagaaggtggcctcgcccaccccgatgctctcggccgccttcacagcggtccactcgtgggcgcggtaacgggcaatggcctcgcggagcatcagctcgtcgacgggcttccgtcggcgccccgggcgagccgcaggccctccgcctctcgtctcggcccgcctcccccgtgacgccttctcatgcagcagcatgaagctctcgtagagaaccttccgctcggcgccgcccaagggctcgccctcgcattccacggcatcgccggcgcacagggcagcaagtaccgagccaacggcctggggcgagttcgccgcagacgcaacagcctcctccatccccaggacaccaggggcaccttcgggcactgcgcggaagtacagcttgtcgccgatatagcgccggggggagcggacgagccattcgaggggatcccaatagtccatcccgcattcatccagcaacgaccaaaggtcctcacgattggccatgggcgcgcggtcggcaataagggtgggcgtgcggttatcgcgctcgtagcacgtcttgcgcaccgacaaatcgaacccgggaataccttggagatccgacgagtccagcaggtcgatcacctcgtagttcggttccaactcgtagcggaacgtttcgtcctctctcacgatgtagcgcatcagcgccaccacgtaggtaaagccgccgcgaccgtcgaggcagagctgggcggcagtaaccgactctctcacagaaacctcctcccaagcgaagcccaagacgactccagaatgccctggtaacgagcgtggatcatgtgacagtagaacgcacggtgacgctcgctgatcggcagttcgcccacaa

SEQ ID NO: 10614 - DNA, 59288 bp, Unknown
  gut microbiota DNA sequence
ctgaatgcatcccatgacctcctcgagggcgcgattgcactcggggaaggcgaggctgtttatcacctcgtaataggagctcttctttccccgcagcttgatctgcgacaagggaaacccgtacacgcgcttggccgtctcctcgggggatgccatgacagcggccatctcgtcctcgtcggtcatattggggaagaggcaggatccgttgtcgaaaacgggcgccagcgcatacgcattgtcccgcttgatgaagccccagttcatgccgtggcgatcgaaattgcccagcagggcgtccacgatgaacatctcccagaacatcgagatcgtttcggcaacgtcggtgagcttggagttgtcgcgcagcatgcgcatgatgtcctcgtagtcgtactgataggattccttgtcttcgtccagggtgctctcccccacgtcgttgaagggaacgaactgctccccctcggccacgaagctcttgcaggcaactacttcctcgccgtggcgcaatccgagaaacactttctgagtcggataccccaaagcctcgaagatgcgcgagcccaagtactccgaaagatggttgttccgcatgccaaagggagtgcgcttgcggaacttcagcatatattcgcaggggcgcccaccgccgttcggcaccagaatcgcctctttgcgctccgacccgccgtactgcacgtcgctcgcgggatatatcgagaagtcgatgagctccatagccgttcctatcaaaattaagtttttattttgataggaacagtatagccatactctatcaaaattaaaacctaattttgatagagtagcccgtttcaagcacttacgagatatttgcaacagcctgttgcaatatttaaagccgaaactctgccaaacttcttcgtctcattggacaatattgcacacagtgtgtgcaatatcacttcatcaagttcgccgtcgatgcccagcgcgaagcccgcgaacagcgaggctattaggctctcgtaggatgcgcgctcaaacgacctcgcaggctacggccgctgatttgccggcgaaggcgatgccgtagcggatcgagccggccgctcccgcggcggcgtcgtaggcgcgctcgtcaatttgcgccagcgcttggcgtgccgccagttccaaatcgatcggctgctcggcatgctttagctcaagggtgatcagcgggttgcgagcgggatccgccggagccagctgcacgtcgaagcgtccgcgtcccgcttcgcgattcgagacgggagcgctatagccgggcacgttgaacagaaggcccatcatgagcatgtggtagctgttctcggaaacaaggtcgtggaagctcgcgcaattcaaaagcacgctttccaattcctcggcgaaagcaacgacatcgcccgacacgagcgctctgtgcaggtcgtcgagcgcgtcgcggccgccggcaacctgggcgaagcgaccggtgatctcagaggcatagagcttggcgacctcgcgattgggtatgcgcagaggacgcaggcggtcgacatcgcccggcagggccgtatcgtcagtcgtgagatacccggcaaggtacagcatcgaccataccgcctgcggtgccaccgccaagtcggagaacacgacgcgggtatccaggggcgctcgcacggtgccacccggttcggcaagcgcgtagagacgcttcagcatcttatcgccggcatccgcgacgagaccgcccagcaccgagttcgatgacgtgttgccccaatagacatcgggtgcgcaaccgttaccgaagtaattgagaacgctccacggattatatacgtcgacgtcgccgaagcggtaaccgtcgtaccactcgcgcgcctgagacacactgctcgcgcttcccacatactcggcaagcgcctctacttctgcttgcgtgaacccgaagcgctcatcggaggcgacgttcagaggcgtatcgacttgcaagttgttcaggtcggagaagatcgactccttggatatgcgctgcacgcccgtcagtacggcgaaggccagcgcatcgttgctcttgagggcacccgtaagccagcgcttgaggaacgacaccacctcatcgtagcagccgctctcatgggcagccattacgggcgcatcgtactcgtcgatgagcacgaccaccgactgcccatagtgttgctgcaaaagtatcgtcagccttagcagcgagcgtcccagctgacctatgtcggcacggcctgaggcaagttggccgaatgcgtccttgtcgaactcgctcagtcgatcgctctctaggagatagtcgtgtcggttacactcctcagccaccgcatcggagaaccagctgatgaaatcaggataactcacgctcttcaagttgttgagcgtgaaccgcacaaccggataagcgccctgatgggtccggtagcgtccatcgcgggcgtcccatatggccagcccctcgaacaagccggcgtagttccttccctcatcgaccccgacggggatctcgaagaagcgctgcagcatggagagattgagcgacttgccgaaccgacgcggccggcagaacagcgtgaccgcgggacccttgtcgagcacgtcggcgataagcatcgtcttgtcgatgaacaccgaggtctcggccacactggcgaagcgatcgttgccgatgggcagtatcttgttgcccgcccggtcggacaggcgcacgtcgcctttccggaatacgccgtcttcgaacacacccgccgcctcagccatcgccgcgcctcctttcccgcatcgcctttcgcgccattatacgccatcatgatcggctccagcgcagtgctacgccctaaagctgaacctcgccgtagttgaggctgtgctcttcgcgcatgatgttaagccacgcatccggggacaccgccggaaccgttgatcgcgcgaatcccttggcgtcgcgagtgatgagatagtcggcccccaccctctcggcggcaagggcaatcaggcaatcctcgaggtcgtcccagccgagacgcgccgctctctcaagggaggcgcccgtaagatctaccggctcaatcaccgtgagagctttcagaatcgccgcctgcagccgcgccgaatcaacatagcggctcaggacgtagaaggcatcgacgacagactgggaaggaacccacagccgagcatcaccaaagaacccggcgatgactactttctgagctgagaggaaaaacggctccttgcggcccaggtagtcgatgagcacattggtatcaagcaagagattcatagcgccctcgctttccatccctcacaagagcgcgataatcgccatcgggcgcctctcccctccaatcgacatcgagtgtcgaagcggccagaaaggcatctaactcctcccggctcggccgagaagaaggagcagtcgtcggcagctcccgtctctcaagaagatagtcgaaagcactgttgataagatcggacgtgttcacccccagagaagccagcacgcccttcgaggcatctttcttcgcctgcggaacccgcgcactcacaagaacactttctgccataacaacctcccgtcgaatatgttatacgtataacatattcgatgggagacggtcaagggcagaggggatctaatcgcaagctccctaaggcccagcatctagcgctcgcggtcgatgaggtcgatgagctcctggcgagagtggacgtcggctttcacgtagatatggcgaatgtgggacttcgccgtgttgaaggagatggtgaggttctgggcgatgtagtcgatggagcggccgcgcacgagaagatcgaacacgtcgcgctcccgaggcgagagcccgtagcgctcggccaccgcatcgcagcgcatccggtagtgacctggccgacgctctcccagcgcaacatcgcccgggccgctatcgggaagagcaacgccagccccgccggctcctctaggctctaccgcatcatctccgtcgccttcgccgccatccgccgcgtcgctgcaattgtgagccgtcccacatccgacggagcccactccttctgcagacaccccctcggcagacgcccccagtgttgacaggccctcagccgccattccggccgccctacccgacgggcgctcctccggacgcaacgcgtcgccgatcaggcggtcgttcagcaccagcatggagactaccaggagcgcgaagaccatggccaccgagataacctccaaggacaagctgccgtcgccctggctgcgcacgatttccaaacccgccagccacccgaaggtcgtccccaaagccgaggccccgcggcccaagccgaacacgagtatcggggaaagccgcgacgagtaggccacataggccagcagacaccagatcaccagcacgaagcagttgtaggccaccgtaatgaactggctgccgaaacccgttccgcccaggaggggtgtcacgagaatgccggccgccacggcaatgacgatgggatagtacaggcggctcacatcgaactggcggcgcagcagccccaccaccacgaacagcaccccggccactaccgcagtgctgaagatgatgagcgcgccgtcggcgttcagcaagctgatggaggaatggggcacggaaaacccgcgcgagacgcccaccacgacggagaagaccgccacggccacgagcagcctcacgaagaacctccgcaggggaaccggaccctcggggcgtccgccctcgccctcatccgaccattcgggattggtcagcgtagagaccacggccagaacgggaagaagggccgtgaacaccatgcccaccggatcgggcagccccacggccatgaagtagatcatggcggcgaacacgaaggacgccgccgtgtacatagcggcctcgcgcgccggcgccttcgagtagacgacgccgaacctcagcacgatgaccgacgtgcccgccccggtcagcgcggcgctcactataaggtagaggttcgcatcggcgcccaggctggacgatgcgtaggtgcccaccgtggccgcgcccaccaccaccgccaccgcaatgaggagcaggttgctgcccacgagccgccgcgtgagagggcgcacgagcgagagcaggacgagggcgacgcccagggcaagcgtcgagaccagataggtgagggaaatggtgtcagggggcaagtcggaggcggcggaggggaacacgagcacgttgctgttgtacgacacccagatccacgcgtagtaaaagccgaagcccaccagcttaagggcgggccactgctcctctatggtcatgccgaggcgggtcggcgccaactcgctgttggacgcgaacgcctcctgattatcaccgaaccgcttgagcatgcgcttcccccatgatcggcggcccgccgtccccaaggccgcactgtcaactgaagaacgggcgtcgccgccccattcgttccgctcgttccacggctcatattgtataccctcggctattggcacaacattccccctgttcgaattctcacggcggctgaatcggctccctccgcccctctcctagccctcagcgcccacggcatcctcatcggcctcttgcgccgccgaggcgacgggcagcccggccttctccgtgcgtgccaagagcgggaagctgatggcatgggccgggcaggcgtccctgcactcgccgcacttggtgcactccgccagggaaaccgacgcttcgggatgatgcaggtcaatcccctcggggcacacgtcggcgcaccgcgagcagctggcgcccgagcaatgcaggcaggactcggcggccaccgtcggacggaacgtgcggttcaaccgcgccatgaggcccagcagggcgcccagggggcagaagcggtggcaccattttcgcaagagcacgatctccgccacgaggatgacggggaacaccacgagcgacagcgtcgcctcgctgaactggagcaggcgccaaagggcgatgaaggtggccacggaaaggcccacggggcagatgaggcagaacaccgggaacccgaaggcggccgtggtgagcaccgtggccccgagcacccagttgcgcgagtcgttggccccgtcgcgctcggccggcgtcggcttgtcggccttccgctccttgatgccgaagacccggcgcagcaagggcacgggacagccccaagcgcagaaggcacgacccgccagggccacgagaaccgcaacgatgaccaggccaatcagcagcggcggcacgatggtgcgcgaggcgatggcggcctcaacggcccccaacgggcagatggcggcgatgtcaccgatgccccaggccgacggcgttcccgtgcccgtatgcacggcgagtcccacgccgaccaggcccaaaaggccgacggcggctatagtgcgcttcgtcttcaacttcatgggcctacacccccatctcgctgccgtcttccaccaccgtgcgcccgagctggccggctgcctcgggaggcaccaccacgatgccccgccgcgtaccgccggcaaaggtcccgtacacgagcgccgtgcactcgaactcgcactggccgcagccgttgcacgcgtcgccgtccaccaccggatggccgtcgacgaaggccagcgcgtcgaaggcgcaggagtcctcgcagaccgtgcagccctggaaataggacaggcagcggtccttctgcaccaccgccacgcccagcttctcggccgtctcgtcgaaggatctcagcgcgccggtggggcacacctcgatgcacttgccgcaaaaatcgcagtagcccttgtggaagtcgagcaccggcgtgcgcgcccgcagaaagccgtcgcccaccgaggccacggccactgctcccgtggggcacacgctgcggcagcgatcgcacttgaggcaggcggccgcaagggcgcgctcgtcctggccgcccggcggacgcaacagctcgccctcccccgcaaaggccacgccggccccgcccacgcccgcgcccacggcgcagaccgctgccaggccgacgaagctgcggcgcgtcatggcggtcatgacgccaccgcgccttccgcggcggatggagtgccctcgcaggcgccatcccaggccgggcgaatctcatccactgcggcaccgagggagagcgccgcggcgacctcgtcgaagaaggccgcctccgactccacgtacccgcgcgtcatctgggcgacgccgcggtagaaatcggtctcggcgaactcgtccacggcctcgcacagagccggcagccagttctgctgatggtgcacgaagaagctgcgggccagcgacaccgcgtccgccagcgacaccgcgtcatccccgtcaagggcctcgttcgcgcggtccgcgaggactgcggcgaactgcagctcgaagccgagatggtcttcgggggtcgtgttgtcggcaggcagatcgaggccgccccgccggtagtaggtcaccgcgccgtcgcgggcatcctgcatgaggatgcgctcctcgctcgtgaacaccgactcgtagggcggcgccagaatgcggtcgtagctgccggcgccgaggaacacgcgcgcgtagtcgacggccagctcctggcgggtgccgccgtggcgatggcgaagatactccttgatggcgcgcagcccctcgtcgatggccgtgccatcgccggcaatctcgatatgggcgaatgcctcgatctgctcgtcggtgagctcgtacaggtacaagctggcaaggaatcggcagaaggcggcgcgcgtctcattggcctcgcgcatttcctggatggcagccccgtcgagggcgatgcggttggtctggtccatagggcaactccttgggaagggccgcccggccgggaggggaagaccgggcggcgggaacagtgaggctagatgctcacaccgaacagcgacatcagcgcgatggacgcggtccacatgagcacgcggtaggcgaccgccccgatgaacgcgccgacgacggccacgatggccaaagacagcgcgccctcggtcttcttcatgccggccacgccgcaggccgcgggcacaacgccgccgcagacaacgacgccgacccagaacaagatcgcggagtccccgcccacgatgccggccagaaggccgtaggccagggaggtcaccaacgccgcggccgcgccgacgagcgtctcggtggccgcgaaggacagggcagcgccctcttccctacgggcggcgcacaggaggtaccacagggccgtgcccgcagcgagcgccgtgcccaggtagcccaagggcagcgcaacagtgttccaggccagctgcgaggacatcatgtaggaggaaccgcacgcataactgaagacggcggccatggccacggcgacgacaccgaggcccttgagcaccccttcggaggcgccgcgccgatacagcacgaggaacgcgacggcaaccacgacgtcgatgccgaggagcacggcctccaggaaaatgcccggagccgggtgcgccagcacggccatgatgcgatcgacgtgggacagatgggtcgccgaggcgatgccgcccacgatgatgaggacgatgcccgtgacgaccgccggcacaaccgttttcttggccaggcccttaaaggcgtcgaggccggcgcaggcgacaagccacgcccccgcccccgacagggcggtgaacagaacgagggaccattgaatttccatgggtgctccttactcggccaccgggtaggcagccgtatgcggatgatcggccggcgcgatgcgatcctgccattggccgatcatgctcgtcatgatgtaacgggtcgcagggtggttgcccacgtcctgcagggtgtggatgtcgctttcggagtacttggccagctccttggaggcatcggagtcagggtcgtccaagtcaccgtagaagcgggcaccggccgcgcagctcttcacgcaggcgggcagcttgttctgggaggtgagatgaccgcacagcgtgcacttctcggcgcacttctcggccgcgttccacgagcgcacgccgtaggggcaggccatcatgcagtacttgcagccgatgcacttctccttgtccaccagcacgacgtcgttgccgtcgcggtagctggcgcccgtggggcacaccgacacgcacggggcgttctcgcactgctggcacatggtcggcagcgcgtagcgggtcatgtcggggtactcccccaccgggcccacggtgaacaccttcgaccagcgctcgcccaaggcgacgccgttttccatcttgcaggccacctcgcacccgaagcatccggtgcagcggtccaggttcacaacaatgcaattacgcgccatagtcaaacacatcctcggtcttgtcgctgggagcgggcatccagggctggaactgctcgggttcgatccacacgctcttcaggatctcgtcatcgctggggcttaccttcacctggaagccgcgcagggtgtaggtgccgtactcggggttgtagggcggatcgttcttggtgagcacgttgatgttcattaccttgtaggcctgggccgggtcgtcggaatccagcagctcgggagcccagaagcgctcctggtacacgacgcccttggcgatggcggtggtgacgcgggccttgccgtgggtcttgccgcggcggctctcgatgttcacccactggccgtcggcgatgccgtacttctcggcgtcctcggggtggatccacatctccggcaccgggtagatctcgcgcaggtagggaatgttgcgcagggtgccgtggtggtacatgggcagacggccctcggtcagcacaagcgggtactcggtgtcggtcaggggcgactcggccggctccatgtagtagcacaaaggctcgtagtcggcgctggccggcggcagcacgagcggcttctcctcggcgcactgagaccacggagcaccggtgcggcccagaatgatgttggactcgcagtacacttccaacttcttggagggggtaccgaagcccttgggcttgccggggttctcctcgtcctcggccaaataggtctggtaggtgcggtactcctcgggcgtcgcccactcgatgacgcccttctcgcaggcctcgtcccaggtcatatccagcttgttcagatgctgcagctgcttttcgtactcgttcttgtagaacggcgtggtcatgcaggccgcctcgtcgaaggccttggggcagtgggtgttgccgagctccgcgcacttctgcacgatctgggtccagatgatgccctcttccacggtctcgaacaagtgcgtgaccgcctggcgcatgacgatggtgttcagctgcgggatggtgaggttcgtctccaaccactcggtggtgggcagaagcaggtcggcgcagagcaccgagaacgccgtcgggtacatgaagcactgcacgatgtagtcgaggttcggcacgatctcatcgaggcaggaggagttgccgagcaccacgtgcttgttgccggagcgctcgatccacatgtggatctggtaggggtcgccgtccttcatggccttgaacaccgaggggatatgcgccatatcccagcacaagatgcccttgtgctcgatggtgccgcagcgcttcatgaccttctccttggagagcagccgcggcgtgttgcccagctggtccttgcaaggggcgggcgcgaacttctgcagcatggtgcccggcttctcgacgttgcccatgaggaactccaggttcagggcacccagggcgcactgctgggactgcgcgtactggtcgatgcacacgccctgcatgatgccggactggccgttcgggtcggtgtagatctcgagcgcccgctcgatctgctcgggatcgagccagcagatctcggcgcccttctcaagcgtccactcctcgcaggactccttcagaagctgaccacctgtggcacactgtatgccgttaacctcataggtgccgaacagcgccggagcaagtccctcgttcatcgggaattccacaacgaccggggcgttcttctcgggatcccacaccacgtagtcggtatcggtgccgggcagccccgcctcggtcgccttcagcgtaaggcgcgtctcgggattgatgaggtagggcatgttcgtccaagtacggcagaactccgcatcgtacttctcattctcgagaatccagcgagtccaggtgagcagcagagccgcatcggtgccggggcgaatgggcagccacacctcggccttggcggcgtccagggtgtagcgaggatcgatgaccacggtgcgcaggccctccgggcggttgcgcagctcggccagggcgcgaccgccggtggccaccgaggaattggacgggtcggtgccccagagcaccagcgaagtcaccggactgtcggtgtaatagtagtcccagccgttagagtcggagaacgacaggttgttgggtttgccggcgccataggccagaagagaggcgcccatgcgaggcagatagcactgcgagcaaccaggttcccacacgttgggggtgttaatggcctcgccgaagcgcttcacgttcgagaagtgcgggtttccgccgccgcccgtggaaacggagatggcctcggagccgtacttgtcggatatctcgttgatcttggtcgcgacctcggtaagcgcctcttcccacgagatgcgctcccactggttggttccgcgctcgcccacgcgacgcatggggtacttgttgcggttcggatgatagagcgcctgaatgccggcgaggcccttggcgcacacgccgccttgggacatggggctttccggattgccctcgatcttcacgacgcgaccgtcccgcacatgggccagcacggcgcagctggcaatgcaggcgcggcaggatgtcttgacgatcttcacatcggacgcctcgtcggcatgggccggatcaaccgccgtgaggctgtcggccgcgctgatgcccagcgctcccgccgctcccatggccgccgtggatttcaggaatccgcgacgcgtcatagtggctcgactcataagccttctccttcttcctcttggttggtttgtatgtctctggaacagatggcgatctgaacgttaggccagcagtgcgcgcatgcgctggcccgcttccgtggttcgccatgtgccgtcccacgagataccgtctacggtctccaacttggagatgaaatagccggggtagatctgcttggggaaactgagagccgcatgtccggccagggcctcctctatgtcggctttggaagctcccgtctcgcataaggccagcacgcggtcgtaggcatcgccgtagccgtcgggctcggcggccagaagctcgctgaaacgcttcgcgggctcgaactcgtccagtgccgcgcgaccgatctcggtggtgcgcagcaggtagtccacaggctggtcgggaagatcggaacaggggtcgtcaagaggatcgagagcatcgacatcctcgcccccgtctgcagcgtccacgacctcgggagtcttggcgccgtccgagagcgagccgttggcatcgccgcccagctcttcgggcacctcaatggcctccaccgccccgcacttcagcagcatggcataaagcgcatggggcgtctgcgtagtgagtgccatggcccgcgaccccgcaagcgcctcctccgcctcgcgaaaaggtctttcctccaacgtttcgcgcaagcagccgagcagcgccagggtatttgcgcgattggccaaaagggccttgcgcaccgcttcgtagttctccatgtatctctcctcgctctcttcggcgataagagcactctaccgagaaggagagcgggaccgaaacgcccgcaattgatgaaaaacccggcaatcgttggtgaaagagccgcaaaaagggccatcacccatggttggtgatgacccgataaagcacccgatcagactgaaaattgcgggtgagattgccgtgcggttcctacttctccaaaaggtcgatggcttctaccagggagcgcatgatgttgcggcgggacaaggcaccgacgagcttgccgttttgcaccaccggcaccttcttgatgcgcttggcggcgaacagggcgcatacctcgtctaccggcgtcgaggcctccacggagatcacgcggcgggtggccacggccatgacgctcaagcccatgagctcccgaaggcgcgtggcggcgtcctcgtcgtcgatgtagcggtagccgttcagcagcgtggaatcgacgagcgcgatctcggtcttgccgaggtagctcgccacgtcgccgtcggacacgaagcccacgagatcgccggaggcgctcaccacgggaagcccgctcgtctggttggcatccataaggcggatgacctcggccatggtggcggtgtcggccgcgcacaccggctcgcggttcatcacctcggccgccgtgtaggtgcgcgcttgatcccacgactcgcccgttgtggcatccacagctacaccggagatgccggccgcatagtccacgggctcctcgccgtgctcggtcggtgtggccgccaccgcccccgcagctgccgccggacggttacgcaccaagaagatgatgacgagagccgccacgcacatgagaccgaaagtggtgcagtaggccatgtgctcgcccaggtaggcctgctcggcggccggtgcaccgggcgccaccaggggcgccagggccgacaccgacacgagcaccgccgtgccgaaggagcccgccacttggttcatggtgttggaaagcccctgggcatgctggatcacgcggttgtccagcgagttcacgccccaggtgttcaacggcgtcatggtgaactgcaggccgatgacgagcgtcgtgtaggtgagcaccaccgtgatgaagttcgcgtcgatgccgaggcgcgccaggcccgaggcgcccagcacggccacgagcacgccgggcaccgccaccttccgcacgccgaagcggtcgaacaagcggcccgacacaaggcccgtgaaggcgccgatgacggcaccgggcagcatggccaaaccggacatcgtggccgtgaacccgagggtgccctggatgtacagcggcgtgatgacctcggtacccaagagcgccgcctgcacgatgatgacgacgcaggccgccgtggcataggggcgcgtcttcaggatacgcacgttcaacatgggctccggcaacttaagctgacgacgcacatagaaggccaccagcacgatgcccacggcgataagccccagcgtgagcgccatattcgtcgtagaagcgaaggtggaaagcccgtagagcaggcacacaaggcccaccgtggacagcgccaccgacagcttgtcgaaagacgtgcgggcgaaattgccgtagttgcgcagcaggcacgcggcgagcaccaccacgacgacaccgagcgccgtcacaatggcgaacagcgcgcgccagcccacggaatccaccagaaggcccgacagcgacggccccaccgccggggcgaagccgatgatgagcccgatgacgcccatggccgtaccgcgcttctcgcgggggaacacgagcagaatcaccgtgaacaccatgggcatgaccgcgcccgtgcaggccgcctgcatgatgcggccgagcaaaagcacccagaagttcggcgcgatagccgcaaacaggctgcccacggtaaataccgaaagcgacgtaacgaacagctggcgcgtggtgaaacgccccaccagataagccgaaagcgggatgaccacggcctccaccagcgcgtataccgaagtgagccattgggccgtcgtcgcatctacgcccaaatcggccataatggccggcagcgccggtgacagcatcgtcagattcagcaccgccaaaagcgtgccggcgagcagcacgcccaccatcaccagttcttttcttccaacacccaacgccataccgcatcagcctcgctctcatctcgcatacgtaaaaaagtcgaatgttcggatactacgagaaacagactgtttcgtaagcgccaactcggccagcggatgaaaagctccacaaccccgcacactgcgcaggtaaacgctaatcccctaattcgctcaacatatccaaaagctcttggcgacggtggatgtccagcttagtgtagatatgcttggcatgggttctcacggtgttctcgctgattacgaggcgatcggcaatggcggccatggaatttccccgggcaataagctccattacctcagcttcacgcatagacagcccataacgctcttgcagcaccagacattgtttcgaaagccgatcgcgtatcgctccggcatcttcagaagccgaggcccgacggcgccgacgcttcacgggagcagaatcggcgacagcagcggctggggcgttaggcaatccagaagcaacctctccggactcgtgcgagctggcaggcacggggcgagcttccgctttagacggagcggcagcaagagacacaaactcgatggggtccatcgtcaccgcgcccttggtcaccaagggcctgacaagcgttcccgtggacacaagcaacgtaaggcctaacccgtaactagctatgatggccacgaaatacagccattgggaacccgttggcaccaccaagtcgctcgcccacccaaaaaggaagccaagactttggagaatgtaagccacggcaccgaaaaacccatagatgaacaccggattaatgccgcggtcgcgagaaacctgcgcacactgcatcatcatgagcatctgcaccaaagagaacaccatgtaagccacagccgcaaacgcattcagataaatcggcccgcagaagggcagcagcagaaagcccgtgatgagcaacggatacgccacgcggaacaccgagataagcccgaatcggaaactcatgcggtgccagagcaccaacagcactaccgccgacagtagggccccaagcatggaagcgctgttcaccagcgagctgatttcctcgtgaagcagcgccacgccgcgaatgacgccgctggcgaaggcaagcgaccccacgcacaacgcgctgcgccagtagtcggccacagcctgacgatagacgcgaggatgctggcgcggaacatcttcgaacataggttgttcgaaattcatctcccgtaccgaaagcgctacgcacagaccgcataacggcacaaagatgagcggaacgaggaacgccgtcagcgcgataggcaccagatacagcgcgaagtaaatgaagggcgcaatagccgtgcctacgatgaggcggaagttgccctgtcttgcatcaagcgaagcgaaatagcgctgccataacatgaacatgcccgcgcagccgacaccgagaagcacaccccctgcgcccacgagaagcaacgttgccgatgccacatacatggccgcaataagacaagcggagccgaggaacagcagaatggctgaaagcgaaacgagcatgcggcgagcaccgtaaggaaagtagtacgaacccagcatgcttgccaggaaggctccaccgaaagccactgcttgcgccaagaagaacacgagcgtcacttccacggtctggaattcaaggggcaggaaggggaagatgcctccccacaccgaggtggcgttcaccgtgagaaaacaggcatagccccaactggacgcatggccgattgcgcttgcaccctcgcttgccacagcctctcctcccctcttctctcgacggcacgcatggtagcatagcaaggtacgcgcagaaggcacatgcccacatttcggcatcactcaaaaatgcgcgacctggggttttgtccttaaatcacactcgtcgtgtgattcggcgcgctgtgcttttcggtacttttgatagcggcgagaggacaattctattagaggagggactatgactgaaacccaatccactctgtcgcgccgcaccttcgtcaaaggctcgctcgcaagcctggctgccacaggagctgtgggcagcgcgctctacggctgcgcaccgcagacccaagctggcaacgaggagatgcccgctactggcgaagaggccgcccccgatgagattcattggagccagtgcaacgtcaactgcggcggcaactgcatcttccagtggcattctcgcgacggcaaggttctctatatggagaccgacaacaccggcgacaatgaccttcaggcccgtgcctgcctgcgcggccgctccatgcgtcgctggctgaacagccccgaccgcctgctgtaccccatgaagcgcgtgggcaagcgcggcgagggcaagttcgagcagatctcctgggacgaggctatcgacaccatcgccgagaagctgaagtacaccattgatacttacggcaacgacgccatccatcgagtgtattccactggcatgtactccaccacgggcaatcccacatctcgtttgctgaattgcctcggaggttacctcgagcgtcattacgactactctgccaatatgattttgggcagcatgccgtacatgtacggagaccagttctccccgtacgacaacgtgcattgctcttcgttctctgaagcggcaaacaactccgacctggtggttatgtttggcaacagccccgctgaaactcgcatgggaggagctaatgcggcttgggatttcgctcgtgttcgcgagggcgttctcagccgcggaggcaagattgtcaacatcgactaccgactgaatgaaaccgcttcggggcatcccgacgagtggctgcccattcgcccaggaaccgatgcggcactctgctccgctttagcccatgagtggattgttaacaatcaggttgacaaagagtttctcgatgcttatgtcgttggcttcgacgatgacaccatgcccgattccgccaagggtcaaaacaagtcctacaaggattacattatgggcaccggttacgacaagatagagaaaaccccggaatgggcggctcccatcacccagattcccgccgagcgcattcgcgaacttgccgccgacatggcagccgccaaagccccatacatttgccaaggctggggcccgcaacgtcataccaatggcgaagacaccacccgagcaatttgcgctctaccggtcatcctaggaaagatcggccttcctggtactaattctggccagcgcgaaggctccccctcggtgtacctcgtaggaagtctgccggccggagaaaaccccgtacaagtaaccatcccttgttaccagtgggttaacgccgttgaccacggccacaccatgaccgccaccaacgcaggcatcaaaggcggcgacttgaagaacgacatcaaattcatctggtgctatgccggtaattgcctcacaaaccagcacggtgacatcaattacacccacgaaatcctcgccgatgaaagcaagtgcgaatttatcttggtgtgggataccgtcatgaccgattccgccaaatatgccgatatcctcctacccgacgccatgcgctccgagcagctgaacatgcagacccaaggatattccgagtactatacgagcgttatcgtgggaggtcccgctcaagaggcccctggcgagtgccgctgcagctacgacgtgtgcgctgatatcgccgatcgccttggcgtaaaagaagcctttaccgaagggcgcacccacgacgaatgggtccaacacctctacgaggaaggcgctgccaacgatccggctatgccgacctgggaggagattaaagagcagggtatttataagcgcgagcttgaggggtccatcgctctcaaggacttccgagatgaccctgttgccaaccccctgggaaccccttcgggcaaaatcgagctcttctctgaacagctcgtggaaattgccaacacctgggagctcgccgaggacgaggttatcaaccccatcccggttttcaatcccggcttccaaggctatgggtctgtcaccgaggagtaccccctgtattgcgccggtttccaccacaagagccgcacgcactcctctttcggatttattcccgaaatcgaagcagtggctcgacagcaggtatggattaaccccgtcgacgcagaagcccgctctgtttcggacggtgatgtggtatccgtcgtgagcccggccggcgagatccgcattgaagcaaaagtaacgcctcgcatcattcccggcaccgtgggcattccccaaggcgcttggcacaaggccgacatggacggcgacaaggtagacgaaggcggttgcgtcaatacgctgaccacgtacaaacctacgccgctggccaagggcaacggtcctgctcattccatgatcgttcaggttgcgaaggcctaaggaggagaagagatgactcagtacggattctatttcgacagcactcgctgcactggctgccgcacctgcgagatggcctgcaaggattacaacgatctgcccgccagctacgccttccgtcgcgtgttcgattacgagggcggcgactggaaggacaacggcgacggcacctttgagccgacgagctgggcctaccatgtgtccatggcctgcaaccactgcgagatgccggcttgcgtagccaactgtcctcaaggagccctggagaaagatgctgatacggggctggtctcccgcgacgaggagaagtgcatcggctgcggtacctgcgtgaagagctgcccctacgaggtgcccgtggtggataccgagaccatgaagtccatgaagtgtgacggctgcgcggctcgcgtggccgagggcaaaatgcccatctgcgtggatgcctgcccgctgcgcgctctggagttcggcgacatcgaggagcttcgcaccgcgcatccggatgccgttgacggcatcgcacccatggcgtccccggaccagacgaagccctctgtggctattctcgcctgcccggctgccaaggactgcggcgatgccacaggctttatcgccaacccgaaggaagtggagaacgcctaagggctatccagggccgccgcgcccctcccttacaagcggcggcctgcttccgatagtatggaacatagcgcggagccctccgcgctatgccgtttgaagggacttgagaccatgccgaagggattttacttcgataacgctcgctgcaccggatgcagaacctgcgttatggcctgcaaggactatcatgatcacggggccgacgagggctttcgccgcgtgatcgactacgagggcggcggttggacagttgccgaagatgggacgttgtcccaagacgctttcgcctaccatatctcgcttgcctgcaaccactgcgccaatcccgcttgcgcgcaggtatgccccactgaagctatgcaccgcgacgagctggggcttatctggcccgaccatagcaaatgtatcggatgcggctactgcaccatggcttgtccgtaccatgcgccggccatcgacaagacgctcaagcgctcaagcaaatgcgacgggtgccgtgagcgcatcgcagcaggattagcccccatctgcgtggaagcctgccctttgcgcgctctcgattttggcgagaagggcgaactgcacgagcgccacgaggactactgggatgaagtgcgtggagacattcttcccctccctgaagagtcggccaccggtcccaatctctttattcttccctctccggctgctgccgagaaccgctcgggcagcattgcaaatcgcaaggagctaaacctatgacgagcggcttggataatctctctttggcgcttttcacggccctagcgcccgctggagttgttgcattcatcgtgcttgccttggcacgcatcttttctgccgaccacgatcgcgctgtgcgcatcgatcgcatgatcgccctgcccttcgccgtagccctgcttggctttatcgcctcagccacccatctgggcacgccggccaacgcgttgcatgtgtttgccggcgtcggcacgtcaccgctttccaacgaggtactctccgccgtggtgttcctgtttcttagcggctcctattggatggccgccttcaaggttaacttccccgacgcacttgcaaaaccgtggctggttgccgcctgcctagccggcatcgcccttttggcctgcacttctcaagcctatgccgtgcgaaccgtgcctacctggaataccccctacacgccaacgaacctcatctttgcgggtttgttcgaaggtgccgttttcagccagatattcttgtccgccgcaaaagcccctttgcagcggaccggcatcgttctggtagggcttgctggagtaagccttgtcggcaacattgccgtcatggccgtccagaacaccgccttgaacgctatcgcaaacaatgagtttgcagcagctacgctagcacccgactactcactcatcattgcgttctacgcgctggcaggacttgccgcaatcgtccttgatggatgggcgctccgcgccgcaacaagcaccaggacgcgtttcattatgcgcattatcgccggcgtcctcgctttcgccgccgtcttcgccgcccgcaccgtcttctacagcctccacatgaccatcggcttctagcaaccaaagtcgcccgctcaaccccgttaacgcagcgcgggagggtggcggggtcgtcagccgagacctctgaacaccaaaaaagagggtggtcgaagaccaccccagtaaatgcatgaaggagcgaagcgcctgagcccgaagggcgaacagcgtagcgggggctcggacgacgacctcgccgccctcccgcgcggacacgcaggttacgccgtcgtcttcaccgcacccttctcgcagcggttgccccagctgtcgatgatgtccttgtcgcggtagacgcaaatgacctcgcagtggttggcacacttctggcactcgatctcgcgggtcttgaaatcgaagtcgagcatagcctcgaaatcgaaggagccgtcggcaaacgggccggactcggcgccctcaatgggccccgcatcggccgcgagcagcgccacgccgaatgcgcccatgaggtgtccgtcggggtccaccgccacgggcatccccagctgttcctcgaaggcatgcaccacgccggcgttcttcgacacgccgccctggaacaccacgggtgcggcgatcttcttgcccttgcccacgttgttcaggtagttcgacgccaccgcgttgcagagccccgcgatgatgtcctcgcgcgcgtagcccacctggatcttgtgcacgagatcgctctcggcgaacacggtgcagcgggcggcgatgttggccggcttggtggaagtgagcgcgatgtcgccgaactcctccacctccacgcccaagcggtgcgcctgagacgacagaaacgagccggtgcccgccgcgcacagcgtgttcatggcgtagtccaccgcgatgccgtcggacacgcagatgatcttggaatcctggccgccgatctccagaatggtgcgcacgtccgggtgcagatgagtggtgcccacggcatgggcggtgatctcgttcttgatcacggaagcccccagcatggcgcccacgagccggcgcgcgctgcccgtcgtgccggcgccgacgatgtccacccccgcgccttccacctggcgctccagctcgcgcacgacgttcttcgacgcctcggtcgggttgccctcggtccacagatacgaacgcgcgatgatggcgcggttctcgtcgatgatcacgcccttcgtggaaatggagccgatgtcgatgccgagatagccctttgtcatttgctcttctccttcttcatggaaagcatgtcgtagaacgcctcgaggcgcgtgtccaggcccgtgtcggaggtctgggagtcgtaggtgaggtacagcacaggcaccgaatagtcctcgctcactttctgcagcaccgggatgcagtcgatctccggcgtgcacccggcgctcttcgcgtggatgaggccgtcgaagcccccggcggcgtacttcttcgccgccgccacggtgagcgtggaggtgggccccatgtcgtaggtcaggtagtctttcgcccccacccgcaggttcggctcgttgtagcgaaggtagcggttcgtgaagttcagcatgcggtgcacttccacgcccatggcgacgagcttgtggtcgagccccaagttgctgcgctcgtcgatggccgtgaacatctcgccgacgatgccgatgcggatgggatcggcgggcttggcgagggggatggcgcggaaggcgcccatggcctcgcggtacgcctcgttgatgtcgcgctcgtccaggcaggtgcgcatggcgtccatcgccgagacccaggcggcgtcgaacgagccgcgctctacctcgaagccagcgttggccaggtagaagtcgcgcagggaatccaggtgcgcgatcatcttggccaccgccttcaacttcaccacgccgtggggcacgtcgatgttggggttcacggttttcagcacttccttggcccagccgatataccccagctcgatgccgcgggcgaagttcagcatgatgaagtcgtagcccatatccctcagaatcgactcctgcagctcgccgtagtagccgagccggcacgggccgccgaactggatgaggatgtcggcgcccaaatcgagcgcctcggcgaaatcgcccaggatgtgcttgaagggcgtgcacacgtaatcgctcgagttctggacgcccacctcgctggcggcgcgggtggcctcgggcaggggcaggtagtccacgtcgagcacctgctcgcagaagaatttgaacgccggatcgtagtagcagtagcggaagaacgccgccttggtgtacttgtggtgcttggccttgtgcttggcggccttggcggccttgcggtcggccagaagcgtgggagcatggcgccgctcgagctcgaccgccaccgacgagcgcacctgctcgatgagtgcctggggcttaggcatggacgtagcctcccttctgctggaagcgcaggatgtcgacgaagctctccacgcgggtctccacgccggccgtgccggactgcgcatcaatcattaagttcagaatgggcgtgccctggatgcagcgcatgatggcgtcgtcggtcatggaatcggggccgcaggggaaggcgctgatgagcacgatgccgtcgatgctgtcctgcgccaggaggatagagccgatgagctcgcggttgatgagccacggcatggtgccggagaactcgaagctcttcttgtacgcgcgctcgtgatccatggcgtcggcgtagacgaccgtggcgcccatatcctcgagcgaatcgatgaccgcgccggagaggtacggatcgtgggagatgtagggatgggccaccacgagaatgccgagcggacgcgcaaccgcatcgtcgccggccgcggcggcggcatcggcggcccggcgctcgtcgatcaggcggcgcagcgtgcgctcctgggcggaggccagcgcctcgtcgtgggcgcgctgggcgtcccaggcggccttgaaggcggtgcgggcgtccttgggggcgacgcccatgcgggcggccatatcgcagaaggcgcggcgcacgtccttcgccttccgggcgttttgcacctcgcaggagataacgcgcagcttgtcgtcgcggaaggtgttgcgcaccatatcggtggccgactggaacttcgtgcagaacccgctgcgatggtcgctcgtcgggtagcagggaacgaagacggcgtcgcaacgccccacgaggctttccacatgcccgacgaacaccttcgaggccaggcagcactcgtccacggagagccggtcgccctcatcggcgatggccttgtccgtcggatcgctcaccaccacggtgcgcccgatggattcgaagaacgtggtccacagcacgccgaagcgatagaacaaaagcgcgcggggaatgcccactacctgcacatcagcccaatctgtcgtttggggcacgggcaacctcctcaggtgtcgaggcgccgacccagcggcccggcgcgaataagtagtaccggcaatcatagcacagcgccccttgaacctccgtccaaggggcgctgtctgcacatttcgaaatgctgcccgttactcccggcccctccgtaggggccgaccgctactccacgtgaatttcgagagccttcacaccggcgggcgaccaggacgtggcgaacgactcctccagaggacccttcacatcggccttgcggccaatgaggcttttgccgttgtcgtcgaggcccgaggtggccacggcgatggtggtcagccggtactgagtgccgttcaggttcatgtccagcgggcgggtgagcttcagcaccagctggacgctgccgttggcattatccgtcgtgccgttgttggtgtagttgttgccggaggaaagacccgcagcgtcttccaccgcctgaagcgtgcccgacagcgacaccgagtcgccgaacttgacgttgccgatgttctcagggtcggtgttggccggatccaccgaggccggcgagtccgcgccctcggcaggagcgacgggaatctggtttgtctgcgtgtcgatctgccccgcatcggccaccgtgacaagccagccctcggtgttggaccacgccacgttcagcgtcaccgtcgacgtgcgcagctcgctcgtcttcacaccgtcgccctcgctttccacggtcttcgaaagatcgacggtgatagggccgccgtcgatggtgagatcggaggcggtcttcacgatagcggcatcaaccatggcttccccgtaggtgggatcgttggtcgcaaggatgtcgttcagattggccaagatgtcgttggcgctggcgctggccaaaggtaccgccgtcgcctctcccaccactaaatcgccgggaacccacgtctcgccggcgttggagtactcgaagggcagcgtcacgggcacgttgatctcgatgcccttgtttttgaaagtggccgtggccgtcgcctcgcaggtgacgatctggttgcccggcgtgcccaagttcgtgggctcgttcagcacgatgtcgctgaacttcgggccgatgagcgcgtcctgggagacataggcgtactgcgagatgtccggtgcgtccatggccacctcgtcgaaggcggcgatgacgcgggcgtcggacagcggcacccgctgggtctcctcggcgaccggctgctcgttgaagaagccggaggtgaacaggtaggtgagcacgccggcgcccacgagcacgcagatgataagaccgacgatgacggccgtgcgctgccccttcttcacatcgcggggctgagcggcctcgacgtcgccgtaatcgtccccggcactctggatgaacgctgcagcggcggctttcgcggcagcggccttcttggcctcggcggccgcacggggagaaagaccctcgtcgggggcagaatcggccggagaagcgctgttgcgcggatcgagttcagtcataattcctcctgagacagcagggccaacaccgtgcggccctagggtcgcagtatactgtatttgaccctgtgtcggctagggcagcgggcgaactattgggccgatttccccaggttgccggcgatgacgacgcaaatcgccatgagcaacaggttgaagatgagcgacgtgggaagctggccgcccgtggcatagcacagccccaacccgaacaccgaggcgaccacgccggccaaagcgaggctgcgcagggccgccgcgcgccccgggttgcgcgaggccgcgcgcccgagaacccccgccgcaatggtaatgccgttggccaccgcagcggcaacgccgagcacaagggcggaaagcggaagccccgtcgcggcggccgccccgtcggcgagagccccgtagatcaccacgccgcccacggcgagtccgaacaggccgcaaatcatcagcaggtacgagaacatgcgcagataccatgaaatggtgcttgtctgctcgactgccaccagcgctcctttcagcctgctgccctgcgggcaatgcgacggacgcccctcaagcttgcgggcttgttgtgggcttgccgcctgaagatgggggtcatgataccataggcccatggatccgacggttcttcaacaaacccccttgcagccctcgcccggcatcggagacggcagcaaaagcgagcgcactcccctggtgcttcgcgtgttcggcgccctgctcatggccgggggcgtggccgtcgtgcccgaagtgatccacacgctcgcccaaatgggaaccgtcttcgtcgagaaaacctacaccgacgactcgctgctcaccatcatcctgtacgtcacgctcgcgctgtccgcctgcttctgcgccctggcctccggtgttctcggcttccgcctcctgcgcggcaaccgccggcgcgcccgcctcatcgccgaggccgtggctatagggctcgtcgtcgccttctccgccgatctgctgctgttcggcgtgaacccgggcctgtggttcctcggcgcctgcgccctcatcctcatcgcggcccacgtctgggtggatccgtcgctgtccgacgagcgcgagctgcaacggcggctgcgactcatgcaaacgcgcgaagaggccgaggacggcaccctcggcctggacaagaccggccgcggctatatcgaactggacttcttcaacctgttctggatcttcgtcatcgcctcggtggccggggtggtcatcgagtccatctaccacgtgctcgtggtcgacttcggccactacgaggatcgcgccggccttctgtgggggcccttctcccccatttacggcttcggcgccgtgctcatgacgctggcgctcaaccgcttccacaacgcgcccatccccgtggtgttcctcatcagcgccgtcatcgggggcgccttcgagtacttcgtcagctggttcatggaatacgccttcggcgccatcgcctgggactataccggcacctttctcaacatcaacggtcgcaccaacttcatgttcatgtgcatgtggggggcccttggcgtggtgtgggtgaagctggccctgccggcgcttttgcacacggtgaacctcatcccgtggcgctggcgctactcgattacggcactgtgcgcggcgctcatgatcttcgacggcgccatgacgctggtggccctcgactgctggtactcgcgcttggcaggtgcggcgcccgacaacgcgctcgagcagttctgcgccgagcagttcgacaaccagtggatggaaaaccgcttcgaatcgatgagcatccaccccgatgccgcccatcgctcatcctaggagattttcgtgactgaagacccgtacgacatcctcggcgttccccgcacggccacgtccgacgagataaagaaggcctatcgcaagaaggcgcgggagaaccacccggacttgaacccggacgaccccgaggccgaagagcgcctgaagaagatcaacgaggcctacgaccgcatcacgaacccggagaagtacgcccgcgaggacgcccgacgctatcggtcgccctacaaccccacctacaccggctacggcacgccgggcggcaaccccttcggcggttccggccccggcaatccctacggtgggggtgcgcccggcggcgggtaccagtaccagtgggtggaaatcaactgggaggacttgttcaacacctggaaccaggcctcctcggtgccgcggccggaggtgtcggccaccgattcggccgagctgcgccaggcggtgctgttcatcgacggcggcaactacaaagcggccctcacggtgctcgcggccctgcccatcaaggagcgcacggcccgctggcactatttagcggcgctggccaactacggcgccggcaacaccgtggccgccgtggaccagatccgcaccgcccgcaaggccgaccccaccaacggcgactaccgccaggccgaggccgtcatcggcgcccgcgcccgcacctaccagcaggaaagcgagagccgcggcttcggcggctgcgtggatcccagctcgctgtgctgctgtctcatgtgcggcccggccctctgccagccgtttttgttctgcctgtagtttattagtagcgcggagcggaaagcgtcgtccattcgggggcgtagcgggcgacccagtgggccacgccgcggatggccacggcctcggcgaaggtttccgccaccgacagcaccacgtacaggatgagcgtgcagaaaatcatcgggccggccaaagcggcgataagcgacatgatctgcgcgaaggagggatcggccgcaccgcctatggcggcgatggccggagccgcgcccatgatgcagaggaacatgatcgagaacaccacgatgctcagcacgagcgagatgccgatgacgatggccatggggatgagcgtcaccgcgaacagctggccccagttgcggcgcgccttctcccagatgtccttcacattgaagccatcgcccaggctctgccccatgatcatgcgcatctgcatgatgatgccggccacataggtggccagggaaacggcgatggagacgacccagccgatgaagggaatccagccgaagataccgccgatgatgccgccaaccaggcccaccaccagcgtcagcacgaaagcgtaaaagccatactcgaagttcttgcccgtcacgattttctggggcaagaggctgcggccgccgaagggcacctcgcgggaccagaacagaaggtagccggccacgacgaagttcagaatcggcacgcacatgatgaggccgagcaccaacagccggcttatgtagttcggcgtcgccttcacgtcttcccaggcggccttcaggcagctggtggtgtaggcgggcgaaggcgcgggcgcaggttgcaccgggggcgtgtagttcatcggatccatgggaacctcctctttccggagtcgaaatgcctgcaccttgcggtacgcgagacgccgcgcaaaccagaggcgctccgactcgaatgacgttggggctattgtgccatcattccccttttgacaccggatcagtgggaaaattgtcatctaattccgcaagggttaagtaagcttgaagggccccaagagagcgaccgcctacatctcgcgctcttccaccaccgtgtaggcgggaaggatgctcgctttcaccacgcgatagcagaatatggccgtaagcggcatgcccaggcacagaagcgtgcccaccttgaaggaggccatggtaccgaaggtgtcgatgagggcgccggccacggtgggcccgaaggcggccccacaggtatagccggcattaagccacgtgatggcctcggtgaggcgcgcgtcgggcacggcgcgctcgcagaccccgttggccacaatgagcagcggcgcataggtgcacgctcccagaagcgccaccgccatcagcgtgggcgccgaatcgatgaggaacatggtgccgaaggacaggccgacggcacaggcggccaccacgagctgcttgggcagcggcgcccgcaggcgcaccatgccgaacagaaagcccgccgtcatggataccgcgcccgaggccataagaaccgcgccggcgaaatcggggctgttcaagtcctcggaaagcgacactgtggcagtatcgaacaggccgaggaacgacccagcgaaggcgtagatcacgaacagcacgcgcaccgctgcggaggtggcaagcaggctcttcgaaggcacggacgctgccgaagcgacggcagccgccccctcggcgagcgcgcccttcgaagcggccgcaccgtctcccgccacatcggcgacggcatcggcggcatcggcggcatcggcggcatcggcatcgttccccgcagccccagcctgcgaccaaccgggatgcggctcggtgctcttggccgtgcacagaagcacgaccccgacggcaaaggcgacgccgccgcacaccatacccgccaccggggcgatggcagcggcgagcgcgatggagatggacgggctgaagatgaacgccatatcgtcgagcacgctctcgtaggagaacatggtgcgcaagtcgggagccgcctcccccaaacgaccggagcggatgaggtaggtccaccgggcgcgggccatggcctggggactcgggaagaaccccaccagcagcgctcctacgaacaggggccataccggcccgtgcagcgccacgttcgcaataaggacaacgaggcccaaaagcgatacggccgcggccttgggcaccacggccgactggccgcgctcgtcgatgcgtttcgacacccggggcgtcaccacgaagatggacagcgcgatgagcgatgaggacaaccctgccgtgagaaaggagtaacccgacagcgtgatcatcgtgactacgccgatgttcagcatgctgccgaagaagcgcatgagcaaacaggcgatatcgaaggggtaggcttcgcgcacgcgcagcacttttttgtagactcccgggctcaccttcgccacgcttccacctccgctcccgctcatgatgccgggccgcgcccggcttaacgtctgccgccctgtagggtagcacgtcgccgcaggtgacggaagaccccgcagccagggcaggctgcggggccttcgaaaggcggccgccgggcaagcggccgatccgccggaacgaggcggtagctggcacctcagagggagctggcccgaaagaaggggcacgagccagcgtcaaccaaccagctacctgatctcgtccaggggtatgccattataatcgtgagctgtgaagaacaggataacgccggccaccgcgctgatggccatcatgtaaaaagctggcatgagcccgttgcctgtgacgtcgatgagcgccgtggccacaaacgacgccgtgccgccgaacaccacataggcaatgttcgaacccaaagccgcaccggtgtagcgcacttccgtggggaacatctccgcttgatagcaagcgatgttcgcgtcgttgagcgacaacgtcacgcacatgatcagctcggcgacaataacgatgggcagcgacgccgtccccaacatgaggaaacagggaatggaaagcacgatgaaggcgacgcatgcggtgagcagcatacgccgacgccccactttatcggacagcgtgcccgagccgaagatgatgagcagatatgcaatgagcgcgatgtcggtggccagctgcgcctgggacgcctccattgaggtgtagctcgtcaggtacgtcggcagataggtgagcaccaggtaaaatcccaccgcgttcaccatagtagcggcaacggaggacagcaggcgcttgcggtacttcttgaacaccaagtgcgtcggatgctccgcctccttgttcccctcttccatcttcacgaaagccggagagtcttccagcttggtgcggatgtagtgggcgatgaagccgagtgggccagccagaagaaacggaatgcgccagccccactcaataatggcggcctcgggcagaaccattttcagcacaagggccatcgtggagcccgccagcaggcccgtggccgtcgatgcggggacgagcgagcaatagcggccgcgcttctcaggcggggcgtactcggccagaaacacggcggcacccgagtactcgccagccactgaaaacccttgcacgctgcgcagcacgagcaacaggatgggagaggccaggccaatggcctggtaggacggcagacagccgatgaggaaagcggcaccggacatcagcagaaccgagatggccagcgactgtttgcgaccttttttgtcgcccatgcttccccagaacatggcgccgagcgggcggaagataaaggccagggcgaagatggcgaaggccatcaaagtggagttcacctcggagccgggaaagaagacctggccaatcgtaatggcgaagtacgtgtaggtggcataatcgaaccactcgatgaagtttcccagaaacgacgaggcggcaacgcgcttcaaatcgctgtggggctcgtgagcaacaggggcgacctcagccgcggcatcgttagtcctcatggaaatcacctgctccgctgaattcatcctcgatggcgatgaccatattggccacggcaacgtcacgcaggatgatgcccttttcgcgcgtagaggcaccaggatgcgacaggcagcccgaagggggcgtgtagtcggccacaatgggcagcacatcgtaattgggaagctcggcgggcaaccccgtgtacagcgcgggatcgatgcggtccatgtccaccaaatcgggatagaacaagagcatgagggacgtctccatcacgccagcatgttccaaatcccaacccgtgaaaccatcggggtacaactcctggatggtggcatcgtcaacgaaatcccagtaggacaaaagctggattttcacgttcttgatgccctcggccgacaccttctcgagagccagctcggcgccttcgaagataaactggtagttctcgtaatggccgttcatgaacacgatcttgcgagcgccgtcctcgatgaggctatagcagatatcgcgggccaaagagatgatcgtagtacccgacagcgaagtcgtgcccgacaggtggaacccgccgccgctgcgctgctgggaacgatagccgaaattgatggccgagcacacgataccctcgagcgcgccgtccgtatcggccgtgagcgcctcagcggtcgcgccggccatggccttggtaagagcggcgtccacgcacatggccatatggctgccatgctgctcgagtgcgccgacagggatgaagacgacggcatccttcgcgagcttctcgcggtaggtaaaggcgtccatctcttccatgaatacagagtttttcatagtcactccttgaaagcaggggccttccctcccaaaaagacccatttggcaagtgcgtaagcggagggccgggctctcacttccccagccagaccctccgcgaaagcaggggacttagcggtcgtcggcgtcgggatggtcccgatcgtaagcgtcggcagctttctgggcgccgtcggccatagcagccagcttcggatccattccatccgggttcgcatcgatgaagcccgcaccgccggctcccacttgggccgccagggccacttcgccatcaacagcggcatcgtcgacttctttgttcgccgcactggtggtgaagacgatctggctcacgccgccgataacgatgagcgcgccgccaataagctggaaggcggtcagggtctcgccgaacaggcacaggcccagaagcgacgccatgatggtctcttgataggagatggcagccagctcgccggccttcaggcgcttggtggcatgggtgagcagatagaacgcgccgaagccggtgatgagagcggcggcaatcagccacagccaggaatcgagcggcatggtgaacaggttccaggggtgcgtgatgatctggccagcggcgtctacctgcgtcacgccattcactttctcggtataggacagcggctgcaggcagaagttgtgccacagaagcagcacgagaatggccagcgatgcgaacaggaagttccaccaggagcgcacgttcgagtcgcaatcctcgcgatagcgcgagaagaacaaatagaggccgtaggcgacacccgatgcgaaggcaatggcgttgccgaaggtataggtgggatcgagatcgagcgtcaggccctcgggagtgacgatgcccacaatgaacagcatgccgactaccacggcgatgatgcagagaataccccgccagtcaattttttccttgaggaagatcgccgcaaggatcgtcgagtagatcggccctgtgtaaatgaggaacgacgcgttcgccaacgtcgtgtactgggtggacaggcagtacaggccggaaagcagccccaagaagatgcccgagagcaacatcatgcccgagaatcgcgtagccttcaccttcttgaagccgccgataaacaagaagatgatcgtgagcgcaataaggcccgcgaagttgcgccagaacgacacgaagtcgcctggggcgtcaatgaagcgcgtgaacgctccgatgccgcccatcaaagatgacgagcagaacatcatgataaatccgatgagcttgtacttcgccctttcgttcataggaaccctcttcccattcgatttcgaagacgcctcgttggaagcaccttcccctatgagaagaattgtgcggcccagtcgcaggcgagcgcaaagatcgagtcgcaaactctgttcctcgaaacagaatgtcagcgggtttttgtttgaagcggagaacaaattggcaataatgtcacaaaattgtgacaagggggaaaccgcatcatggttctcttgacgttcaccttcagttgtcatcaatacagccacagcgatcgggtactatgcgtttaaggaggacatgaccaacccccggatgcatacccgaaacgagcagaaggcggcactcctatgatcactgacctcaccctgggcgagaacatcttcaattcccccgatttgagcatcaagatgaaaattcttcatgcggtgaacaaatctctcgatcagattaccgtggccgagatctgccgcaacgccggcatctcgcgacagaccttctaccggcacttcgagagcaagtatgacatcccctggcggtactccatcttctgccgccagttctatttgaacgagatcggccgcaccatcgattggaaaacgggctactaccaccatctgcggctcatcgcccaggagcgcgatttcttccgtgagtccatccagtattcgatcaacacgcccttcgggcagaccatcatgccagaaaaccgcaaggccgtgcttctcgacaccttggagaactaccgccatgtcgaggtgaacgacaacctgcgcttcatcgtggaggtgttctcgaagctggaatgcgaggtcatgaacgactggttccgctccgatgagcccaccgatcttgcgcgctggaccgacgatttggtgagcctcgtgcccgaccgcctctaccgcgccctggagatacccgcaaccgatcgatagagtcgcgcaagcccttcatcccgtctcgcaatgaacccgccgaggcaaaccagcaggttcgctttggcgaacttgtagtaccatgggaacgcgaacatcaaggcgcccgcaggcgcacacgataaaggagcgagcccccatgtatgacggccttcaaagtcctggacgcaacgacgagtgctggtgcggcagcggcaagaagtacaagaaatgccacctcgatttcgacgagcgcctggaagagctcgccgagaccggcgaggaagtgccgccgcgcgatttgctgaagaccccggccgagatcgagggcatcaagcgcagcgccgaggtgaacgtgggcgtgctggactacgtggccgagcgcatcacgccgggcattaccactgagcagattgaccagtgggtgcacgactacaccgtggagcacggcgccattcccgcgccgctcgattatgagggcttcccgaagtcagtgtgcacctcggtcaacgaggtggtctgccacggcatcccctctccagacgaggtgctgcgcgagggcgacatcgtcaacatcgactgctccactattaaagacggcttcttctccgattcgtcccgcatgttctgcatcggcgacgtgtcgccggaggcggctgatctcgtgcgggtcacgaaagaggccgtgcaggtgggactcgacgccatcaagccctgggggcatctgggagatatcggcgccgccgtgaacgcttacgcccgcgagcatggctataccgtcgtccgcgagttcggcggccacggcatcggcctggagttccacgaggatcccttcgtgagcttcgtcacggaggcgggcactggccccattctcgtgccggggctctgtttcaccatcgagcccatgatcaacgccggtgcccaggagatcgacatgaccgaccccaacggctggacggtccgcaccgccgatcggtcgctcacagcccaatgggaagtccaactcgtcatcaccgaagacggctacgagctgctcagctggtagagagaaccgactcgccagccaccgtttccgaaacggtggcggcaactttacggtcgccatacgcttagcggcccgctccgatttcggggcgggccgcttctatgctggtttgcgttcaaccaagaaccctttctctgagaggagctttcccatgaccgagaacaccaaccaaacccctggcgccaccgccggttacggccccgaaggccgcgagctcgagcgggaatcccttgcctatggcgaacccgctcgcacccctggcgacgttgagaccgccgctgcgggcgatgcgagtgagatgctcggcgaggtgctgcaatcccaggagctgaaccccgacgagcccgccgtcaccaacgagcctcccgttatgccgcagaatccggttgcgacccatcaagccgcctaccaggcgacctacggggcgccccaacaagcagcagcggcgccgcaagctcctactgcggctgcggcacccggtgccgcccccaccgcctcgcctcacacagcggcagccgccactgcggccgccgtccagaagacgcacaagacgattgatcccgagcaggccttccgcatttgcggtatgatcgtcggcgccgtcattatcgtcttcggcctgtgcatgctcgcctactacacacccgacgacgtcggctccctgttcgacacctaccagatgaacggctccgctggcttcgcaagcgccggcgccacctcggctcaagtgctgaaggccggcttctcgatgctactcatcggcttcggcgccaccgacatctgcgccttcggcgccaagtacatgaaggccaagaagcgcgagcaaaagtaacagttttcggtgacgttttgcattttctgtgagggttgctataataatcaccgatttacgccgaagcccacaagcttcgaacgatgagggctctgtttttggaggggacagggccctttgtcatgtctggggatgctaagacagatttcgggttataggacaaaaagtgcgtccgctcccgctgctcactgcctgtatttcggaaatagatgcgagtttcgcgcaactgagatcaggaatcaggaaatagatgcggctttcgagcacggtttttggcaatttgacccaaaatggagccgtctggcgcgcgaaacccccaactatttccggaacgcgcacgaaactcccaactatttccggagggcgcgcgaaactctcatctaattcccgaatcgcttctcgttttcatccgtcgcgccctgcctgcagcaaaaaagcccctccagcaaagaggggctttggcagagaaggcgcgtcgaagtgccgctacaccgcgaacaccacggagcagatgctcaaaaggatggcgccgaatacgagggtgaacaccatcatgggccacacgaacttgaaccagtgggacatcttcatgtccagcatctgcagcgttgccatcaccaggccggtcggcgcgatgtagagcatggcgtactggccgaactggtaggccgccacaatgatccagcggggaatgcccacggtgtcggccaagggcgcgaagatgggcatggccagcaccgccaagccgctggaagagggcaccacgaagccgagcacgaaaaagatgagcagcaggcacaccacgaacagcggaccgctcatgccggccaccaggttggaggccgcattcagcatggtgtcgctgatcatgccctcggtgagcacatggttcacgccgcgggccaggccgatgatgagggccacgggcaccaggctggaggcgccggcaccgaaagcgtccaccatcttcgcctcccccacgccgtctttgcccgtgccgccgatgaacatcaccaggatggacagcgtcacgaattctgcggccatctgcgggaaccaccaaccgaggttcatgacgcccacgatcatgatgatgaaggcggccacgaagatgacgagcacgatcttcttgcgcagtccgaattcccgggccgctgcaccgctttcatccagctcccactgggcattgaacttctcgcgatcctcgtaggagtagctgaatttcgggtcggccttcaccttcttggcataccaatgcaggtacagcagaaacacaatggcgcccacgacgagagcgaaggcgcgcacggcgatgccctcggtgaacacggtgccggccgcattcgatgcgatgacggccgagaacgggttcaccgtggagaacgtcgtgccgatggagccggccatgaagatagcgcccacgaccacaatggagtcgtagcccagcgcgatgaagatcggcgcgagaatcgggtagaaggccacggcctcctcctccaggccgcacatggtgccgccgaagatcatgaacaccgacacgccgaacacgagcagaaactcgcggcccttggtcttcttcgtgagggcggaaaggccgctttcgaaggcgcccgtcactttcacgacgccgataagaccgcccaggcacaggatgaacaccatgacgtcgatgccgtcgatcacgccccagaccatggagtagggaatgtcggcaagcgacaccggatgcggatcaagcccctcgtaggtaccgggaatggacaccgccttggtgatggcgccgctcgtgaattgatcgatgtcgattttcacgcccagctcatcgagcgtttgctgggtcgcatcaagctcggacacctcgccggtcggcgtggtcatctccagcttgccgctctcggcatcgtagagcagcttcgagtattggccggccggcacgaaccacgtgcagatgacggcaatgatggtcacgatgaacagaatcgtgaatgccgaggggaaggagaacttgcgcttcttcctttccttttcgggctcggtggtcgagatgggaacggcttccatggttgtctcggccatgatgatctcctgtctgaatcggggcgaaacgccgtgatgccttcccatgggccgccatcggaatcgccatcggagccactgctttcgaccgcgagccatgggaggatgcgatgatccgagtgtaggggcacgggctgcgcgcagccaaggcataagccggggatgttcctcgagcgcagcgggtataacttggagatattgcgaagacctccatctatacacggactaaaccgcaggtgggaacatcaacgttgccgatccgtcaacaaagcgccatagcggctcgacggcccccgccgcgattcgctacactaccgccaagctggcaaaccacgccgagcgagtcctgccgccgcatctgctttcgaggagcaccaatgaccctgctgttctactacacgcttctcatcatgttcttctacaccatcgtggcggccacgagcctgtcggccttctacgtgtcgcatcgtcgcacgttcttgtacgccacgctcgggttcacgttctatttcttcgatgtttccctcgtctttaaggacaatttcatcacccccgatgccgtgttcgaagccgcctcgttctacgatgtgggacatccttacacctccatcatcaccggcggcggcgcgttcctctttctgtggctggccgcctgccgctactgccgggaagaacgccctgtcgttcgcttcgcgcccgtggcgctgtgggccgtgctgtcgctggccgcctatcagctcatcgagaacccgcaatggagggagttcgcctactacaacctgcgcgctgtgctgcagctggtctgctacggcctgctcgcctggtggtacacgcactcccccgaccccgagcggcgctccatcatgaagagccaccgcaccgcgttcttctgggccatcggtcttacctgcggcatcattctggagaacgtgtacgtccagctgatcttcgatcccggcagcattccccgcggcatgtgggtcctcgccgagcgcagccccatggagaacctcctgttcatctgctacggcctagcggttctgcggggcgcgtcggtgtccctgcagctgcgagcccgcgagctgcccgaaggcgacgatcctttgctcgcggagtccatcgatcgtctgctgcctttgtatagccgcacctacgacctctccaaacgcgaggaggaggtattgcgccacgcgctcatggggaaggacaaccagaacatcgcaagcgcgctgacgctttccgccggcaccgtgaaggtgcacatgcacaacatcctgaagaagaccggccacgccaaccgcgccgagctggctgccgacttctgggagcgctaaactgcgggagcccctctcctcgtggctcctccccctttcgcgaggttttttctacatctcgagaacatgaccccaaagggccacatattgtgttagaattccgtttcgctaactagatatagtgaaccagcgaggcattaaccgaaccgcaaacgacaaggagcctatcatggagaacaagatgatcgacggcgtgaaggtggccgtgaactacgcccaagccagcgatacccccgtatccgacgacgagatcaaggcctacatcaagcgcgcctacgacaagtacccccatggtcagctggagtcgctgacgcttgacgtcgatggcgaggacgtcggcatccactacggcctcgcgccggtgaagttcgaccgcatccgccgcatcaccggctatctcgtgggtacgctcgaccgcttcaacgacgccaagcgcgccgaggagcacgaccgcgtcaagcacgaggttcccacctgctgcaagtaacctggctttttcaacccataaagaagggccgttgcgagatgcttttcgcaacggcccttcttttttcgcagcctgaaagcctacagcggcaatcgcccttccagggcgcggcccaaggtgacctcgtcggcgaattccaagtcgccgccgacgggcagcccgctagcggggcgcgtcaccttcacgcccaagggcttgatgagccgtgcgaggtaggcggccgtggtctccccctcgatgttggggttcatggcgagcactacctcgaccacgtcctcgcggccgaggcgcgccatcaactcggcgatgcgcaagtcgcccggacctatgccctccatgggtgccagcacacctccgagcacatggtagacaccgttgaaaacggccgtgcgctcgatgggcgggatgtcgcgcggctcgctcaccacgcagatgaccgaaccgtcgcgcttggcgctggcgcagatctcgcacagatcgccctcggcatagttgaagcagcgggcgcagaagcgcacgcccgccttcacctcgcggatggcgtcggccaaacgcagcgcctcggccgcgtcggtgttcaggatccagtaggccatgcgctgggccgacttcggccccacgccgggcaaacgctccagctcatcgaggagcttttggatggaaggtgccgcctgcacgaatgtcgccttgagggggggataacccggctacatcaggccggggatcttcatgccgcccatgacggcgttcatgcgagcgttggccgcctcactggccgcgcgcagcgcctcgttcacagcggcgacgaccatgtcctgaagcatctccacatcctcgggatccacggcagcgggatcgatggtgatgtcggtaatggccatctcgcccgtggccgtggccttcaccatgccgccgccggccgaggcctcgaaggtcatggcggcgatctcctgctgagccgcggcagcgtcgcgctgcatcttctgggcctgcttcatcattttcttcatatccatggaagggtctcctttgctggtttgcgggccgcgcccgactgctaacgtattctagggcatctcgcccaatctcgcctagatgacttcctcgaagttgacgccatcgccgaagccgaaggcaagcgaggcggcgaggtcgggctcctctacgggattgggggaaggcccggacacggcatcgggctcggggggaagcgcggaggcggacggtgctgccatcgaaggggccggcgagggggcaggagcggacgcaggcgcttgaggtgtcgcaccagacggcgccggcacctggggcgcctcctcccacgggggcacttcggaagaggctgcgagagaggcatttgcggagacgctcggcgccggggaggtcgctgcgccctggggcgaggcgccccgggaggcgaagggatcctcgaaagggatatccgcatcgtcgtaggggacgtagtcgtcgtagggcgggcgatcgtcatcgggcgcgggggccggcgaggacgccggcgcagcggcgggagcgggaaccgcgggcgcgttcacgctagaaggcgcgccggacatcgggctcgccgaagcagtggaagaggcagcggacggggcaggtaccgattgagaggccggtgcgggtacgttaaatgcggaagccgcggcgggggcggaggccatcggagccgaagcgccgcccttgcgcagctcgaagggaatgtccccgtgggcttcacggcgcagagcctgggcgagttcggcctgcacgtcgggtttctgcacggcgcggaaggcgaagtcgttctcggcggggaactcgatgagaagcgcacccgccgccgcatcgaagaccgccttggtgttcatgaacagcacgccgtaggccgccttggacttcttcagcgaggcgagaacaccggcccagagacgctgaagcgaggccatattcgagagggcggcggtgatttccggcgataaggcgcccgcagcggccgaagcgggcggtgcggaaacgggggcggatgccgtagacggcgcgggggcaacggcagcaaaggtcgccgcggcaggggctgccgccgggacaacctcttccgtaggggcagaccttggtctgccctccgcgagcgaggcggacgggctgtcgcacgacgctgatccagccggagccgaagggcgaccaaggtcgccccctacggggctcgctccagcaggggcaaccgcagccgggtttgctcctgcaggggcaacagcagccggggcggttgccgcagacgcaggggcaaccgctgccggaacgaccgccgccggagcagcggcagacacaggcgcaggagcagccaccggcacgcctgcggacgcgggcgccgcggcagccacgacagaggcgccggccagctggcgctccagggtttccacgcgctcggccagagcctccagcgtcacatcggcgtcggggcgcaccatgcgcgtcagcgcgatctcgaaggtaagccgcgggttcgtggacgtcttcagctcgccggctacatcccccaaaacacccagaagccgcgccaggcggtcgacgccgaacagcggcagctcctcagaaagctcgcggcgcgtcgtctcggacacgtcgagtaccacctcgggccccgccacggccataacgtacatgttgcgcatatgctcggccaagttcgcgacgaactgggccatgtcggcgccggtttccacgtactcggccacccagcggaagcacgccgccgcgtcgcggacgcctatcgtccgcacgatgtcggccaaatccgtggagtccacggctcccagcatccgctcggccacctccatggtcaccgcaccgtcgccgaaggcgatgagctgctccagcgaagtgagcgcgttacgcatgccgccctcggcccgatgcgcgatgagctccagggcctccccttcgaactccacgttctcggcggtgcagatggcccccaagcgagacaccatggcctcggtggagatgcggcggaaatcgaagcgctggcaccgcgagtgaatggtctcgggcaccttctggggatcggtggtggccaggatgaacaccacgtgactcggcggctcctccagcgtcttcaacaacgcgttgaaggcggccgtcgagagcatgtgcacctcgtcgatgatgtataccttgtagcgcccgcgcgtcggcgcgaactgcacgcgcccgatgatctcctcgcgaacgttctccacgccggtgcggctcgcggcgtccagctcgtacacatcggggtgctcgccggcggcgatcatctcgcaatcgtcgcaggtgccgtcgggctcggccgtagggcccttctcgcacagaagcgccttggccagaaggcgcgccgtggtggtcttgccggtgccgcgcgggcccgtgaacaggtaggcgtggctcaccttgtcctgggcgatggcgtttttgatggtgcgctcgatgtgctcctgaccgaccacgtcctcgaagatctgcggtcggtacttgcgatagagtgcctcggccatggcctactccccgcctttctcctcggtctcggaagccgcctgcgcgtcctcggccgccacccggcgccgcgcctccgccttcgcctcggcctcggcgcgcatcacgcgctcctcggtcagctcgcgctcgtactcggcctcgttcacgcgctcggccgcctgggcaaccggatcgccctccttggcgcgacgactgttcagcgcggccttgatgacaccgatgaacgccggcgccaccgacacggccacaatgcccagcacgatcacctcgaagtgctcctgcacaaacggaatgccgccgaagaagtatcccaccagcacgaacaggctcacccaggagatgccgccgacggcgttgaagaacgtgaacttcccgaagttcatatgtccggtaccggcgatgaacggcgcgaaggtgcggaaaaacggcatgaaccgcgtgatgatgatcgtgagcccgccatagcgctcgaagaagtggtcgagcttggccatgcgctcgggcgtgagcgccttcaccttccccgaatcgatgatgcggctgccgaacaggcgcgcgatccagtagttcgaggtgttgcccaaaatggctgccacccagaacacgatgagcgtggcccacacattcaggccgccgccgtcggcggagaacacgcccgctgcgaacaggagcgagtcgcccggcagaaacgggaagagcaccagccccgtctccacgaacacgatgaggaacagcggcgtgtacacccacaccgggcccaaagcgatgatccagccggcgatgaagccgcgcgggtctttcaaaaggttgatgaaaaagtcgatgatgcccaccgagtctccaatctgcagaataacgtagaaggcggcgcgccgccggccccattgtattttcagaggtcacggcaacgagaccctgcgcaaaagcgccacggtaattttacgttggcaccgcggtgcgcccttcgcgcaaaagtgccccgaataggtatgggcgctcgtcagcggtcccttatggctgcttcctcccggacctgaccaggttcggaacatgtcgccgcccatacccattcgaggcactcgaactcgtaaggcctaagtataggggaagcgcgcacgactggcgacggcgctcccctccggcaactaaaagtccatagggcgcccgctaaagaccgtctgcgggcattttcactacgcgatccttgttaagatcttcgtaaggtcttcgcaaaaaccgggggaattgctactattctttcgacccttaaacgtaactcaaacacatcagtcccgaggatgtcatggcccgatccgattacagccgctacgacggcgaacccagacgctcccaaggcggcctctctctttccacgggccgcttcgacggccgctccacgggtagcacccgttcgtcttcctcctgcggcaaccgcccgcgcggcacccggcacaaccccctgcgcgacgagtatccctcgagccgcgaccgccgtcgcgagcccgagccgggacgccggcactcaggcggcgagcgctccccgcgcggcgagcagtcccgcggcaaacaaacgcccgccggcaatcgcggcgcccagggacgtccgcgcaacggcgccccctccggccgcggcagccacgcccctcgcgcaggcgccgcgttcgccccccagatgcacacgctcgccccggccggcggtttcaacctcgcacgggcggccatggcgctcatcgctatcgcgctggccgtcatcttcgccatggcgcttttccacatcggtcctttcgcatcggccgccgccaaagacggcagcaagcatgtcggcgtcgccagcgccaacgccgtgggcggcaacgcctcctacttcgcgcagaacgtcgctacccaggtgagcctcgcccgccccgtcgagccggagctggcccagctgcccgcctacacgccgacccgcgacgaccttaccaacctcgccgggcagaaggcccccttcgccttcgccctcggcaacgcgaccaacgacgccggcaaacagcccgccgcgcccgtgctctccgaccgttccctcgtgagcttgaacaacgcgctctcctactacgacaacaatggctatgaggccagctacctcatcatggatctgggcacgggacgcggcattgccggcaacgtggacgtgcccatctacggcgccagctcgttcaagggcccctattgcgcctatgtggtgaacaaggagttccccaacgacatcgaccgcgcctcatcttcgcgcctcactcaggtggaaaacaccattgtctggtcggacaattcctcctacggcaagctgcgccgcacctacggaaacgacggcatggaagcatggctggccgaggccggcgtcgatacggcgctggtgaacgacacgtacttccccacctacacggcacgccagtcggccctcatgtggttgaagatctacgagtacctgacgactgccgacacctcggcagcccagtggctctccgacaccttcggcaaaaccgaagtctcattcctgcgcaacggcgccctgggcaccacgagcgcagggcacaccgactacctgccggaagagggttccggcggcgaggagggcgtggaagacgacgggagcgacgaggagggctccgaggagagcacgcccgccgacggctccgaaggcgacggctccgtgctcgccgaagacgcggagggcggccagacgctcattgaagaggacaagaccgtcgcgtctatcggcacaaacatcaccgtgcgcaacaaagccggctggatcgacggccaagacgacgccgtgtgcgattcgggcatcgtcacgatcaacggtcgcgactacctcataaccatcatgaccaatgcgcccgactcggccgccggcgagcaggccttcgcccacctcgcccgcaccctgctggaaatccgcggcgacttggtgtaggagggcccgtggccgacgctcccgataatcctctcgccccacacacgcggccaccctactatgccgggcagcccatcgagttcgccggctatgtggacgacttcgaccgcacgatctgcgccatggagttctcgctggacgacggcgcctcctggacggcctaccccaccgccgccgtagacaagagccgcggcgtgaactggcgattcgtctacacgccggagactcccggacgctacctcttgaaggtgcgacccgtgaccgaggacggcgagccctccgcactcgtggccggcttcgccttcgaggcgctgcccgccgggggcacttacggggatgcgcgcatccgggccgtgggcggctcgttcaaggacgcgcgcatcttccgctcgcgggagctcgcgaacctcaccggtgaggaggcggccttcctctcgggcgccctcggcatcgccaccatttacgacctgcgcacggcctccgaggtggcggcgcacccggagccctacatcgtgggcatgcgcaccgtggcgctggagccttccaccgagcaccgccgcaaggattccaacaagcgcctcatcgccggcgtcatcgagcgctacggcgagccggaggagcgcatggccgcgaactaccgccgctacgtgcgcgagtatccgctggtgggccaggccctgcgctccatggccgccgagggacgccccgcgctcatccactgcgtgaacggcaaggaccgcaccggagtgctatgcgccaccttgcttcgcgccaccggcgccgacgaggacgccatcatggaggactacctacgggtgaacaccgaccatgccgacctcatcgcggaggaggccgcgcacctcgacggcggcatgaccgaccacgagcgtgccatcctgatgtcgtttctggaagcgcgcccggcctacctgcgcgcctacttcgacgagatcgaccgcctctacggcagcttcgccgcctacctgcgcgagggcctgcatctcacccccgaagcaatcgagagccttcgcgccctggtggcctagaacgagaaagggcgcccgcaacgcgggcgccctcgcagaggccaataaccaaagcttacaggatgcgcaggctcacgtccttcagctggcggccggtgacggcactcggagcgcccgtcatggggtcgctcgcgctgctcgtcttcgggaaggcaatgacgtcgcggatggagtccttgcgagccagaagcatcacgaggcgatccaagcccagcgcgatgccgccgtgcggcggggcgcccagctccagcgcgcggatgaggtggccgaacttctcgtcgatctcctcgtcggtcagccccacgacgcgcaggatgcggcgctgctcctcggcgttgtggatgcggatagtgccgccgcccacctcgaagccgtccatgaccaagtcgtaggagtagctgccgcaggccagcggatcgctctcgatcttgtccagatcctccttcagcacatgggtgaagggatggtgctcggcagcgtacttcttctcgtcctcgtcgtagcggaacatggggaagttcacgacccacagcagcgcgtggccctcgcgggggatgttcatggcgtcggccatgtgcaagcgcagggctgagagcaccgcgttggcgatctcgggcttatcggccgcgaacagcaaaagatcgccgggctctacttccatctcggccttcagggccgcccactcctcgtcggtgaagaacttcttgatggggctcttctcctggccatcggtggtgaacgccacccaggccatgcccttggcgccgttggcctcggcgatgctggcgagcttctccacctcgccgcgggaccagtcgccggcacccttgacgttgatggccttcaccacgccgccggactgggccacgctcgcgaacaccttgaagccggtgtccttcacgatgtcggtgatgtcgtggagcagcatgccgaagcgcacgtcggggcgatcgcagccgtataggcgcatggcgtcggcgtactgcatcttctgcagcgggaaggcgacgtcggtcacgcccacggccttcaaggtctcggccatgacgccttccatcatgtcgcacacatcgtcgccctcgacgaaggacatctcgatatctacctgggtgaactcgggctggcgatcggcgcgcaggtcctcgtcgcggaagcaccgggcgatctggtagtagcgctctacgccggcgcacatgagcatctgcttgaactgctgggggctctggggcagagcgtagaacttgcccgggttcggccgcgacggcacgatgtagtcgcgggcgccctcgggcgtggagttcgccagaatcggggtctcgatctccaggaaaccgcgctcgtcgagggcccggcgcatggcctgggtcaccgtgtggcgcagcttcaggttggcgagcatctcgggacggcggatgtccagatagcgccacttcatgcgcgtgatctcatcggtctcgatgccatcctcaatggagaagggcggcgtcaccgacgtgttcagcacctctaccgcattggccaaaacctcgatctcgcccgtgatcatgttcgggttgatcgcctccggtgcacgctcgcgcacgcgcccggacaccttcagcacgtactcgcgacccaagtgctcggccgcatggaagtcctcctcgctcacgcaatcgggatcgaccaccacctgggtgtagccgtcgcggtcacgcaggtcgatgaagatgaggccgccgtggtcgcgggtgtgccacgcccaaccgcacaaagtcacctcttggttcacatcagtcgcacgcagccgcccgcaggtggcggtatgcatgcaatattcgttgcggaagtcttccatagtcgtttcgttgctcctaggggtcaaaaatcacgtgcccgtaatcgtaccgcaaattccccgcacacgctatcttttccgcacgttttacggagagcgagagaggctcatcgagtagctgcgccatcataagcgtcagcaaagcgcccaattggtgagcaattcgcatacgtccagcgctttccttgtgccgatacctctagcagctgcactatcatgggttccgtcagagcacccgatttgcctacgtcaagcgataccgtgtagctggcccccttcccacgcgcataagagcgcccttctcggccaaagctgaaatcagacgcaccaccgtagaccgagacaagcccaacgtctcttctagattcgcactcgtcagctccaagcccggcttgaaggtagccagaacagctctctcttccgaggacagctcatcttcgtcgctcaatgcgggcaatgaattgtcttggtgctcaacgtgacaagatacttttatcttgtcacgtttgataagaagatagattaagaaaacaaagagtcctgattctgtccagcggaggggaggccccaatccgccgacctctgatcgccccgcggagaacgcggctgttaagaagcagattccacttcagcagcagcgatgccgggatagtaccgacctatgtgcgtcatcttcgctgtttcttttgccgcgttcggaaggggataaagcgcgcagcgggcggcggattggggcctcccctccgccgcccgcgacgattccctagatcaggtcgcccagcacgcggctaatcgatcagatcgcgcagcacgtactggaggatgccgccattttcgtagtagcggccctccgtgggcgtgtcgatgcgcacggtggcatcgaaggtcacggcgcttccatcgggcttctcggccgtcaccttcacgacagccgggctcggcagccccgccgagaagtcgatgggcgccacggtgatggtctcggagccgtcgaggcccagcgtctccgcgttttgcccctcgatgaactgcagcggcaggatgcccatgccgatgaggttggagcggtgaatgcgctcgaagctctcggcgatggccacgcgcacgccgagcagcatcgggcccttggccgcccagtctcgggacgagccggagccgtacatcttgcctgcaaggactgccgccggcgtgtcggaggcggcgtagttctcggcagcataatacagaggcgtgatctcgccggtggtaaagtcgcgggtccagccgcccttgcgtccatcggccaacttgttctgcagcttcacgttagcgaaggtgccgcgcatcatcacctcgtggttgccgcgacggctgccgtaggtgttgaagtcggccggagccacaccatgggcctccaggtactcagccgccggcatgtccggtgcgatggcgccggccggcgagatatgatcggtcgtgatgaagtcgccgaagttgccgagcacacgggcgccctcaatggcgtcctggcccgacacctcacgggtcatgccgtcgaaatagggcgggcggcgcacgtaggtagagtcgtcgtcccaagcgaagatatcgctcggctcggcccccagggcctgccacgcggcgtcgccctcgaacatgtttgcggcgccctgctcgtacaagtcggccgtcacgaactcgtccacaagagcggccacctcgtcggcggcgggcacgatgtcggcgtagaacacgggattgccctcagcgtccgtgccaaggggatccttctccagatcgatgtccatggtgccggcgatggcgtaggcgatgacgttggccggctgcatcaggtagttctgcgacacgtccggcgaaatgcggccctcgaagttgcggttgcccgacagaacgctggccagttcgatgtcgtcggccacggcatgcatggcctcggacagagggcccgagttgccaatgcagctcatgcagccgaaaccgcaggtatagaagcccagctggcgcaagggctcagtaagccccgcccgctcgagcagaagctcggtggcgcggctaccgggagccaagatggtcttcacccagggtgccggcgcaagcccgcgctcggcggcgttgcgcgccatgaggcccgtggccagcatcatggcctggtcggtggccgtggtgcagctcgtcacggcggcgatggcaatggctccgtgggtcagctcgtagtcctcgccgtcaacttccacatgcaccgtcgcatcgtcgaggccgcgctcggcgcagatggcgcggaagcgctcgccggccttggcgagcggaatgcgatcgtgggggcgcgaggggcccgccagagaaggttgaaccgtggaaagatcgagctcgatcacctcggcataggtgcgcggcgccgcctcgggatcattccagtagccctgggccttcgcgtaggcttcaaccagagccacctgctcggcgctgcggcccgtgaggcgcaggtagtccagggtgcggtcgtccaccgggaacagcgtgcaggtgcagccgtactccggggtcatgttcgagatgcaggcgcgctgggtggcggaaagcgccgccacgccggggccgaagcattccacaaagcagcccaccacaccgcgttcgcgcagcatttgtgcgaacgtcagcgacacgtccatggccgacacgccttcggacaagtcgcccgtcagcttcacgccgatgacgcggggcacgagcgtcgtgatgggttggcccagcgcagctgcctccgcttcgatgccgcccacgccccagccgagcacaccgatgccgttggccgtgggcgtatgggagtcggtgcccacaagcgtgtcgaagtacaccacgggcgtgccatcggcgccggcaaggccggcgggagactccatgaccacgctggcgaacttctcgatgttcagctgatgacagatgccctgtcccggcggcacgatgcgcacgttctcgaaggactcctgggcccatttcaggaagtcgtagcgctcgccgttgcgcttgaactccagcttcatgttctcatccatgcagccgtcgcacccggccacatccgcgatgaccgaatggtcgatgaccaaatcgcacggtacctgcgggttgatcttcttcggatcgccgcccagatcggcgcacgcctcgcgcatgacggcgaaatcgacaaacaccggcacacccgtgaagtcctggaacaacacgcgcgccggcgagaactccacttcctcgcccgtctggcccgccaagccggcagttacgatgcgctcggccatggcctgggcctcttcgggcgtgcgcccgcagcgcagcgcattctccaaaagcacggtaagggagtaaggcagctgcgccgccccctctatctcgctcaccgggtaataggtgtaggccccatcgcccaccttcaaagaagcttcaaagctcatgcaacaatctccttggaactaggcaacattctcgatgatttgattggcacggcgcctgagcatgcccttgccgttctcggcatcgaagcgcatacgatcggccagggcgcttttcacagacccgtccagcttcccctgggagaagtcgatgaccgccagaagcatatcctggaattccaaatcgccgtgatagcactggatgccctcgtcaatgagaggccataccttttccgagcgcttctcggtcgtcgcacccagcttgcacagaaagcgcatggcggccaaacgcaaaggaccgctgtcctcgtcgaacagggccgcctcggcgccggggatggccttgtcgcagggccgagagtcgaagggcacgacgtaagtcagcgcatcaagacattcccaacgcgtctgagcctcagggcgctccaatgcgtcgacgagatcggacgcgaaaggcacgagtatttcaggattctcagcagccacgcttgcaatgaccttcgctgcctgctggcggccgcggcggctcccatcggaaagagcctccaccaactccttcagcttcgccgaatccttcagcgcctcctcgacgcgcttcttatcttcaggggtctctgaactcaagggaaacctccctttcctgacaagccctacggctctgtcatcgacgccagttttccagaaaacattatacgcgtccttatattttcaaagaaagaagccgttcccatttcacggttaagggcgcacaaaaacaaaaagacgcccgcatgggcgtccaagtaataatatagttttgtcgcacaggttcgcccgaggaagtcggcgagggtccggcaggcgcccggaattgccccgcctcggggccaagcggcctccgcgccgcgccgcgccccaaacaaggggcagggccgggtgcccgtcggagccgcggcatcggcaggtccggccgtcccgtcagggcggccggagcgcagaaaagcgccccctgcgagcggaacgacctgtcctcccgcggcctggcgccgcagtactttcggcgaggtggggcttaactgccgagttcggaatgggatcgggtgatcccccactccatggttccgctcgcgggaggcgctcccgcggcaacgatgtgctgcccgccgggggcccggggatcccccgcgccaccctggcggttgcatgcgcgcgacacgtccatctctcgatctcgatcgtagtcttggcaatgaagaagagctcgggctattagtagcgctcgcctgagcaggtcgccctgcttgcagctgcgccctatcgaccagatagtctatctgggcccttaccggaaagggagctcatctcggaggcggcttcccacttagatgccttcagcggttatccgtgccggacgtagctaggcggcggtgccgttggtcgacaaccgcgtcaccagaggtccgtccaccccggtcctctcgtactaggggcagatctcctcaactcccttgcgcccgcggaggatagggaccgaactgtctcacgacgttctgaacccagctcgcgtaccgctttaaatggcgaacagccatacccttgggaccgacttcagccccaggatgcgatgagccgacatcgaggtgccaaaccttgccgtcgatgtggactcttgggcaagatcagcctgttatccccggagtaccttttatccgttgagcgacggccattccactctgtgccgccggatcactagaaccgactttcgtccctgctcgaggtgtctctctcgcagtcaagcccgcttgcactcttgcgctctcgggacggttgccgaccgtcctgagcggaccttgtgcgcgcctccgttacgttttgggaggcgaccgccccagtcaaactacccgcctggcacggtccgcgcgccggatcacggccgcgcgttaggcagccggcacgacgagggcggtattccaaggtcgcctccacgggggcttgcgcccccgcttcaaaggctcccgcctatcctctacgcgccgtaccagatgccaatgccaagctgcagtaaaggttcacggggtctttccgtccttccgcgggtagttcgcatcttcacgaacagtacaatttcaccgggtccacggttgagacagcgcccaaatcgttacgccattcgtgcaggtcggaacttacccgacaaggaatttcgctaccttaggaccgttatagttacggccgccgtttaccggggcttggcttcagcgcttcgcctttcggctgacgcatccgcgtaaccttccggcaccgggcaggcgtcagaccctatacgtcgcgttgccgctttgcagagtcctgtgtttttgataaacagtcgcttgggccgtttcgctgcggccgccagccgctcccgccgcgagggcgttcacagccggcggcgccccttctcccgaagttacggggccagtatgccgagttccttaaccgtggttctcccgatcgcctcggtatgttctacccgcccacctgtgtcggttttggtacgggcgccgacggcactccctagaggtttttctcggaagcatgggctcaccggcttcgctcgctcgcttcgtctcgcgtctcgggccccgtgcgcagctgatttccacgctgcgcgccctacgcgctttcacggggacgtccagaaccccgcccggctacccttctccgtcgccccatcggtaatgccgcgccgtcggcggtgcgggaatgtctgcccgctgcgcatcggctacgcctctcggcctcgccttagctcccgactgaccctggggggattagcctcgcccaggaacccttaggctcacggcgccagggtttctcgccctggtctcgttactcatgccagcattctcacctccgcgcggtccacagcaggtcgccctgctgcttcgccccccgcggagagctcccctaccactgaattctcagtccgccgcttcggtgcatcgcttagccccgtgaattgtcggcgcatgtccactcgaccagtgagctgttacgcactctttaaatgcatggctgcttctaagccaacatcctggttgtctgggcagacgcacatcctttgccactcagcgatgacttggggaccttagcgggcggtctgggctgtttccctctcgagcgcgcagcttagcccacgccctctgactcccggcctctcgacccgcggcattcggagttcggttcgagtcggtaggcggtgaagccccctcgtcgatccggtggctctaccaccgcgggttaacggccgaggctagccctaaagctatttcggggagaacgagatatctccgggtttgattggcctttcacccctatcctggggtcatcccctccgttttcaaccgaagtgggttcggccctccacggggtcttacccccgcttcagcctgccccaggatagctcacccggcttcgcgtctgcagcgtgcgactcactcgccatcttaaaggctcgctttcgctgcggctcgtttccaaacttaacctcgccgcacaccgcaactcgctggctcattctacaaaaggcacgccgtcacagcgcaaaggctgctccgactgcttgtgggcgcacggtttcaggtactgtttcactcccctctcggggtgcttttcacctttccctcacggtactggttcgctatcggtcacaggagagtgttcagccttggagggtggtccccccggcttcggaccgggtttcacgtgcccggccctactcgggatgcgcaacagtggggagacgggtttcgcgtacggggctctcacccgctgcggccggcccttccatgccgttccgctacctgactcctttgtgaccactccacggagggcagctccgtgacgtgcgtcccgcaacccccgggcggcaacgcctgccgcttacacgcgcccgggtttgggctggtgcgctttcgctcgccgctactcgcgcaatctcggttgatttctcttcctcggggtacttagatgtttcagttcccccggttgcctccctacgccctatttgattcaggcgtgggtagcagggcatgacccctgctgggttcccccattcggagatccccggatcaaggtgtgtttgccactccccggggcttatcgcagcttgccgcgtccttcgtcgacttcctgtgccaaggcatccgccgtgcgccctagatatcttgtccattacctaggtcgccaaagaagtaattacttctaatggtttcgtccgttggatattaatgagaattaattccgtcgtataacatacgttcgcgatcgtgatgaatcgtctattccatgatgcgagcaccctcaagaacctaatcagcttaggaaattgatgttggtgttgatcatgttgacattttcatgtcacgcgctatgcaactgtcaaggtgcgcggggactctcttcggagccctcgcagccggatgctggggaggatgagaacggctctaggttgtctccctagaaaggaggtgatccagccgcaccttccggtacggctaccttgttacgacttcaccccccttaccctccacaccttcga

SEQ ID NO: 10615 - DNA, 1443 bp, Unknown
  gut microbiota DNA sequence
atcccgctgccgtggtagaggtcttcgacagctacccctacggtgagggcatcggcgaattcacccaggccaacgagggttgcgaacgcatcgtgctgaacgagagccacgcctgcgcggcggctgcgcgagccgcaagccgcctgcgcgcattgctggatgcgggcgcggcacccttgggcgatgcgggggcggaaagcgacgccccctcgccctcccaaagtgcttcatccgcgacgtcgggcacgacggccgcgccgacccttcccgaccgcgcagcaaccgccgcctcgttcacggctctggaagccaccgaccctgccgcagaaatggcctccgtggccgacgccgtgcagaccgccctggaggcgggagccgacccctcctcgatttacgtgctcgctttccatcccgcttgggagcgccgcgttgcccgcgcgcttgaggcccgcggcattgcgacggcgacgcccgtccgggggcatgtggccgcgggcgactaccgcgaccttgaccgctgcgccccggtccgactgctcacggccctcgcgctgatcgccgacgcgcacgacgccctggcgtggcgcgcctggtgcggcttcggcgactatctggccaacagcgcggtattcgccgatatgcgcgccgaggccgacgaacagggcaaggatctcgtcgcgatgctcgacgaagtggcagccgccgcgcccgaagagggattcccgggcaccggcatcggccgcgtcctggacgcctaccgcacgggccgcaccctcatcgagcaagcccagggtttggaaggcgacgagctgatcggcgccctcgcctccgcccttaacttgaccggcgaaaacggcgagcacgcgatgcagcttgtccgcgccctcaccgctcccgagcccgagcctgctgtatccacttccgacacctcttccgatgcgaacgcgcccgtgcccgcaccgtcaaacgccgtcgcgccaacctcttccgaaacggatacctctgcgccgagcgacgcccaaaccctgatcgctcgagcccgaaaccgtatgagcgcccccgccttcgaagccgccgaaggctgcgtgcttgtcggcgacagcgcgcacctgacaggccgcgcgcccgccatgctggtgctcgccggcttcacaaacggcttcttccccacgcgcgacttcttcgacgccaccgtaaccaccccggacaagcagaagctcgtccgtgctaccgacacgcgacgcctctacgccgccgcaggcaaagcgacacagcgcctggcggccagctggttcacttccatcggactcgtagaggccgagaccctgaagctggaaatcggccgcgtgaagcttcgccgcggcgagcgcatcgccgtcaccaccccgagcatctacctggccgacatcgatcctgccgctgaaccgagcacccccgggctcc

SEQ ID NO: 10616 - DNA, 5482 bp, Unknown
  gut microbiota DNA sequence
gtcgttccgctcgcagggggcgcttttttatattataatttggacacctggaagggtgtcttttttattttaggaggagtgtatggtcgagctagatgacgagaaggttttttacgctttcgataaaacgctggagcctgccatggtcgtaccctccgggacgacggtgcgcgttcgcacgaaggactgcttcggcaaccagattcaaaagcccgaagacgagctcgatggaatcgactgggatcataccaatccggctacgggccccatcttcgtggagggggcggttccgggcggcgcgctcaaggtgagcgtcggtgccatcgagttcgacaacaagtcggtttcctgcacgggcgaaaacgagggcgtttgcggtgatcgtttcaatgcttggagcactcaggtgtgtgaaatcgacggcgatgagcttgtttgggacgagcgcctgcgcattccgttgcggccgatgatcggcgttatcggcgtggctcccgagggcgatccgatcaattgcggcacgccgggcagccatggcggcaatatggacaacacggctatcacggcaggggctaccctttacttccccgtcttcgccgatggggcgctttttggatgcggggatatgcatgccgttatgggcgatggcgagatcagcgtctctggcgccgaggcagctgggtgggctacggttacgctgacggcgatgcccgagctgaagcttgtcgatccgctgatcgagaatgcgacgcatttcggggtcatcgcctcggctgagacattggatgcggcggcagatcgggctgtgcacgagatggtggatcttatctgcgaccgtacggccgaggatcccgacaaggttgtcatgctgctgtcgcttgtcggcgatgtgcaggtgtgccagatggtggatccggagaagacgatccgcttcatggtgcccaagtacgtgctggactcactgggcttcaagctgtaggagcgagtttgtagagaagccacagaagaggcatgggggaattcccgtagggggcgaccttggtcgcccctgtttttgtcatgcgagggcgtctttctcgcgagggctggccaaggccagttgctatggaggatacggtggcggggaggactgaccaaggtcagctcctacgggttcgcctctgagcggtatatcgaaggattccaaaccatatacacaaatgagaataatagggcttgcgaatatatgagaacaaggataatatattccaagcgatttattcgcgtggaagtataacctattagggaggattgcctcgatgcgtaaaagttggaaacttggtgccgtctcggtggcccttgtagccgctctgggcttgttcggctgctctggtggcgataccacagagcagaaggccgatgagccggctgccccccagacggaaacccagacccccgaggcggccgagcctgagagcgaggccgtggagctgcagattttcgccgccaattccctgaccaaggccatggccgaggccgaggaactctacactcagcagaatcccaacgtcaccttcgctgatacgcagtacgaggcctccggtaccttgaacgagatgctcggcgccgggcagtacgctgacatcctcatcacagcctccaagggcacgatggacgatgccgcggagaacgggtatgtcaaggaggacacccgccagaccatgttcaacaacgacctggtcatcgtcaccaaggagggtggtgacctggccggtcgggacatctccctcgaggacatcgccgccggcaagtacacgctggccgtaggcgatgagaatgtgccggctggcaactatgcctgccagtccctgacgacggtcggcggctacatcgagcccgacggggccaccggtgccgatgccacgggcaagggcggcgaattctctgcgaccctgcagcctaaggtgaccctcggcggcaaggtgggcgacgtgtgcaagtacgccgagtccggtgaggtcgatattgccatggtctatacctccgatgtgtaccgtatgggcggtgtcgccatctgctcggtggtgcccaacgacacccgcaaggccatcacctatccgggcgcggtgtgcaccgacagcaagaacgccgagacggcccaggcctttctcgagtggtgcatgaccgacgaggatgccaaccagatttgggagaagtggggcttcgaactcgcccagaactaaggcgttcgcggtagaataactacgagctgcaaagcgcatcttggtacgcaagggcatctcgtcgggcgggcggggcgcaaagcctcgcccgcccggtgtgcaggacggcaatgagagtggtggctatggaaacagcgaaagcggccggtgcaaggcgatctgcgacggggctcgcggcttcggtgctcagggcggtcgcagctgcgatcctcgccggtgcggtgctgtggatctgcagtgggatcgtggcgccctcttcggcttgggctgccgatgcggagcaggctgtccaagatgccgagatagacatctccgctgacggcgatgcggcccgcatggagggctgcgacttcgctgtggaaggcttcgaatgttcgcgcacgggatccgcgcgcgacattgacggcctcagctacggctacacctatcggctttcaggcaccgaccgcgtggccgtcgtcaatacggccgactatgccgtgctcttcattccccgaaccgttgccgacgagtttggcatcgaggatgagggcagctctcaggttcaggaaataaagacctacttggcggccctggatgagaacttctccacgggggtgaacccgctggcgagtcaagaggaatggaaggtgctcattgccgatgtggaaggcgctgagggagcatcgctcgccgtgggcgacgcaaccttcaccttcgggcgcgagatctcggaagaccgcttctacgtgaccgtcgagggccccgacgacgctttcgacgtgaagagcgaggtgcggccggcgcagatggacagtgggcgccttgtgccggcggagggcgccgtcatcgcccagaagggcggcccgcttgagcagttgggggagtttctcgccaccatggactactcgcctttatgggtgacgctcaagacctgcggcgtggccattgtgttcgtgttcttcctggggctggccgccgcatatttcacgctgcgcatctcgaagcgcgcccaggatatcttcgataccgtcttcaccattcccatggtgctgccgccgacggtctgcggcttccttctgctgtcggcgctcgggcgcaacacagcctttgggcgcttcttccaggagatcggattcccgctcgtattcagctggcaggccacggtcatcgctgcggtggtggtggcctttccgctcatgtaccgcagcgcccgaggcgccttcgagagcttggatccgaacatgctcgacgcggcccgcaccctgggctggtccaacgggcgcatcttcatgcgcctcatgctgcccttggcctggtcgtccatcgcctcgggcacggtgctcgccttcgcccgggccttgggcgagttcgggtgcacgctttttctggcgggcaaccaactgggcagcacccgcaccatccccatcgccatctacttcgagtggatgaacggcaacaccgaggccacctggttctggacgatcgtgctgttggtgttcagcttcctcgtcattttgttcatcaacctatggagccggcataccacgcgctaccgccagaagagcagccacgaggggcgctcgcctaagccgcggagaaacggcacgcggggcggcggtcgaaggaggagcgcgaagggccttcgagaggatggcgccggaagtgccgacgttctgggagagggggtggcctagatgagcctggacgtgcgcatcaagaagagcttcggcgactacactctggacgtggcttttgcggccggagacgagaccctgggctttctgggggcctcgggctgcggcaagagcctcacgctgcgctgcatcgcgggtatcgagacgccggatgagggccggatcgtcgtgaacggcaaggtgttcttcgattccgagcagaagatcaacctaacgccgcagcaacgtaaaacggcccttctgttccagaactacatgctgtttcccaacctgacagtggcggacaacatcggcgcgggcatcgggcgcgaggtgccgaaggcggagcgggagcgcattatctccgaggagctggagcgtttcggtctgcgcggcttcgggcagcgctatccggcccagctctccggtggccagcagcagcgtgtcgcgctcgcccgcatgctggcggcccgcccgggcatcctcatgctggacgagcccttcagcgccctggactctcacttgaaaggggttctcgagcagaacctcgtgagcctgttcgatgcttttgagggaacgatcttgtatgtgagccacgatattgacgagtcgctgcggttttgcgaccgcatcgcggtggtggacgccgggcgcatcgtggagatggatcgggggcgggagctggtggatcggccgcagtcgatggcggggctgaagctgtcgggttgcaagaacgctccggcagcggagtatgccggagagcacatggtgcacgtccccccgtggggcattgacgtgcatacggctcaggaagtgccgcgagacgtgaagtgcctgggccttcgcgccttctatgtcgagcgggcggagggccccggcgagaactgctatcgcgttcgcgtcgatcgggtgagcgatgcccgcttcgagcgcatggcgcttctgggctttctcgatcgcgacgacgcggacggtgccgctgtgcccttcggggcgaacgagatgagttatctgcaccagcacatgttctggcgcgtgagcatgcgcaccggcgagatgctgcccgaagtgggagaggagctgtgggtgcgcatccctccggacaaggtgtatctggtgagtcggtaactccattcatcaaaaagtgcgagcaaaagcgcaggtagaacgggtcactcacccagcctgcgtgagattttttcgcccattttctcaatttcaggcagtctgcgggtagtcgttttcggccttcatcccctatagttccgccccgtggaaccgcttcgtagacctccgagacatagttggtgcgaggaggcgaagcggcaaggaggagaaccaaataggtaagaggggagggtcgcatccgctgcgatgcgaagcatgcatggctgattttgaaacccgcgaaatgtcgcgagacgattcccaggagcgcgaggaggcagccgccgaggcggcgatggatgttgccgcgcttgttgccgacgatttgcccgacgccgccgaactcaccttcgaggaaaagctcgcggagctgaaccgcacggtgatgcgtcatcccttgaaccgcgagatcctgtacaagaccctcgccttctgcgc

SEQ ID NO: 10617 - DNA, 14827 bp, Unknown
  gut microbiota DNA sequence
tgtccctcgttcgctcctacggcctcgacatgatcgagcgcgacgaggacggcaaccgcgtatcgcccgagcagaaggagggactctccgaagacgaggtcgacgatctcgtggccgagatctcgttcaagagcacggatgtgggcgactggttcgtcgattacaacaaaccgtccgcgcgcctcgtggatcttctccatcttgtgcccgagcgcaccgatacctacatcgaacttttggaattcgtcgaggcggcaccgcgctcctacgggcagatcgaggagctgctcttgggcaggcccgctcttcagacggtgatcgacggtcgcgtcgagaccatgcagccgtcggtgtttgtggacaagctcgagcgcgctggcgctctggtttggaaagaaggttggacgttgaccgaggagggaagggagtttctggaagatctgaaggtgaacggacaagcgtaatcacgtgtaagcaagaggagaggaagacaatatgtcaaaaacgaatttgacacgtcgcagcttcgtcaaagtgtccgctctcgcgggcgcggccgctgcggtgggcgcctccatggccggctgcatgcaggaagctgcgccggaagaggagctcgccggtactggcgaggtgggcgtctcgagcaccgagggcctgacgaagatgcgcacgagctgccatggctgcattcagatgtgcccggccatcgcctacctgaaggacggcgtggtcgtacggctcgagggcgatccggaggctccggtgtcccgcggcagcctctgcatcaagggcctgaaccagctgcacaccatgtacagcccccgccgcatcctgcatccgctgcgtcgtgccggcgagcgcggagagaacaagtgggaggtcatctcctgggacgaggccatcaccgaggccgcgacccatatcaaggacgccatcgaccagtacggcaactacgccttcttcgccagcgtgggcggcggcggatcctactcgttcatggaggccatgacgctgcccatggcgttcggctcgccgacggtgttcgagcccggctgcgcccagtgctacctgccccgttgggccctctcgaagctcttctacggcggtgacgaccagtccatcgcggacaacgccgtgcaggaaatcttcaaggtgaacgacaacaagaccgagatcgtggtcatctggggcgcccagccctccgtgtccgagaccgccgagtccggccgcggcatggcggagcttcgcgccgccggcgtgaagaccgtggtcgtcgacccgaacttctcgcccgacgccgtgaaggccgacgtgtggctgcccgtgcgtcccggcaccgacacgaagctgctcctgtcctggttccgctacatcttcgagaacaagctctacgacgaggagttcacgaagtactggacgaacctgccgttcctcatcgaccccgacacgaagctgccggtgcgcgcccaggagctgttcccggacttccagcagacgacgcccgagaacaccccggcctacgtgtgcttcgatctgaagacgagcgccgtagcgcccttcgagtactccgctcccgccgattcggccgtggatcccgagatcttctgggctggtgagttcaacggcaagcagtacaagaccgccggtcagatctacaaggaggaggccgacccctggacgctcgagaagacggccgaggagtgctggcttcaggccgacaagatcgaggaggccatcaagctctacgtcgagaacaacggcggcatcgccaacggcgtggcgtcggacatgaccgagtccgcctcccaggtgccgctcggctgcatgggcctcgactccatcatgggccgcatcaacaagcccggcgtcaccatgacccagaagggcggcggctacttcgccaccatgaccgacaccggcgagaccaagctggtgcgcccggtcacctacaacaacggcttcggcggcatgttctccgacatgtacggcgtcggcgcggtcatcggcatgtccgatgctgagaacgaggcgcgcatcaagcaactcggcgaggccatgcccgactcccagcgcatcctgaacaagcttctgcaggatcgtctgggcatgaaggaccataagggcctctacgcctggtgccactcccacattcccacggtgcgcaacgccatcgccaccggcgagcccttcaagccgcgcgtgtggttcgacatgtccggcaacaagctggccatgctcggcaacgctaagtcctggtacgacgtgttccccgaggtggactacatcatcggccagtacccgatgctcacctccttccacatcgaggcgtgcgatctggtcttcccgctgcgcgagtggctggaagagcccatggtgaacatgacccagcttgacacccagtggttgcagaacgagtgcgtgcacatcggcgagaccgtgtcgcactccatcccggcggcccaggtggtggccaagtgccgcgagatgtggggcggccacatcccgaacggcctggagctgggcgatggcacggcttatctgggcagcgccaccgaggccgaggtcaagcagggcgttgccgacacgctcggcgctcccgactgggagaccctgcaggcgaacaccgacgagtacgtgccgttcgtgacccccgattactggaactacaaccagcacgagcagatcgccgacgacgggctgccctccggcttcgccaccgagtcccgcaaggtggagacctactgccagatgctcatccgcatggctcgcaacgggtacccgtactgctatccggagccccaggaggcctgcgaggactacagccccatctgcgtgcccatcgagccggtcgagtctccctacgagggtatgccgggctacgatcccgagtacccgttcgtgctcacgagcggccgcgtgccctacttccaccacggcaccatgcgccatgctcccttcagccgcgagctgttcccctgcgccgagatccgcatcaacccggcctcggccaaggagctgggcatcgagcacatggactgggtcaaggtcaccagccgccgcggcgaggtgcatgcccgcgcctatctgaccgagggcgtgaatcccaagaccgtgtggatggagcgcttctggaaccccgagtgctacgacgcctcccaggccaaccccaccggcggctggcgcgagtgcaacgtcaacgtgctcaccaagaacgacgcccccttcaacgaggtgtacggttcctataccaaccgcggcttcacggtgaagatcgagaagtccgagcgtcctgccaacatttgggtggaggccgaggagttcgagcccttcatgcccactcaggaaatgctcgctgaagcccagacgaaggatgtgttctaatgaaaaatacgcttgtcatcgacctggaccgttgctcgggctgcgactcctgcgtggccgcctgcaagatggaaaaccagatgaacctgggtgtggtgcgcaaccacgtgtcggccgtgggccctgtgggtaccttccccgatatcgagatgtactggctgcccatgcagtgtcagcagtgcgagaaccccggctgcatcgaggtttgccccaccggcgcctcctaccgcgacgaggagaccggcatcgtgctcgtcaacgccgaggactgcatcggctgcgagagctgtctcacgggctgcccctacggcgtgcgccagatgaacccgaagaccaacaccatcgagaagtgtacgctgtgcttccagcgcaaaaacgacgagaactgggtgccggcctgcgtgcacaactgctgctgcggcgctcgcaccttcggagacttggacgatccgaactccgaggccgcgaaggtcgtggcggccgccggcgagaacgcgcactacctgttcgatccggccgacctgcatcccacgacggcctacatcctctcggagaagactgccaagtggcaggaggagcccgtcgaggtcacccgctacgagaagaagtagccattttgcgtgaggggtgcgtttgcaccagcccgtaggtgcgctcctcggttttcggttgccccgaccgtcgctccctcccttttggcggtcgggcgctcttgcgggttcgcaatttgaacccgcaggacgggggctgctgccttggtgcgccggtgcgccggtgcgccgctttttcgaggtcgcagttcctgtcctgcggagcgctctggcgctacgcggtttgtgcccaacgaggacgggcgagtctgagaggagaggggatacatggtagatgagatgagcgtcgccgcggcagatgaggctgtggtgacggaggacatgatcgcggccctcaagggtcgcgcggcgttctacgaccttttggcggccatctacttccggccgttgacggctgatcagatcgataatatcgccgagatggactggtcggaatatgccgatgtgaacgagctgttcgccgacggggtgaacgatatcacgcgctatttgcgcaagcgaaactccggcacgcgccaggcgctggccgtggacttcacttccgccttcgccggaacctcctcgtggaagggccgctacgcggtgccctacgagagcgtgcacacgagcgaagaggggctcatgttccaggacgcctaccacgaggtcttccagctgtacaaggccaaccacgtggccaaggccgagggctacgatttcccccacgatcacctgtcgttcatgtgcgagttcctcgtggtgctctcggatcgcatcattgccgctcttgaggctggcgacgacgcggaggccctgcgccaggtgcgcgtctcccgcgcgtttctcgccgaccatatcctctcgtggttcgacacgttccaggatctggcgcttctgcttttggagacgcgcttctatcggggtgtcttgaagatttccaagggctttttcctcgaggatgccgagcttctggatgctatcgccgtcgagctcgagcagcgcctcgaggcgcgagaggagaggtaacatggacttcgcgatcatccttgcagtcaccgtcgtcggctgcttcgccctgcgcaaccccttgaaggcgcttccggtcgcgttctacgctgccgccatcgccatcgacgtcgtctacgtgtacggcgtgttcttcggtctgccgcgcgccatttggagcccgctgttcgtcctcatccagaagtgcgagctgtcgctggccctgttcgtggtcgtcatgttcatcggatgcctgaaccggggcggccgcgcctatcactggctgaagcccgtgcgcagcgagctgtccatcgtggcgtggttcctctcgctcgggcacatggccgtgtacctggagagctacgtgccgcgccttctcggcggcggcgagatcgggggcaacgtcatgggcgccttcgttttggcggtcgtgctgctcgtgctgctcgtcgtgctcggcgtgacctccttcgccttcgtgaagcggcagatgtccacggcctcgtggaagaaggtgcagaagctggcctacccgttcttcgggctggtgtacgtgcacctgctgctgatgcttttgccctcggccctgcacggcggcctcgccgcccaggcctcggtggccgtgtactcggtggtgttcgtcggctatgccctctgccgcatgggccgggcgttggtcgaccggcgcgccgaggatgccgtgtccgcggccaacgacccgactcccgccatctccgacgaaccggaaatggtatcgtaggcccatcggatcacatcgaggagcgctcggctgtcgccgggcgctcctcgcgctagggagggcagtgatggccgagacgaaaaatttcatggcgaagctcgtgcgtgcgtggccggcattgccgtacatggccttgggggccctgctggcttcggtctatatagccagctcgggaacggcgtggttgtctgatagcgagaccaatggtggaaacctttcggtgctgaccgtgaccacgagcctgtcagccggcggcctcatgcttctgtccacgttcgcggtgccccgggtgcgctcgtggctcgagcgcccgacggcgtgcctttgggcgggggcagtctcctcgctcggcgctctcatcgtcatactcatcgggccctattatttgacgccgatgctgccctatttcgttatccgctcgctcttcttcattggcggcgtacttttcggtgtgggcctcggggcgatcgccctgcgttgcgggcagctctacggtgcgctgccgccgcgccaggtcatcctgtacgtggcctattcccagttcgtcgtgggagcctccttcttcattgtgcttggatcgcccgcttgggcgccggttcccggcggtcccagcttggcgggcatggcttcgttcgtgctgctgcccttggtggccggcgtcttggcatcgttctcccgtcatatcgagcagccgacgcccacgctcgcgcgtgaccattcgcgccggtcactgccgaagtcgttctggaagcttctggccgtcgtcttcgtgttctcctgtatcgtgtcctcggtgtacgcgtccacggtggcggtctcctccattgagacgacactgtccggctcgcgtctcgtcatgctcgcgcgcatgcttctggcgttggttttggcggtggtggccgtgggcaccgagggggatcgactcaacttcgggaagctgtactcggtggtgatggtggcctccgtggcgcttgtcgcctgcctgcctttggtgacggtgctgcataccgtgctcgcccaggtggtgtcgctgtccagcgtcgtgttcgagttgttcctgtggtgcattctcgcctttatcgtattccagcggcgcacctccgcggtcatcgtgttcggttacggctacggcgcctaccagctcggcaacggcatcggctggctcttcggggcgcaacttctggggacgctgttcggcgccgtcggcgaggccttcgcctatatgatcatggcgctcattgtgctcgcttgcgctttcctcatcttctcggagcgcgagttcgaccggctcttcgcgccgggggaggagggcgccccttcgctcgacgagctgctgatgagggatcttgccgccgagagcgagggtttggcccgcgaggacgaaccggtgcgcaagggacgcttcggtttggcgatcgaggctttggccgcagactaccagctctcgccccgggagaccgacgtgctgcgctgtctggccatgggctacaactcgtccaccacggcgagcaagctcagcatctcctggaacacggtgcgcacccatacgcgcaacgtctacggcaagctgggcgttcattcccagcaggagctgattgccatggtagatgacgtcacggcgggtgagggatagcgcgtccctcggtgttgattgcgatttatttcgagttcgctataatgagcagtcaaaacacgttatgaggggttgacttgaaagattcgcatggtcgcactatcgattatctgcgcatatcgctgacggatcgctgcaatttccgctgcgtctactgcatgcccgaggagggcgtgtgcgcgatgtcccatgacgagatcctgcgcatcgaggagatcgagcggttggtggccgtggccgctgggattggcattcgctcggttcgtctcacggggggcgagcctttggtgcgcaagggggtggtcgatctggtcgataccatcaccggtatcgagggcatcgagaacgtctccatgaccaccaacggggtgcttctgccccgtatgattgatgacttgaaggcggcggggctctcgcgcgtgaatatctcgctggatacgcttgacgccgaccagttccacgagatcacgcgcacggggcgcctcgaggataccctcgccggcatcgatgcggctctcggggtggggctgaatcccgtgaaggtgaacgccgtggccgtgcgcagcctgaaccaggatttcctggagttcgccaagctctctatcgatcgcccgttacacgtgcgcttcatcgagtacatgcccgtgggggatacaagcgtcgatgccggcacaggctggggcaaggaggacgtcatcccctctgaggagctgttcgatatcatcaacgaacgggccgccgccgcggggctgcccgcgcttcgcccggccggggcgacgaagcctctgggctgggggccggcccgttacttcgagttccccgacgcgctgggcaccgtaggcttcatcagtccgttgtcgcgccacttctgcagcgagtgcaaccgcctgcgagtcaccgccgacggcaaggtgcggccgtgcctgttctcggataccgagtacgacgcgcgcgcggccctgcgcgagggcgatgacgctgcagtgcgcgacgtgctgctgacggctctcggcgccaagcccgacgaccaccacgacaaagtgggcaccgaccgcaagatgtcccagattggcggctagcgttcttctgggctgtccgggcccgtgctcggggcaagggcgccgtgctcagacagtcctcgcttggtggaacagcccactgggctgttccagtcgctgcggaactccgcgcggaccctcgccccgagcgcgggcccttctcttccaaaaacgcctctcgaacctgctagaaaggaattgcaatgaccgaacagctgacccatatcgacgagaacggcgacgtgcggatggtggatgtgtcgcagaaggccgacaccgagcgcgtggccgtggccgagggcttcatctccatgaagccggaaactctggcgctcatcgtggagggcaaggccgccaagggcgatgtgctcgcctgcgcgcgcgtggccggcgtcatggccgcgaagaagacgagcgatctcatcccgatgtgccatccgttgaacatcaccaaggcgaaggtggaatgcgagccagtgcgcgagggcgagcgtgccgacggccgtgtgggcatccacgtggtcaccacctgcggcgtgaccggcaagaccggcatcgagatggaggcgctcacggcggcttccgtggcgtgcctcaccgtgtacgacatgtgcaaggcggtggatcgcggcatggagatcaccgacgtgcgcctgctgaagaaggacggcggcaagacgggtctttggctgcgcgaaaactcgtagatcgcacgcacatctattccacaacggaaagcccccggccagggaggggagggccgggggctttgttgatgatctgcggagccgggagggatcaggcccgcagcggaaagggtgtagggacgactagccgaggaacttcgccacggacttgccgcactcgcggccgagcaccagcgcgaaggcgagcgacacgcccgggatgggggtgatgtactcggtgccgaagcggcggccgcagtcgttgccggccatgtacaggccggggatgggctcgtagttggcatcgagcgcgttcatgtcaccgtcggtgatgatgccgcccatggtcaccatggtctcgccgagaaccgggtcgaaggtgcaggcgtagaaggggccgtccttcaccgggaagagcacttcagcggcgcggccgaactcggcgtcggcgccggcctcgcagtagccgttgtagcgctcgatctgggcgacgaactcggtggcggcgtcaccggtaagccccagctggcccgccaggccctcgagggtgtcgtcggcgatgaactctacctcggtcatggggccatggccgcccggaccctcttcctcggtttgctcgggctcctcgtaggtgcccttgaacttcgcgtaggccttgtcgagcgactcgcgcagggcggcgatgttctcttcggtggcgttgaagccggcgtgctggggcagggtgtactggcggtactcggtgaagttgttgtcgcacacggcgtacttcgtcttgcggctcatgaacgtggtctgatatccgcgctgctcgctggtggggtagaactcgttgcagaagcgcttgccgctctcgtcgatccacacggcctggggcaggcagttcatcttgccggggacggagaggcccttcatgttcatgccagggatgggggtcgtctccaggtgcgcgccggcccagtaggccatctgcacgccgcggccgtcgttggccgacatggagttcagcgactcgccctcgacgagcgcctgggccatatcgggcatgaagtaggccatcatgtcggggttgccgcccatgccgccgcaggcgcagaccacggccttgcaggtgatcttcacgtagccgtcggcgtcggaggccacgagacccgccacggcgccgttctccatgatgatgtactcagcggtggtgccgaagtagaactcggcgccggcctcctcggccgcggcctggttgtacatctggatcttggtctggttgcattcgccgtagaaggagcagacgctcggccagaacttgatgccggaaagctccgagagctggtgctccgtgggcgggaagaaggccgtcgtcatggtggcgaagtcctcctcggtcagccgatcgaggtaccagttcgagttctcctcggagttctgggcgaagcgcatgaccagcgaggggttcggcatgttggaggtgatcttcatgaaattctggtagaactcgatcgggtcgatgtgcggtacgccgcgctcctgcaggatcttcgcgttcagggcggcgaactcgttgcccacggcggcgtaggtgtcctcgggctgcttctcaatgagaatgaccttcttgccctgctcggccagctcgcggcaggcggtgatgccggcgaagccgtggccgcagacgacggcgtcgcaggtgagctcctttgcgaagtcggtgacctcggccgggggcgtcatccagctggtgtcggtgacgttgtggatgtgcacgtcggaagcgccggcgccctgggcagtcgcctgggccgagtcgcccgcgcccgcgctgcccgtggcgctgttgccggacggcgcgcagccggcgagccctgcggctccggcggccatggcggccacagcgcccatgccgatgaacgagcggcgggagatgccctggtttgttgtcttgctcataatccctaatcctcccatgtgtcggggaacagatacgcgcgctgcggactcgcctctcctttgcggcgactcccgacctcctctgggccggcgcgcagtgccatcctaggtgccaaaggggcgcgcgagtaatcgtcgggctgggggatttcgagggctttttccctcgcggaaatggggtagatgcagataaaccccaggtcaagacaaactcttcgaaaataacggttcggttacggtgctcgaagcgcgcgcgaatcggatatacttaccccacgcaaggcgcgtcgaggcagggagggtcccgcgttgcagatttccaagtatttcaaaccagaggcgctcatgttcgcggcctttctggccacattgcccatctattctccgaaccagctgctgttcgaaacggaacttttgcaacgagcggcctatatgccggcctttgccaatacgcttctgggcgcttccgtggtgcttggcgtcgcggtggctatcgtctcggcgcgtgggcgcttggccgtgatcctgcgtgggggtgtcgtgctggtcgcatcggtggcttacgttgcgggctatgcgctgttcgctttggctgcagggctcgagagctttgcccagccgatttttggcgtaacggcggggcttctgcttgccgtctctacggtggtgctctcagttgcttggggggcctatcttgggcagttcaacttgcgccaggcgcttttgtggctggcggttatggtgggcgtggcggcgctggtggagctgctgctctcatcggtcaccttcgccgtggggcttatcgtgttcgcggtgctcgttccgctttcgtgcttggtgccctgctggttggcatggcgcgggcgtttgattgcggtcagggaagcaggggaggcggaatcgaggtcggcgccgacgctcggtgccatggcccagctgaggcagatggcgcaggtggtggccatgccgtttgtgggccttatggtgttcgccttcatgatgggggcgcgcaagttcgtcctgttcgacgtggtgcatatggaggtgctcggctgcgtgctgggcgccgtggtggtgcttcccatctgcctcatgcgcacgcgcgttccgctcatgccgctcatctatcgggtgctggtgcccctgttcgcgctgctgctgatcttcctgaactgttttcccgcgtcgacaggccccatgtggttcgccgcttggatgagctatgcgttttacggcgccgtggccattttggctctggcgggtctcgtggcggccgctcacgcctcggagttctctccgggcctcatctttggcacgacggtggccgggttttcgggctgctccttgctcggcgtgatagcggcccagacggttctgttccagattgagggcggcggcccggcgctgcttgtggtgagcaccttgtacttcgtgtacctgcttgcctcggccctcctggccccatggaagcgcgataggggcgatatcgctcttgaagagggcgccgatgctgccaaggctgcgcccgtgcgcgatgtggccgcccgctgcgaggagctggccgacgcctgcggcctcaccccgcgcgagggcgagatcctggggtatctgggccgcggtcacggcatcgcctttgtggctgatgcgctcgtgatatcggagagcaccgtgcgcacccacgtgaagagcatctacaagaagctcggcgtgaactcccgtgaggagctcgtgtcgaaggtgagcgaagagtagcggcgcaacctgcgcgtgggacgccccgctgcccgctcgcttttgtcccccgtagaaaaaacgtgcaggggaaatgggcgggtatttcccgcgtttatcccttgtggtaccataagccgctgttgtattcgtgtttcgaagggacgtattcatgtcagggcattctaagtgggcaaccaccaaacatcgcaaggccgcgcaggacgctaagcgctcggctctgttctccaagctggctcgcaacatcaccgtggccgccaaggagggtggcgacccgaaccccgacaacaacgcgtcgctggccgccgccatcgagaaggccaagggctattccatgcccaaggacaagatcaagaccgccatcgacaaggctttcggttccggcaaggacgccgccaactacgagaccgtcgtctacgagggctacggcccggcgggcgtggcggtgctctgcgaggcgctgaccgataaccgcaaccgcaccgccgccgatgtgcgcgctgccttctcccattccggcggcaacctcggcacctccggctcggtggccttccagttcgaccgcaagggccagatcatggtgtccaaggaggtcgagaccggcgacaagaagaaccccatcggcccgaacggcgccgctgccgacgaggaggagttcatgctcgccgtggccgaggccggcggcgacgactacgaggacgccgacgaggagtggatcgtctacaccgcgccgggcgatctcatggccgtggtgaaggagcttgaggcccagggcatccaggtgaagggcgccgagatgaccatgatcgccaacacgccgtcggcggtgtcggtggccgacgccaagaaggtcatgcgcctcatcgacaagctggaggagctggaggatctgcaggcggtgtaccacaccatggacatcaccgacgagatcgccgaggcgctcgacgagtagttttcgcgagcgttaaagccaatcgcgctagggaaggcgccgggccgcagggctcggcgccttttgcctttcggggacgtaacggggccgcgcaacattctggaaacatagtcgcgaggaaatctgatagggtgaagcctaggtaagcgcgcgataggctctttgtgcagcagcgagggagccccgcgcaggacgaaaagggaggctccatgggttttctcgaaggtaagaccgccatcatcaccggcgctgggttcgcggcgctcaaggacggatccgccggttccatcggctacggcatcgccaccgcctacgccaaggagggcgcgaacctggtcatcaccggccgcaatgcgaagaagctggagacggccaaggagaagctggaggccgaatacggcatccaggtgctctgcgtggccgccgacgtgaacgccggggccgacaaccaggccgtggtgcagaacgtcatcgaccaggccatcgagaagttcggccgcatcgacgtgctggtgaacaacgcccaagcctccgcttccggcgtgacgctggccgaccacaccaccgaccagttcgacctggccatctactcgggtctgtacgccaccttctactacatgcaggcgtgctatccctacctgaaggagaccaagggctcggtcatcaacttcgcctccggtgcaggcctcttcggcaacttcggccagtgcgcctacgccgccgccaaggagggcatccgcggcatgagccgcgtggccgccaccgaatggggccccgacggcatcaacgtgaacgtggtgtgcccgctggcctggacggccgctctggagaacttccaggaggcctaccccgacgccttcgaggccaacgtgcacatgcctcccatgggccattatggcgatgtggagaaggagatcggccgtgtggtggtgcagctggccaaccccgacttcaagttcatgagcggcgagacccttactctggaaggcggcatgggccagcgtccgtaggcgcgcatccgttgcaactttttaagccggctcggaaagcaatcgtgcttcccgag

SEQ ID NO: 10618 - DNA, 2417 bp, Unknown
  gut microbiota DNA sequence
gaggtttagacgttccgcctcttctttctactgctcggcgcaccaggcgatgagggcgtcgcgcaggaaggccgttgcgccctcgcctgccgcttcgtcgtagtaagccgtgaagcgctggtcggccacatagccctcggccagagccgcgtgggccgctggcgaataggctccctcgccccagtgcatttgcagccagcgagcgtgcatggcacacaacttccgagccacctctcccgtcgggtcgcccgtcgccttcgccgcagtcagttgctcgaggatagcagcttccaaagccttggcgtcgttccattcctcctgggacatgccggccatgcgctcattggcggcatccatggcagcgtccccgtaagcctgccgcacctcggcgccgtagcgctcttcgttctcggcaatggctcgggccttcatcccttcgaaccgctcttcatcagtcatagtgcatcttccttccagggacgcgatggtcttctccaccgtccccaccagagtttccaattccttttgctgcgcgcgcaatgtggcaagatgatcgatgagtaccgcatgaaagtcgaaatcgccgttgtcgagggccccgcgaatgtcacccaaggaaagtccgcaggatcgcagcagcagaatctgctgcaaccgctcaacatctgccgcgccgtaacagcgatagccgctggccgtgcgctcggggtgcagcagcccctcgtcctcgtaatggtgcagcgcccgcaccgtcacgccggccagcttcgccagcgagcccacggtgtacgaggctctttccgcttgcatctttggtgcctttcgcatgcttggcattttggccgctaccgctttcgcctttgctgccacgttcgcctctccttcactcccagcaccttcgcttccgcttcttcgcaagatcgctcatctcgccttgccgaaaccagcataaaccctcacgctccgtaagggtcaagggctttcgaaagattttgcagccacaaattgacggttctttctgaacaaccgtgattttgaggctagaaaagacccacattctcgcaaaagggcaaaaagacagccccgaatcgacggttcttccgtaaataccgtcgattcggggcttaaaatttccgggcgcttctcttgcaccacggctcaacgccactctcgctcagcgttgcttccgctcggcgctacttcttcagcagcttctggcagagtacggtgaaggcgcacacgcctagagcgaagatgcccaccgtgagcacaatctcgggaaccgtcggcgcgtaggcgcccatcaacgtccacatgtcggccgcgcctcccacctgcgccgccgtggtgcccaaggtgatgccgttggcgcccacgatgttgggcaccgcgaagccggtgaacatgagccagcagcgcttgcaaaacacgccggccaccacgagcgcggaagccgcaccgaccaccttcatgttgcggcggttcttcgcgaacaccagcaggcagaagggaatgaccaagccgcagatcacctcgaaccagaagaacggggccgtgccgccgaacagcagcgtgttgatcacggccatgccgccctcggtgccgttgtaggccgtcgtcagaatctcgcagccgatgaagtacgcgtccacggctatgcaagtgcacaatagcccggccaggctcgtgaggagctcatccttcgtttcgaacacgccacgagagcgcaggccgagcagggccagcaccagaagcgccaggccagagtcgagcgcagaggccacgaagatcggcgccaggatggcggtgtgccacgcctcgcgggccacttccagaccgaagatccacgccgtcacggagtgcacgaggatggccaccggcagagcgaagcgcgacaccacggccaccttggaagggtcggccttgctcgaggtcatgaagtacaagtacaccagattgatcaccagatagcacgtgatcacaatcatgtcccaggccagaggcgacaggaagttcagccccgtgaacatgcgccagatgcgctggatgccaccgagatccacgagcacgcagataccagcgcagcagatgcacacgagcgacaaaatgacagcgggcagcgctacggccttgtacttcttaatgccgaagatggaagccgaggaagccacgataaggccgccggcggacaggcccacgaagaacatgaagcacgtgagatacaaaccccagctcgtggagttgttcatgcccgtgatgccgaggccgaacatcagctgatacacgtacacgccgatgcccacaagagcgatggcgcccgagcccaccacgagcgggtttttcatcaaagaagtcataactcgcctcccctagcgaacgtaaaagacttgcgggcgcgtgcccttctcttccaacag

SEQ ID NO: 10619 - DNA, 5146 bp, Unknown
  gut microbiota DNA sequence
aggcgcgacacggcggaatccgggtcgtccaaatcgccgaagatgcgggcatcggccgggcagcagcgcacgcacatgggctcgtcgccctcgtcggtgcgctccttgcacagcgtgcacttctccatcacgccgcggccgcgctcgggtacgcgggcgtctccataggaagcgccggtcgcgcgcaccggctcgttccagttgaacgtacgggcgctgtaggggcaggcggccatgcacatgcggcagccgatgcacttgtcgtagtcgatttccacgcggcccttatcgtccttataagtggcacccgtggggcacacgcgctcgcacgccgggttctcgcagtgctggcatgccagcggcagatacgtgcgcgaaaggttcggataggtgccctcggcactatcgaagcgctcgcacccctcggtgagcacgcggttccacagcatgccgtcggacacgttgttctgcatcttgcacgccacggcacaggtgttgcagccgatgcaacggtgcaggttaatgccaatagcaagtttcgtcatggctattcaccagccttcttgatctcgatgagcgtgtcgttgaagggaatcatggggccgaagggcatcacatagccgcgctcgtttagctggtcattggagacagactgcataatggtgccgtccaaatactggcggtaggtgctctccaccatgaaggcgctatcgggacgcacggcctcgttcaggtgcagcaccgtgcggaaggagccgcgatcgttgaagacctccaccgcatcgccgtcttccagaccgcgggtggcggcatcggccgggttcagctcgatgcagggctcggccacttcctgaatccatttcgcgcccgagtaggccgagtgcacgcggaagcgggagcgggcctgattgaactgcagcgggtatttctcgcgcagcgggttctccggataggcctcgcaaggcgcctcccaagcggggaaggcctggccgaactccagcatgttctcgtagtaaggctcttggcggcctgagggggtggtgtattcgaaaccgatttccggcactcggagctcctccgacccaatcagtcgctgggcgccgttgttctccttcaaagtctccagcgtaaagccagccatctggggatcgtcgctcgacaggagcgcccgggcgtactcttcgccatcggccgggaacaaatcgcccagccccatggcctcggcgatgcccttctcgatgtagaagtccgacttgctctcgaacagcggatcgagcaccttcaaattggccaagatatgagcgttggcgcactttacgccgcccacctcatcagcacactcgaatttgctgcacaccggcaggaccagatcaacgaagtcggccactgagctgtgatagatatcggccaaggccacgaagtccagggaatcaatccattccaaagtcttattccagttcgcagccttctgggtgggaatatcgccgaagaacatcgcgccgtgaacggcgttgtccttcatcacatcgaagaagccctgagtgctcaccggcgccatgccctcgggcagcacccaagcgcccagcgccgcctcgtagggggtcacatggtagccgtagatgccgcaacccgtgccgcgcttgccgtagttccccgtcaacgaggcaatgagcgcgtagcagtggccggccacatcgttgttatagaacttgtctataccgccgacgctgttgcaaataatggaggggtccttcgcgtactgggtagccacgtcgactataacctcaaccggaacatcgcaggtcgcggaagcccattccagcgtatagggctccatgtccttccgcaagcgcgtgaactgagtaacgtagcgcttgccgttcacagtgaactcgccttccaatgccggagtcgcaccctcggtggtgtggggcaccgccgcgttcgtcgcttcgtcccacatatagaaagtcttcacttccaccggttcgccggtttccggatccaccgcttcggccacatcggccaggcagagtcccgtttcgggatcaatcaagaacggcagcgcggtgtgagccagcacatgctcgcggtcgtacagctcttcatccaagatgtacttagtcatgccgaggaagaacgccggatcggtaccagcgcgcaggccaacccactgatccgccttgctggccgtcggactaaaacgcggatcgaggcaaatgatcttcgtacccgcttcctgggcattcatcatggcgcgagcccaagtcaagctcgtctcaaccagattgcaatttgccatcagcaccaccgcagcctcatcccactgccagatggtgttttgagcgaacagaccgatccatggagaaaatgcctgaaactggccgttgccctgacctaaatcatacccattcatgctgctcgtctgagctcccagcacgctcggcagcagcggtgggaagcgctgggaggcctccgtggagaactggatccacagcgcctccttgccatacttgtcctgaatggccttgaaattctcggcgatcatttggaaggcctcgtcccagctgatagcctcgaactcgccgcttccgcgctcgcccacgcgcttcatgggacgctggatgcgggcgtcgccgtaaatgttctgcacttcggagatgcccttcaggcatacgttttggaagcgcttgtcctcgttttcgcgcggctggatcatggccaaacgcccgtcgcgcacggtgcactgcaacatgcagttgcacaggcagtgctcgttgtggtacgtaaagcccagcgtttcattggccgtcggctcggcctgagccgcgctggcagcgatgcccgtcaggctcgcccccgcaaagccagctgcgccgacggccgcggcggccttcaaaaaaccgcgacggctcagcgcagtgcccctcggtttctgctccatggtgtcctcctgctctctcgatttcggtcggcgccctcggccggcattccctagccgccgatctgcggccgataccctcgattccgctccgacccctcgtcggaatcggtctctgaggcgcagtctacgaagcgtcaacaagaaaagcactgcccattcgcgcaatcccgtggcttacgccccactttctgaaaagtgggcattaacgcagaactcccgccacgcccaaaaccgctaagatagacggcacagaaactggcgagttgcgccgtgacaaggagggacgatggcggacaagaagagcgacctgcgcgtcgtgcgcacgcgcaatgccctgcgcgtggccttcgaggagcttatcgccgagacgaccctcgacaagatcaccgtgaaggccctcaccgaccgggccggcatcaaccgcaagactttctacttgcactacgagaccatcgaggccttctacgacgaaatcatgaacggcatcatggacgagttcttcgagtactacgagaaaacgccggacgacccttgggatatggacggtcacgcccggcgcttcttccgctacctagccgctcagcctcccatgattgagcagctggtgtgctcgccaagcttctacgacttcggggaacgcatctatgccacccaaatgaaccgttatcgagccttcgccgacgagctgttctggcgcgagggcattacgtccaatagcgaagagctgatatgtgcgctcatccgtaacatggccctggaatgctaccgccaatgggtgcgcgcgggaaaggtcgttcccatggaagaggcggcccagattctcggctccatgacattgcacagcgtcgagcacctcatgagcccccggcccgagagcgattagaacagcgacatttggtcgggatcggcggggcgcttggtcggagcgggctcttcctgcgattccaggggcacgggcacgtgacgggcgagcaggtcgcgagcgtcggtggaacgatccagccacgccaaggcttccggcgccgtcagcgagaggggcatgcggctgtgcacgtgtcccaccacggcgtcgggctcgcaggtgaccagcacgaagcggtcgcccaaacgcagtcccgccagcagtagtgccgtaccgcccgcattcgagaaccgatactgcgacttgcggccgcgaggacgccgagaagcggacgccgctggattgccgtccaatcccagaatgccctgttccacatcggccactgctccgcgcgtcagctcggcaggatcactagctccaaacggcgcatcctcgaccaacgccgcccccgcgccaactgatgcagcgttttcgacattccgcgtttcgtaaaaggcccgaacgggcacgatgcaacggccgccttcgacggcgtcgctccacaggcccgaccccgatagcgccgattcgatgcgcgcgttgaacacgagcccgcgcttccaggaaacgtcgacgccccatagcaggtcgacccgcgcaaggtcgccctcctccatcacgatccccgagctctccgcgcccggatagcaatcgagggcgtcgaagggcacgtccaccggccggccgaacgctggaggcaccaccgttgccgcccccgcgccactcgccagcgctcgccgtacggcccgcagccaatcgagcaccgcatcggcctcttccccgctcaccatctcaaaccgatgacacaccgccgctcctcccagatgatcgcttctgtcctacacgccccaagctcacagctgaacaaagcctatccggaagatactgttttgcaatatgcgtgagcttgatctgcagaacccgtgctgtagcgaaatctattaaatatagacaggtcgtagaaatataccaagtatagtaaatatagcaaatctatttttcggacgaagtatagcaaatataattctcaagcgaagtatagcgaacgcaacccatcgggctgcgcgtgagaaagcgagggcgtcatggccgccgatgttctgttcttggaatacccgaagtgctccacctgccagaaggctaagaagtggctggacgcgcacggcgtgacctatgccgaccggcacatcgtggaggacaatcccacggccgacgagctgcgcgcgtggcacgagcggagcgggcggcccctcaagcgcttcttcaacacgagcggcatgctctaccgcgagatggagctg

SEQ ID NO: 10620 - DNA, 18757 bp, Unknown
  gut microbiota DNA sequence
aaagcggccgccccgaagagcggccgcgaaaagcttggtggaggcgcggagaatcgaactccggtccatactaaattgtccacaaggcgctacaggcttagtcagcgatcgggcttcggagcggatcggttcgcagaccaacgtggccgctcctagtcggttcagtctttcccgcggccataccgactacgtgccgcagggcattcccctcaaatgacaccttgcccggttcggggaagcaccggggtcggtgatcaccagaactgctgttaggcagccatggcggccggcatgtagtagccggtcttagaagtgtttttgccaattaacttgacggtacccctgtttagcgtggcgaggagaccacggcctgctcctcgtttcgaacttaccatgtcgaaaccagtcgccccctttaagggttgtcgatttattctagcgggcgcgccgctcctgtcaagagccgcaccatcggccccgtcagcccgacacgcccgagccgccgaggcgccgtggcgctaggccgccacgcggatgagctcggcgccgttcaggtcgtaatcgtccaagcacacgctctggcgcgccggctcgtcgtaggtgcaccagtaataggtcttggtggccgccgagtagccgtcggagaacatcgtgtactcgaagcgaccgtcggccatctgcgcgccgcccttgcacatggacgcgccctcaagcgtgcggaacaggcgcgtcacattggcggcctccccctcttctgcgggataatgcgcgttcaggaaagcggcccgcacgaagcggctggccggatcgtagccgcccgggaacccgatcatgcccgcgccgctgccgaacgcgcacagggtgtcgcgcgtccacgcaaccggctcgggatgcgcggtctcgatgtgcatatagttgcgcacattctcggtatgccaggggaagggcggctggttggtcagcacgtccagcccgtcgtcgtacacgtgcatgccgtcggcttggcactcgatgacgatggactccttcccatcgcctaccagccagtgcagctgggccacgccatagccctcgctgggcgccttggccacgatgacaacgtccttaagcgccttgcgcacctcggccaccgtggagaagctcgccgccacccacagagggaactcgtaggccgccacgttcaccgctcccttttcgggagcttcggcgaactgggcatagccggggaagttaaggccggcgatggcgagtcccgcctcgttggcgcaatcgaagtagcacggcacgccgcccacgacgatgcccatgcccacgcaggcatgctcgggactcagcgaaccaaggaactgcgtggggatagacgcccctcgcggggtgatgaccacgccctcgccgtagctctcgcaccaatcgaggttgcggccgaaatacaagttgccggctgcatcggcaaaacgaacgcccgtgcacataatgatctcctaacgacgaaatgggagcgacccaaccgatcgctcccattcatagtaggccccgacgaccgacgttcgccgatgcgggccgtctccgttgtcgtttcgacagcgccttgtcgccgttactttttcttcttgaggaaactcagcgaatcggagatctcgtcgaaggtgctcttcagctcggcggccacctgaacaccgtccttgtagatggcgttcacgtccctggtggcggcggccacgccctcgcggctgatgccgaggtcgaactcatcgccgtccgaggtgcgctccacgcgcacgccgtcgccgtcgttgtcctcgtcgacgtagtagtactcctgctcgttgccgtcctcgtcgagcaagatgaagccgatctcgttgtcgtgctcgtcgacgatcaccgcatagacatcgccgtcctcgatctccatctcgatgacttcgctctcctcttcgggctcctcctcaatgtgatagccctccgagtgcaggatgtcggcgtcctcctcggcctggatggcctcgggcacctcgtcgggatcccagccgtcgtagtcggcctcgttgtcggtcatgaagctgtcgtaggcgtgctccaagtcgctttcggcggcatcctcctcatcggcgtcgaagagggcgtcctcgtcgtcctcggcgtcttccagctctgtttcctggtcggtccactcggcatcggtctcgccgacctcttccatgctctcaagctcttcgtcaagacccattgccagactcctaacctcgtgatgtacgtgcgcgggcgacctcgcccgccgaacctatgatgccacgacttcccgcgccgtggccctcccgcgccgtttcgttgaccgagcgtgaacgtgccaaggcgcgacgccggtcgtgcagcccgcagacaccgagcgaaggcggtggcgcaaccggacgccggcgcgcggcgcagccccgcagaccccggcctagcgaacgcgctccttcagcgcgcggtcgatctcgcgcttggtgtcgcgctccttcatggaggcgcgcttgtcgtagagcttcttgccccgggccagcgccagctccaccttcacccggccgtcctcgttgaagtacatcttcaagggcacgatggccaggcccttctcggccaccttcgcgtccaggtagcgaatctgcttcttgtgcagcaggagcttccggcgccggtcggggtcggggttgaagatgctgccgttggagtacggcgagatgtgcacgttgttgagccacacctcgccgttccgaatgagggcgaagcaatcggtgagctggcagttgttctctcgcagcgagcgcacctcggtgcccgtcagctcgatgccggcctcgtaggtctccaagatctcgtagtcgtggaaggcccggcggttcttcgcgatggtcttttcctcgcgcttcggcacggccctcacgcctcctcgggtgcggcggaagcgtcgggcgcatcggcatcggcatcggcatcggcggccttcccttccgcattctcggtcaccgcgccgcccagccccggcacgaagctcgtgtcgggggcgaggtcttgcgcgaagcgggcgatgaggcgcaccgtggcctccaaatcgcgcaggcagatgacctcggtgggagtgtgcatgtagcgcagcggcacggagatgaggcccgtgggaatgcccccgcgcgtcacctgaatggcccgagcgtcggtaccggtgaccgacggctcggcctccagctggtacggaatgccctccgactcggcagcggccacgaggcgctcgaacaccacggggttgatgttcggcccccgcgcgataaccgggcccgccccgcagacgatctttccgtacttcgttttgtcgatgcccgggtagtccgtggcgtgggtgacgtcgaaggcgagcgccacgtccggattcacggcatgagcgcttgtcatggcgccgcgggtgccgatctcctcctgagtggtggctacggcgatgaagtcgcccggggcgcggccggcgcgggccagcttctccatgacgcgacaggcgatccacacgccgcacttgtcatcgaagcacttcgagacggccatgtcgtcgccgaaccgctcgaatccgacgccgaacgtgatggggtcgcccacccgcacaagcttcttcacgcgcttgggcttcatgcccaaatcgataacgagggaggagagcggcgtcaccgtcttgcgctcgtccggctcgatgaggtggatgggcttgcggcccacgatgccgcggagggtgccggaagcggtgtgcacgtcgacccgcatgccgggcaggatggccgcgtccacgccgcccaaagaggccacggagaggaagccctcgtcggagatgtaggtgaccatgaggccgatctcgtccatatgggccgccagcatgagcgagggcgcaccggcgtcgcggccctcgagtaccgcgcgcaccgagcccatggtgtcggtggccacttcgtcggccacatcggcgagcctctcgcgcacgagagacgccgccggttcctcgaagcccgtcggcgagggagtctccaccagctgcttcagaaatttcaggtgcttcttcttcatatcaccaatatcctttcgaatgcttgcgcttgcgctcgggcttgggagggcggaagtccagcgccagctggccgtcggtggtcttctcccgcttctcggcgggagcggcgccggcgcgctccaccttctcgatggtccacgacaccgcactcgcgccgaacagctctagcatcttcatgcgcgcgtcgtgggcgttggccttggtgccggcccgcgcgtcgctctcgaactcgaacagcccgcgctctctctcgtaggagcccttcggcgactggtaatgggcgatgtacgttgccataaactcgcgcgcttcctttctcaaacgttcccgagccatgatagcagagcgcacgaacttcgtggatggcccggacgccagattctgccaggtaaatgccacttcgaccccgaaatgtgcgccccattttccacgtcttgtacatttctatcttcaactggcacttttctgccatttcagccccgaaatgtacaaaccgtctcttgtccatcaaccatttctaggccaaagtggcatttcgaaggcagaatcggaaaaacatctggagacgaccggccgccagcctgggcaccgttggataccaaacagtatcttcagtgtccaaaaaagagaaaaggccagaggctataaacctctgacctggtaaaacatggagccggtgacaggaatcgaacccgcaacccactgattacaaatcagttgctctaccgttgagccacaccggcgacgagcgcgtgaacggccgaccctccccatcgatgccgttccgcgtcggcctattgtacgacaacgctccgatttagggaagtcgcatccgcgcaatacctgcgcaatcgcacgttaggcgtcctctaggcagtcgatcggtcgtatgagcctgccctactccttggcgccccactgctcgtagtaggcgtcgatggcggccgcgatatcgtcgtcgatcacgatgcgcccggccacctcgtggttgtgcaggcactccttcacctcggccatggacacgatggaggccaccgggaagccgtacttcgcctcgatctccttctgggccgtggtgacgccgcccttccccacctccatgcggttgagcgacacgatgagcccgcgcacatccacatcggcagcggccttcaagatggggtaggtctcgtcgatggacttgcccgaagtggtgacgtcctccaccatgatgaccttgtcgccgtcgtgaagctccgcgccgagcaggttgcccgcgtcggccccgtggtccttcacttccttgcggttgcagcagtactttacctccttgccgtacagctcctgaagcgccatggccgtcaccaccgccaaggggatgcccttgtaggctggcccgaacaccacatcgaagtccagcccgaaattgtcgttgatggcctgggcgtagtacagacccagccgatgcagctgctcgccggtcacataggcgcccgcgttcatgaagaacggcgacttgcgcccgctcttcagcgtgaaatcgccgaacttcagcacgtcgctctgaaccatgaactcgatgaactcgcgcttgtaagcctccatagccgccctttcatccgtgaggagttccctcgtctttcctgcgccgaacatgatacccgattcccccacccgtttccgcagagccgacgaaatcctttggagagaaaggcacgcaatcattttactgacaccggtaaaatgatcttgggcaaggagaataccgttcggcatcacgctaccatcccccttaacctcccaattctattgacacgcgaacatctattcgagtagtatagcgtacattcattcgggcgaacaagtgtgcctgttagggctggcggttggaaggggttgcgcggtgaacgtcatcgagaagctggagattctggccgatgcggcgaagtacgacgtggcttgcacctcctccggggttcagcgcgcgggcaaggccggacagctgggcgcggccacccaggcgggatgctgccattcgttcacgccggacgggcgctgcgtcacgctgctcaaggtgctcatgaccaacgtctgcgtctacgattgctgctactgcgtgaaccgcgcgagcaacgccgaggcaccccgagccgcatttacgcctcgcgagttggccgacctcaccatcggcttctaccgtcgcaactacatcgaggggttgttcctctcctcgggcgtcgccggatgccccgatcgcaccaccgaactcatgatcgaggccctgcgcatcctgcgggaggagtacggctttcgcggctacatccacaccaaggccatccccggcacctcggtggagctcatcgacgagctggggcgcctgtccgaccgtctctcggtgaatctggagctgccgagccggcagagcctggggcttttggcccccaacaagtcgcgtgcgtccatcctggcccccatgcggcatatctgcgactccatcgccgacgatgcggaatcgcgctcgctggcgaagaagcgcactacggtatacctgacgaagaagaacgcccggaaggcacgggccttcgcgccggcgggccagtccacccagatgatcgtcggagccaccccggaaagcgactaccagatcctgaacctgtcggcggccctgtacacccacctgtcgctgaagcgcgtgttcttcagcgcctacctccccgtcgtgcccgatccgctcctgcccgccaccgacgccgtgcagctgaaccgcgagcaccgcctctaccaggccgactggctcttgcgcttctacggcttcaacgtgagcgagatcatcgacgaggagaaccccttcctcgcccccgatgtcgatccgaaggcgaactgggctctgaaccacctggacttctttcccgtggaggtgaacagcgcgcctttggaggcccttctgcgcgtgcccggcatcggcgtgcgcggggcgaagctcatctgtcgggcacgacggcagtccaccctcggcgaggcggagctgagaaagctcggcatcgcctacaagcgggcccgctacttcatcaccatgaacggcgcctggggcggatcgggagtcgatttctcccgcgaggccctgcacgcgcggctttcggcccctatcgacggcggtcgccatgggcgccgcgccgaccgcgccccagctggccagatgagcctcttcgaaaccgtggaggtaccgcccgtactgcccgaggcgagccccgatgcggcaaccgcccgcgaggtcgccttcgccgcccagcgccgggcccttgaggcggccgggacggcgaccgggcggcaagcggccgcaaccgagccggcatcggtcgcagagcgctcgatcgccgacggccgcaaaacgctcgacagcccgctgctctcggtggcctaggtgggcgtcatgaagcatatcccgaacgcatacgcggagggcgcccctgcgacaccctcccctcctcccgacatctacgacgaggtggcctacgcctacgacggctccctggaagggctgctctcggccgtcttcgccgcctacgagcgtcacgagcgtcccaccgatgtcgcgccggaagagcgcctgcagccccgtctcggccagcgcgtggcgctcatccccatcgaccaggaccgggccctgcgcgtcatgagcaccctgcgccgccagtgcggccgcgcggcagccctggcggtgacccgcgccgcttgctcggacgagccggatgcgggcacggcggtctaccgcttcgtgcgctatgccgttgacgagcagaagcatcgcgcatgcgaacactgccgcaagcgcgcctcctgcgcaggccgcggcggcatggggccgtgccccaagcagcggggtcgcgccttctcggacatcacccacccggcagtagagcggctcttccgcatttcgcgctcggtcggccaggaatgcgaacacatgcgccagttcgtgcgcttccagcacctcgccggcgaaggagccgatgtatggttcgcccgcgtgaacccgaaagcctcggtggtgccgctcatcatggatcatttcgtggaacggctcggcgtgcagcccttcatcatctacgacgaggtgcaccatctcgccggcgtctacgacggcggcgactggcagctggtgaacaccgagggcgccggcgacttggaactagcgctgcccgaccgcaccgccgacgaggccctcatgagcgaggcctggcgcaccttctacaaaagcgtctccatcgacgcccgttaccacccggagctgcgccgtcaattcatgcccaagcgcttctggaagaacctcaccgagctgcaggaaagccctgccgccctgcgcaccgcgctacgctgagcgcgggtgagccgcggccgcgcaaacatccccgccggtgcgacgacagccctacaagctgaataccagctcgccggtcggggcggtcagcttgccgggcacgggacgctcgcactcgtaggcaatccccaccgccggccccacgtgcacgccgatgaccggactgacgggcagcacctccaccgcgtgtcccaccaccggctcgatagcctcgcgcgcccatttgatggcgggggccgctgatccgatgtagtgcaccaccacgcgcttgagtccgcacgcatcgatatcctccttgaagatatcgaccatacgcgccagcgtcttcttccacgtgcgcactttcgccaacgtagccgtctcccaatcggccaccgtgagcacgggggagatttgcagcagaccgccgagcaacgccgacgcacctccaatgcgaccgcccgccttcaaaaaagcaaggctctccggcgcgaagatgaaccgcgacgagacgaccgaatcaatcgccgcctgcgcgcaccgtgtcagatcgccgcccgcatcgcgcgcatcgcatgcatcgagcaccgcgaacatctcgtcgccgcagttcgacgtcgagtcgatcagcgtgcagcggaactgcttgtagcgctccttgcaggcccgagcgctgcgcaccgccccctcgaacgttccggacatcttcgacgagatgaaaaccccgagcacctcatcggccgcctgcgccgccttttcgaaaatcgtctccatcgcatgctgcgagggctggctcgacgtaggcggattgtcgatcatgtcggcgatatcctcgtagaacgcatcgacgtccatgtcggcctcgcggtactcacgaccatcccgattcacgaacagcgagacgacttcgatatcgcgcgcccgcaccacctcggcggggatagaggcgaccgaatcggtgacgatcttgaccacgacttctcctttcagcgaggcacccgaaggcatccgcgccgcacgcgacggcgtatcgcgacgctgcggccgcaatggggcatttctgctatcgtacaccatgtgcacggtcgaaaacgcgcgcagaggagaagttcatgcgaccgttgagccaaaagtcggctaatactttcgcatgccgctggcagctaggcgctacacgcccgtgaagtcgaaggcggggatgaagctctcctcagcggctcccccttcttgccagaagtagtcctccactcccagcgcgtcagcgaaatccagcagctcctcgtactcggaatcgggcacggcgcgccccagctcggggctcgcgaccagagccgcggcggcccgcgcatcacccgcatcagcggcccgggcgatcaccggcgtgtactggttcatgagcgacaggcggatatcgcctccgaagcgctcgtgcagaagccgcaccacggccttggagttctccagggccccgggcagcatgagatggcggacgaccacgccggagacgaggcgctcctggccgcggaactcatcgtagcgcggggcgcccgtcgcctcgaccatcgccttcagggccgcaagagccacctcgggatagtcggcggcacgggagtagcgcgccgccagctcgccgtcggcgtacttgaaatcggtgaggtaggcgtccacgaagccgatattgtcgcgcaccgcctccacggtctcgtagccgcctgtgttccacagcaccgggagcgccacgccctgctcgcgggccagggcaaccgcctcgcggatctgcggcgcgaagtgcgtcggcgtcacgcagttgatgttcagcgccccggcgcgctcaagctcgcccataatgacggcaaggcgctcgacggtgatcgcccgggccgcctcgcccagggcgatagaggcgttctgacagtagacgcagcgcagagggcagccggagaagaagatggtgccgctgccgtcctcgccggagatcggcggctcctcccagaagtgcagcgccgcccgggccacgagcacctcgcccgcagctccgcaaaccccgcgctcccccgccgcccgatcggccccgcacctccgggggcataactcgcacgacgatggcaacgtgcagaggggatgcgggatgccttgaccgagcgagttccgcagcgaacggaaatgcccggtgggcacttccgccgggcgaggactgtctgagcgaatcaaggtatcccgcagccccggccctggcgagtcacagctaattggagctgtaatcgaagtcgtcgttatatggggcgaagtcgtcatagtcgtcgtagtcgtgatcctcgcggaagtggtcgtggccgcagccgtcctcgtcgtcgtaggcgctccagtcctcgtcctcctcggaggcagggtgcccataggccacttcggcgcgggtccagtcgagcccggcccgggccccggccgcctcgtcctggtacaccagagacaacgccgccggcgccatatcggctcccccgatgaccaccagaagctccagcaggtgcatggtcgcctccacaccgggcaggatcacctcagcgtcgtcggcggccatgagcgccgcggacagctcggccagaagcatctcggccgtgtagtcgccggtgtagcgctgctggcgcacggcctgcaccacgggatcggcggagacggggctgaacagcggaatctggtcggcatccagcgcccccaccgagcgagccgaggcatcgtccaaggccacggcctcgatggcgctcaccagatcggcggccaagggcagcgtgtgggtgttgcgcagaagctgcgcgcggcccggtgcccccacttccaccacttccccgaagatggcgtccagaagccggcgaacctcatcggtcagctcggcttcggtggccaccggccccagaaggttctcgcgggcgaaggcatcggcggccaccagcgagcgcaccgtcgccggcgcctctaccatgaccaggtcgttcaccgtcgccacggcgttgatctcacgggcgaagttcggcgtggcggccgacaagtccaccagcgtggatcccggggccgccgtcgtgacgagcccctcgtcgccgaagtacaagtcctccagcgccgatccggaggtggcgaacgtcaccacgatgtccgccgaggcgacatcggacactcgggagaagccggcgtcggccaggcgcccctccacggccccgatgaacgacggggctcccacgtaggcgtacgacttcgccattacttgtctcccttcaccttgcgggcgatgcgatcggccacggacaggttctcgcgcttgtcatggccccagaacaccacggccagcatatcggcgcccacatgagacccgatgaccggcccgatgttgcacaccagacacaaaagcccgggcgcctccttttccagggcctccttcaaacgcgcggcatctttggggcagtcggcgtggcccacaatggcgacatgggcctgaccggcgtcgtcgacgtacttcttgtagtactccgccagctgcctgatgcccttcttgcgcccccgggccacgccgaccaacgacagcgtcccgtcctcggcaatgacgagcagcggcttcacatccagggcggcaccggccacggcaaccgaggcgggaatgcggccgccgcggcgcaaggcctccaggtcgtccaccatgaactcctcgttcacgaagcagcgggcctcctcggcccaagcggccagctcggcggccgacatgcccttctcgtgctgcaccagcgcctcgtagacgagcagcccctcggccacgctggccaaatgggtgtccacgatgtgcagctcgaagtccgggtgctcggcgagaacctggtcgcgcacgacgcaggcggcgtcgaaagaggcggacagcccgctggagaacgccaggtacaccgccggcgtcccctcctcggccgccgccgtgaacgtgtcggtgagcgtctgcagcgtcacctgggccgtcgagggctcggcgcccttgcgcatggccccgtagaaggcctcggccgacacggactcgaacaggtcgtcctcgaaggtgcccccgtcgacggtgtaggggaacttcatgagcgtgacgcctgggcgccgcaccaccgaggcgggcagatcgcaacaggaatcgatgatcaggtggcatttcgccatagagcgtcctctctatagaatatgtcgcagctcggccaccagcgcccggcggcgctcgttgaggcccagctccagaccaacaggataggtgtgggggttcagcatgcgcaactgagtttcgtcaagggtttccaaaccaacacaagcgcgggcgcgggcggccatggcgctgcggtcctccggcgcgagcaccaccttgccggcgcgggccaaagggcgcagcagcgtctcgaagcgcaggcccgagaggttcttctggcgcaaatcgtccatggggtccacgatgacctcccgcacatctggcgtctcattcacatcgaagaccatgtcgccggcgatgcggccatcggactggtagtaccgtcgcacgtcgagcacgcccggagtggtgagcttggcggccgactcggagatcttcagccgcgccgtccaaggggcatcctcgcccgcgcgaaccgcggccagcttgtagacgccgcccagagtcggctggtcataggcgctcgccagcttcgtgcccacgccgaaggacatgacgtcggccccctcctccagcatcgactggatggtgtactcgtccagatcgttcgagagcacgatgccgcaatcggtaagccccgcctcatccagcatgcgccgggccatcttcgagagccacgacaggtcgcccgagtcgatgcggatgccggccaggcgctcgccgcgctcgcgcatttccaggcccacggtgatggcgttcctgatgccctgctccacatcgtaggtatccaccagaaggatgcagttgttcgggaagatgcgggcgtactcgcggaaggcggtaagctcgtcatcgaaggacatgacccaagaatgggcgtgagtgcccgagaccgggatgttgaagagcttgccggccagcacgttcgaggttgaggcgcagccgcccaccaccgccgcgcgcgatgcccacacgccgcctaggccctgggcccggcgcaggccgaactccgccacggggcgccccttggcggcgcggcacacacgggcagccttggtggcgatgagcgtttggaagttcaccatgttcaacagcgccgtctcgatgagctggcactgcatgatggggccggtgacccgcacgagcggctcgtgggggaacacgatcgtgccctcgggcaccgcgtcgatatccaccgacaggcgcagatcgcgcagatactccaagaaggccggatcgaacaaggggccgccggccggggcgtccagcgaggccagataggcgatgtcctcctcgctgaagcggaacgtctccaccaggtcggccagctgggccatgccgcaggccaccgcgtagccccccttgaaggggtagtcgcggaagtacatggtgaagcaggcctcctcgcccgctttctcggcgtcccagtagccctgggccatggtgatctggtacagatcggtgagcagggcgtagtccacgttcatgagtgaggtgcctccctagtttccggtgccgttgccgccgttgccgccaggctgctggcccgagcccgcgcccgcgcccgcgccgccgtcggccttgggcttgcgggagcggcgccggcgccggggcttggaagcgcccccgtccgccttggcgccctcgccccgggacgcactaccctgctcggcccgcagccccgaggatttctggcccggccgcggcgaggcgcccttggacttgccgtcgccctggccggagcgagagcggccctgggagcccttggccctttgcgctttcccctggccgccctggccgctctggctgcgcccgccgtccttgggtcgcgccccgtccttgggccgcgaggccgtcccggagcgctgacggcgcggcttcggcgatgcggctccctcgccacgcgcgccctcctcgcgggaggtggacacgcgctccaaaccgcgcccgtcgtcggccgccgacagcttcgtggagcggcggcgcttgcggggcggggcggccggggccggagacgccgcctgagcccccgccgagcgcgagctgccgcgcccgcggccctcggagccgctgcggcgcgagcgccccgcctcgcccgatcctttgcgcgatccgccggtatggcgcaccttggcgccctcggccagcttgtcggccccggtgaactggctcgtcgagaagatgagcgcctcgccgccgatgagcccgcgatcgctcgtcgcctcttcccaagcctcctcccccacggcattgggccgcgtagcaccctcgggcgccggatcgaagtcggacaggggcaccttcacgggcttttccccctccaccttcagcgacacgatctcccgcggcacgtcgtgatcgaccaccttggcaggcccggccggcgtctgcaccgtggcgttcagcttgggagcgcggcccttgaagtccttgtaggcgtcgaactcgtagcgcagacagcacatgaggcgcccgcacagccccgagatcttctgggggttcagcgagagcccctgctccttggccatgcgaatggacacggggcagaactcgccgccgagccgcttgcagcacagctcctggccgcagtgcccgatgccgcccaccatgcgggcctcgtcgcgcacgccgatctgacgcatgtcgatgcgcacgtggaagcgggccgccagcttgcgtaccagctcgcggaagtcgatgcgctcctcggcctcgaagtagaacacggccttgtcgccgtcgagcagaaattccacggacaccgggtgcatgtcctcgtggtactcccgggccatctccttgaacaccggcagggcctcggcggaagcgcgctccatctcggccgcctgctcgatgtcctcctcggtcgcgatgcgctccacggggcgcagggcgctcttcagcgcgcgcacctgctcctcggacacctcgatgacctcgctcgcgacgatgccgaactcggtgccccgggcggtgcgcaccaccacgggcatgtccttctctatatccaaatcgcccggatcgaaccatagcgtccgggggttgaaggtcaagttaatcggtgcgacccgaaccatgaacaacctctcttacgtcgaacagcaacgtgtccaagcacgtttctggggatacattataggccagcgcccgctcgcactcgtccaccttggagcaagctgcggcgatgaccgccgcatcggcgccggagaacagcgcgaccagcgaatcgcgcacatcggtgttgatgaccagctccggcgtcccgcaggccaccatgagcccgtcgcgcagccacgagcgaaccatggccgtcgtctggcgcagatactcggaggtcttcgccgacagctggcgcttgttgcgcgcctctatctggcggatggccgatttcgcgagaaagtcggcgttctcggcaagctccgcctcttgggaggcgcgcacctcgtcgagcggcgccttcgacgcctccacgagcgcgcgggccatctccaccacatcccagtcgtcggcgcgctgaagcatggccaaatcggagaagagccgcgtccggaaggcgaggcgctcgcttcccggcgcccgcagaaacgccacggccgaggtgatggagccgccgcaggcctcgatggcctggcgcgcctgggcgggatcggcgccggtgttctgggccacgatgcccgcggcctccgaggcgggaatgtggcggaagggcaccacctggcagcgggagacgatagtgggcagcaccgactcgcgggtgcgacccagaaggatcatcaccacgtcgtcggccggctcctccagcgtctttaagaacgcgttggcggcgctcgcgcccagctgatccacgcgatccagaatgtagatcttcttgtcggcctgaatgggagagagcgccgtgtcggccacgatctcgcgcacctgttccaccagatacccgttcgcgccggccggggcgaaatagcgcacgtcgggatgcttgcgccgcagaatgcgcccgcagcggtcgcaggcgccgcaggaaccgccccgcggcccgcggggccccttcgggcacatgagcgcctgggcgagcgcataggcggcctgggtcttgttggagccggccggccccacgaacagataggcctgggtcacccgctccgagaccaccgaggcgcgcagaaactcgcgcaccttgggctgtcccagaatgttctcgaaggcgtcagccacgggcgccctccttcgccttcgcttccttctcggcgcgcttggccgccatctcccgtgagacgagggcatccagatccgccccgccggccagcgccgcggcggcctccggtagcacgggagacaccacctccagcacggcgcggaacgtgtcggcgcggtgtacccgcgagagcaccgtcctcacccgggccgggtcggcctcggcgatctgctcgaagcccacggccacccggctgtggaaggcgtcgccggccagctccaggcggtcggccccctcgcggcgccccatgcgcgagcgcacggccgaggcgggggccaccaaaagcaccgtggcatccggcaccaccccgtcgcaggcgaaccggttcgccgcgtcgatgaaggcgccgtcgagcccccgcccgcagccctggtaggccacggtggagtcgtagaacctgtcgcacagaaccaccgccccgcgtccgagcgccgggcggatgacctcgtcgacgatctgggcccgggccgcctcgtagatgagcagctcggcgcggtcgctcatggcctcgtgggcggggtcgagcacgacggcgcgcagggcctcccccacggcggtgccgccgggctcgcgcaggcgcaccacctcgcgcccggcatcttccaaaagccgggcgaggaagcgtatctgcgtcgacttgccggcgccgtcgcccccctcgaaggtgacgaagacgcccgtgttcgcgggtgctgccacagctgctagaccccttcccgctcggcggcggcgcacgcgcgcacggcgtcggccacggcgtcggccacgcgcgggtcgaaggggtcgggcatgatgaactcctcggagagctcctcgtcggagacgagcgcggccaaagcctcggcagcagccagcttcatgggctcggtgatgcgctcggcccgggcctgcagcgcccccttgaagatgccggggaaggcgatgacgttgttcacctggttcgggaagtccgaccgtccggtgcccaccacgcgcgccccggcggcgcgggccttatcggggaagatctcgggggtggggttggccatggcgaacacgatggcgtcgtcggccatggaggcgaccatgtcgggcgtgatgacgccgggagccgaaaccccgatgacgatgtcggcgccttccatggcgtcggcgagcgtgccggatttgtcctccaggttcgtgacggccagcatggcctcttgggccggattcatcccctcgtaggaggagctcaagatgccgcggatgtcgcacatggtcacgcgcgcgaagccgtaggacagaagcagcttggcgatggcgatgcccgccgagcccgcgccgttgacgaccacgcgcaccgacgctttgtccttgcccacaaggcgcagcgcgttgatgatgcccgagagcaccacgatggccgtgccgtgctggtcgtcgtggaagaccgggatgtccagcgcgtcgttcagccgcgcctcgatctcgaagcagcggggggcggcgatgtcctccaggttgatgccgccgaaggccggggcgatgcggatgaccgtctcgatgatctcgtcggtgtcctgggtatccaggcagatggggaacgcgtccacgccgccaaaggccttgaacagggctgccttgccctccatgaccggcatggcggcggcagggccgatgttgcccagccccagaacagcgctgccgtcggagacgacggccaccgtgttcgccttcagcgtatagtcgtaggccgcctcggggttctcggcgatgaccttgcagggctcggcgaccccgggggtgtaggccacggccagatcgtggcgcgtggcgatgtccatcttcggatcgaaggcgagcttgccgcgccactcggcgtgcttggcgagcgattccgctgcgatatccataggctccaagtccttagaacgatttctcccgtgtaaacctgtctattgtaccccc

SEQ ID NO: 10621 - DNA, 18119 bp, Unknown
  gut microbiota DNA sequence
ccccgctcgccaacttcgccccaccccccaccttcgcctctccttctcgggttttgctctccagggagctggcgggagcaaaacaagctctgatattttcgaaaaattgcgattgttagcaccacggggtcttctctttcccgaaaaatgcggttgttagcgtccggtgccgctcgctctgtccccatttgggctatattgggatcaaaagcacgcagaatgggctgaaaagcctctaatgcaagaccccggatgctaacaatcgcaatttttcgagaaaaatcgtacccccttttgaacggaggcaaccgtgagcgaacaaccctcgacaacgccactcgccgcagagggcctgacagcagaaagggtaggtgacgcggtttacgacgccattcgccagtgcgccgtcacgttgcggcccgacttccaaagagccgtggaagcggcgcgcgaggaggcggtgccggagagccgggaagcgggcgtgctcgaccgcatcctggaaaacgcccgcatcggcgtgaccgacggcgtgcccatctgccaggacaccggcagcgtgtgggtgtgtttggaagtcggcgaaaagctcagcgtgcccggcaacatcttcagccgcgtgaacgacgcggtggcccgcgcctacaccgacggccgcctgcgcatgtcccttgtgcgcgacgccctgttcgaccgcgccaacaccggcgacaacacgcccgccttctgcgagctgaaactcgtgcccggcaccagcgccaccctgcacgtgctgctgaagggcggcggctccgacaacgcctcccgcgtggtcatgctgccccccggcgccggcgctaacggcgtgcgccgggtggtcctcgattgcgtgcgcgagaaggcggccaacgcctgcccgccgctcgtcatcgggctgggggtgggcgccaccttcgacaaggtggcgggactcgccaagcacgcccttctgcgcgaggtgggcggcccggccgcaagcgccgaggcggcggcctttgaagaagagctgctggcggaggtgaacgcgctcggcatcggtcctgcggccctggggggcgcgcccacggccctggctgtgcacctggagacggccccctgccacatcgccgccctgcccgttgccgtgaacatgggctgctgcgccatgcgcagtgcgtccgtcaagctcgtttagcgtaccaccccgaaaggactccccatggcgaaaaccgtctccctcaccttgccgctgacccgcgcggacctcgccgacctccaggtcggcgacgaggtgctgctctcgggccccgtctacaccatgcgcgacgccggccacgagcgcgccctgcaatgcttggaagacaccggccacctccccttcgatctggaaggtgccaccctcttctacgccggccccacccccgcggcggccgggcgccccttgggctcggtcggccccaccaccgccagccgcatggatttcgccacgccggcgctcttcgaggccggcatcgtcgccgccatcggcaagggcaagcgcagccccgaagtcgtgcgctcctgccaggaaaccggcagcgtctacctctgcaccgtgggcggcatcgccgcattgctggcgaaatccgtcaccgaaagcgaacttgtcggctgggaagacctcggcaccgaggctctgcgcaagctcaccctgaaggacttccccgtctacgtcgccgtcgacaccaaaggcggcgacctctaccgcaagatagaagccgccgcccaataagctcgacaattcagcactgctcgacttaagtcaaaccaaccatgcgagaagcgctcggagggtgcgcatcgccgacctctgagcgccccgcagagaacgccgttagttaaagaaatagccccacgtcagcagcaagcgcgctgggatgaggctgtcttatgtgcgttccttccgctatttcctttaacggcgttcgcagcgggataaagcgctcagcgggcggcgatgcgcaccctccgagcgcttcccccggcaggttacttcttggaagccgctttccggccacccttagagcgaccgctcttcttctcggccttcgccttctcttcctcctccttgcccggacaatcgaagttcgggcacagcttccacggcccgcgggctgtcttgatgaccaccatgggcgcgccgcagtgctcgcacacctcctcagtggggacgatgtcgccgtactgaggcagcgggtagcgcgtctggcactcgtcgaagttctcgcacgtgatggagcgcttcaacgtgcgcgggttgcgccgagcgatgaggttcttgtcgaggccgcgctccgcgcacacggggcacttgcccactacgacctccggttcctggtttgaagcgcaggcggggtcgatgcactgcacccggggcttgctgcggaaggcggtcaccttcacctggggcataccgcaggtggggcacttctcgggcacggcctcgatcttgcccttgggaagcggataggtcacgtcgcagtcgggccagccggcgcacccgatgaacatcgacttggtcttgtggctcgccttcagttgaagatccttgccgcacttcgggcacggccccacgtaggcgtctgcggccacggcgtcagaaagcgcgtcggccacctcctcggaatggggcatgaggttcgccagctcctgggcgagcaggttgcgcgaggtctccaccacctcggccttcgtctgctccccctcggcgatgcgatccatggagcgctccagttcggcggtcatctccgcgtgggtgatgtgcggcgcgaacttgtccagcgcgtcgatgacggcgatgcccagctgcgagggctcgatggggtcgttctgcacgtacttcacctggtagaggcgctcgatgatggaggcgcgggtcgatttcgtgccgaggcccagcttctccatttcctgcacgagcttgccctgggaatagcgcgccggcggttcggtctgcttcttcgtacaggtggcgccgttgaaggcgatggtggagccctcggagagcgccggcagctgctcgtccttcttcaacccgtaggggtagatggcgcggaagcccggctcagccagcacgtcgcccttggccacaaagggctcgccggccacgtcgagcgtcaccttcgtgccctccaccgtggccgggcccgaaagggtcgccaagaagcggcgggcgatgaggttgtacagcttgtagtcggcagcggacaggtcgtcgggcgtggcggccgccgtggggtagatgggcgggtggtcggtggtctcggtcttgccacgggtggccttcaaggggccggcggacagcagctgcttgcagtaggggccgtaagcagggttcgccgcgatggcgttcaccacctcggccagatccagcgagtccgggtacaccgtgttgtccacgcgggggtaggagatgtagccgtccatgtacaggctctcggcgatgcgcatgcagcgggcggggctgatgccctcggcggaggcggcggccatgagcgaggtggtgttgaagggcaccggggccggaaccttgcggcgcttcttctccaccgaggccacccgcgcgctcacggcgccctccacgcgggccatggcggccgcagcctcggcctcggccttgaagcgggccgtggcgtggggcgcctcgaaggcctcggggccgtcgccggcggtagggccggtcgcagcagcaccgtcaaaggcgccgcggatgacccagtagtcctcgggcacaaacgccatgcgctcgcgctcgcgctcgacgatgatggcgagcgtcggcgtctgcacgcgcccggaggagcgcacgttgccgtagccggcgaacttcaccagcgtgaggtagcgcgtgagcaccgcgccccaaatgaggtcgatgtcgcggcgcgacccgccggcggcggccaggtcgtcgtccatgggcacgaggttggcgaaggcgtgggtgatctccggcttcgtgaaggcggagtagcgcgcccgcgacaccggcgccgtggcgttcacctcgcggcagcacgacagcgcgtcggagccgatgagctcgccctcgcggtcgaagtcggtggcgatgacgatggagtcggccttcttcgccaggttcttcagagagcggatgatgtccttctccttgggcagcttctcgatgggcgcgtagatgagatacggcagcgcctccatcttccaccccttgagctccacgccgtcggcggtgaagggcttcttctttttgaaggggggcttggcaaggctgtccggcacgacagcgggcagcatctcgccctcggcggtgacgccctcccagccgccacgtttcttgtaggtaaggctcggggtgaaatcgggctccaggatgtggccgcgcaggccgatggtcacccactcctccccctcgacttcgaatcggtagaccggcgtgttgaacaccttgtcggctttgggcttggaagcgcccagaagatcggcgatcttcaccgccgcgtcgttcttctccgtaacgaccagtttcacggaaccatcctccttctcggccgcatgatgcggccctcacgttcgcacgatttaccccaccttgagatttttacgtgcgcggggtttgtctgggcagccgcgccgccttggggccgcgcgaatgcgtggggcctaggatacacgatttgccgtgaagccgtgcgagaaagtcgttgaatctgcgcgtccccgcatgcggccccgtttcgcgctcgcgcgccccgcgcctgagatccttcgcctgcaccgcattcgcgcacgaaaccgccctcgcgaggttcccgtaaggtcgatgaccgtttcatgggcgtcccgtagtcgatttatgaagacggatcctgcgggttaccatagatgccggacgccgtcgaatcgcagcattcgacccgcgaataccgagcatcaacgtacccccggcggcgccttcgcgcaacgtgacccaccccgaggagattccgtggacagcaagatcatcaaagccttcatcggcctcactgccgccttcatcctcgtcatcgccgttttcggcatcctgccccaactgggcatgaagggccccttcgagaacttccagagccccctggccggcctgttcgagggcggcaagaacgccgcagccaatgcggccctggacgtgtcgggcctgaaatcgaaggccgagagtgccctgcgcggcaacgccgatcgcatcgccgaggccacgggcatgtcctcctcccaaatggacgccgccatcgacgcgctggacatccaaagctgggaggtgacgagcctgcccgagggcgccgagaagaccggctcggccaacgtcagctacagcggcaccgacgccaccatcaccacctacgacgacccctccgtcgtcaccgtcaccgccatgggccaagacatcaccctcgccgttcccgattctgcccagacctacctgccgttcttgagctatttgggatagagtgaaaacgccgggcgcggtcgccgaaaccgcagaacccggttagtgccgcccgatatcgtccgcagcaatccagctgcgttcgccaactccgcgaaatcaggagagcatcacctgagattgccccaagcaacccaaccgcgttcgccaacctcacgaaatccggcaagttttccccggtttgcgacatcgatcctcccagaaacaccccgatcaggcccgaatcgtctccgcccataatcctgacctggcaaaatgccacggtagccccgacgaacctcctctcatcccagcccctcacgtcgaaaatctctaaaaactcgccaccccaagcccctcaaaacagcacgcatcaaaatgggtcacccgcccacaagcgacccacttcctcagagaactatctttttgcaaccgtcagaagctctctttcgcttttagaacagaacgatgaacaccatggtttgctggctttcgcggtagcactcttcttgcagagacgtaccgatcgacaccttcagccccctcaatgccgagtctatctcgctggcacgagtctgagctagcgtagcagatgaccggcagtcaatgttcaccacataatcctgtatcgcattcttcgaggcacccgagcagcgcatttcgatgaggccattgatctccttgtcgttccgataccagttcagcggcggacgcctgacctcatcgctcccggaaaagtgacgctcgaagagcatatacctgtcttctgaaacttgttcactgcgatcagcggaaatgccctctgattctgaagccacagccgtcttcttcaccgaagccttgatttgcctagcttgtttcgaatcggatacttgcgtctcacgcatctcaagcttgcagtatttcgctcccaagcaataggcgacatgctgaagctcggacatcttctccttttgaatctcctggtacaggctttcaaggtcgagaaaacgatccagcccggatgggtcgcgaacgtagactgcgcccatctgggcaaatggatggaacgccagtccgctttcctcggcaaaagcatggtacagatggaatatctccatcccgttcgatgccttcgtcaaccacccgatagcgccttcgcacacgtcgatgcccttacgtttgtcctcgtcttcaatgatcaccatatttggtagatcatagtctgggctccagaactcgtcggggaatacgggggcatacttgcgtctccgagcttctagctgcgcatcggccgccaaacgagccccctccttggctcgctccgcaaccgtcccaccagcagcggccaccttgccggcaacggtgccgccagcctctgcagccacctccgccaccgactcgcccaactccttagccttatccgccacgttccctaatttgctacgaataccgcccatagtctttgattccttcctctgccttgcgtccagactagcagttttccgttgccgtccgcattagctgacagctagccaaatctgctattccgtcgtctggttctgcgccgccgagctgacttcgatcgtgtagccttctggcagggcggcgccgagcagggcctcgatggacgagacggcgttctcctgggcctcgttgagcacctcgccgctgatggcggcagcctccgcttcttggcgcgactcgtcgatgtactgcgtgacgtcctccacgccgatggggttgaggaagttgttctgctcgtgcaatactttaaaactggtcgtgtcgatggcgtccgataggatggtcgcctgcggcagcgacacctttacggtcgtcccctccagcgcaacctgagcttcatccagattcacgcccgccttcaactcgcccatgtaagtaagaatgaagaagttctccgagaagggaatgtcgatggtatcgaacagcttgctgttgctctcgaccttctcgacgacggtgtaggtctgcgatgcggtagccagctcgttgatctgcgagatctcgctcatgagaacggcgacatcgacattgggctcctcctgcttgtccggcggattgtacgtgaacagcatgaagaccgagaaggcgccgatcaccaagccaatcgccgccccgatcccaatgagcttcgccttcttcgaaaggtttgcgcgcgaacttgccatgcggcctccttctttcctcgtcagtctctccataagcttgtggcttcatatttgaagtcggttcgttaatggtagcacatatgctttccccatgaacatcgaacagaaaagacaggccctgggaaagcgtatccgcgcggtacgcgaggagcaggggctttcccaaagccagctggccctcatgatcggcagcagcaaatcccacatctggcgcatcgagaccggccgggtcggcgtgggcatcgacgacttgggccgcatcgccgacgccttaggctcgcccgtgcgcgacctgctgactttttagctacgctcagagaagagctcgacctctcgagcagctcgagccgccctctcgaaaaacgctccgtcgacagcgctttctccgtcgggatcaatgagcgccatcgtctcctcgtctccaagggcactcctcagataccctgccaccgtttcgaaaaattccaccatagcatcccactcgtcggcatcgagctccgcagcctccggtacggggtagccgcacgagcggcaaacaaaatcgacgagggacaccgcccggttttcagagaaggacgatcccatatcgtccccggccccggccccggcttcgatcatcgccgagagttccaagatcatcgacttcagccacacgagaaacaccgccgactgcagaaaaccgggagtcgcctctccgcccacctcgccggcgaactcggcctcctcgctgccatcctcgaagagcgtccaaatgcccagcaggtcaagatcgtcgatttcgaagaaatacgtgcagaaccacgccctcagtcgtcgcaccgtagactctatatgggcgaagggatcctcgtcatcgcctcccagaaaatcgacgatgatcgcgcccagctcgtcccataattgctccaagcccgcatcgtccatagattcccaccggatggctttatcggcataggccggcgagcttcgcatgagctcggcgaacgcatccacttcggaggtgccgaaggccaaggtttcgaagaggtcgtcgccgacgatttcggcatagcgcgcgaacaagatgagatgctgcaagtagcgctcctgagcacgcaattcctcgatgcgctctgccaacgcgtccgtcaggctcctctcgccatcgagaatcggcggcatatccttgagctcgaatccataggagccgagcaccacgatctgcttgagccggtcgacgtcctcggggctatagagcttgcggttgttggccacgccctcccccgaacgcctcgggcacagcaggcccttttcatcgtaatgctggagcgccctcgtcgtcacgcccgtcagcttcgacacctggcctgccgtcatgggccacccgtagttctcgcgtatcagatcgttgctggtttgcatcttcggtttgcgcggcatagtcttcgcccttcgtttccgccaaagaatttccgccgcacagcataaacctcaacccgacgttgaggtcaagaagttttcttccctaccgtgcgcccttgaggcggcgctggtaggcgcggacgatctgcgacaaagtgaagcagacgatgaagtagatgagcgccatcagggcgaagatggcgaagatctgcaccgtggagttgtagctgttcatgaggatcatgccgcggcccatcagctcctgcagggccatggcgccccacagatacgacgtgtccttgatggtggtcacgaactgcgagagcaacgccggcaccatgttgcgcagggcctggggcaaaatgatgtacaggtacatctgcggcgccgagaatccctgggaatgagcggcctcgtactggcccgccggcacgcttgccagaccaccgcggacgatctcggccaccgaggccgcggtgaacagcgtgaaggcgagcaccgccgcgggcaagggcggcagctgggccacgaagaacgtgaacatgatccacagaagcagcggcgtgttcttgaacagctccacgtaggcgatggagaagccgcgcagcacgcgggaggaggatccgcgcatgatggaaatggcggcgccgagcacaacggagcaggcgatggccagcgccgagatgacgagggtgagcccgagcccttccaaaaggaagcggatgttcgtccaggtgagcaaagcggcgatgtcgctcatttctggcctcctctccggcccttgcccttgcgacggccgccggtgcggccgatggcgccgcgcacgcgggcgagtccgcggcggtctcgcggcttgcggggggccacggtgcgtcggtcgggccacgccggcgcgtcgatgccgtaaagctccgcgtacgtgaggtagcggcccttgtccatcacgggaggcaccagcgtgctcgtgccctccaccatggtcgtcacgccggcggccatggcctgggcggccgcgtgcccggtgatgtcgtgggtgcccggcgtcacctccaaagcgtcggccgcaagcgcctcggtggcgtcgccggtggccacgtggcggtgggcgcccatgcgatgctcaagatacacggcaccgcgcgagagcgggaagcagatggcgaagtacagcacggcggcggccacgtaggccggcccgtagtagctcgtgtccccggcgaaggagttcgcgaagtacatgagctcgccgccggcgatgagcgccagcaccgaggtgttcttcacgaggttagcggcctgcacggccagaggcggcaagatgatgcgcatggcctggggcaggatgatgagcgtcatggtctgcaccggcgagaagccctggcttttggccgcctcgaactggccgcggtgcaccgagccgatgccgctgcgcaccacttccgacatgtagccgccgtggtaggcgccgatggcgatgacgccgatccagaacgaggcgatggtgagcccgatcagcgggaacacggcgtaaagcacgaacacctgcagaagcagcggaatgttctgcaccgtctccacgtagacgcgcgtgagggcgcgcaggatgcggaagcgcgacaccgcgaacacgccgaagacgaagcccaaaacgagcgcgatgacgagggccaaagccgagatggccgcggtcatgccgaaggcggccaggatgtcgggccatcgcgcgaagagcgcttcccacttgtagggcgcgaatatctccgtcatcgggacgcgcccccttccgcgccgctcgcgcccgcagcgccttggccgctcgcatccgcggcatcatcagcgggcgcctcggtgcccgcagctcccccgtcgtcggccggatctcccgcccccaggcccgtgccgccggcgctctgctcggcttccacatcggcctcggtgaccagcgacaggccccagcgctccttcagcgcccgcagcgtgccgtcggcctccatggccgcgatggcgtcgtcgatgggcttggaatactcgctgcccttcttcgtggccacgccgtactcctggggcgcaaactgcgtcggcagcaagtaggtggcgtcgtcctggtagcccagaaggatggagctgtccacggagaacgcgtccacgcgcccggccacgagcgcgatcttgatctcgggataggtggcgtactcggcgaacttcagtgtgatgcccacctcggcagcagcggcccccagcttgtccttggtagtggccgacagcgccacgcccacggtcttgccatcgaggcccgccagatcggtgatgcccgacttcttcagcacgagcacgccgatgtgatcgatgtagtagggccgagagaagtcgtaggttttcttgcgcgcgtcggtgatggtgaaggtggcgagcgttgcgtccagggtgccgttgtccagcatcgccccgcgggtggtcacgttcacgcccacgatctccagggcattcgcatcgcctttgagccgcgcggccagctcgcgggccacgtccacttccagtccctccacgcttcccgtctcggggttctggaaaccgaagccgggcacgtcgatcttcgtgccgacgcgcagcacgtcgcctgccggcgcgcagccggaaagcggcagcaccgcactacccagggccgcacccactgcagcggcgccggccagccgcacgaaagagcgtcgcgtgaggcaggccccgcctggcgcggccgccccgctcatcccgatcttttcgtctgccaggatcgccacgtccatcgtgcacctcctcacagtattttggagagaaacgcctgcacgcgctcgttggaatcggggccgaagaggtaggccggcgtgccctcatccaccacgagcccgttttccatgaacaccaccttgtcggcggcatcgcgcgcgagtcccatctcgtgggtgaccatgacgatggtcatgttcgtctccgccagcgacttgatgacgtcgagcacctcgttgaccatctccggatccagggcgctcgtcggctcgtcgagaagcatgatcttcgggtgcatgttcagcgcccgggcgatggccacgcgctgctgctggccgccggagagctggtcggggtacttgtcaagcttgctggacagtcccacgcgctccaagtaggcgcgccccgcctcctctgcctccgccttcggcaccttcagcaccttgatgggcgcgaaggtaacgttttccagcacggtcttatgagggtagaggttgtagccctggaacaccatggccacctcgctggccagcttgcgcgtgtccacctttttggccatcatgtcgatgccgttgacggtcagctcgccggagtcgggacgctccaggccgttgatagaacggatgagcacgcttttgcccgagccggacggcccgatgacgacgaccttctcgccttccgccacatcgagcgagacgcccttgagcgcctccaccttgccgaagttcttcttcagatcccgagcggaaatcagcggctccatgttcccacgctcctatctgggccgtcgttccgaatagctacgtgggaattttaacgttcagtcaatttgtcgtggtttcgccggcgctacgggtttgtcacagcttagtgacggccccggcggaagggagcatggcggcgcgggtcaggaagcagcgggcacgggctttgcggccgtcttcgcctcctcggcgtcctcgcgggcgagcaccgcctgcatggcggcgatggcgcactccatctgggcgtcgtcgggctcgtgggtggtgaggtactgcatctgcataccgggccagagaatcaccttcacgagcgggttgtccggatggctcccggcccacttcaccgtgatctcgtaggagatgccggcgataacgggcatcagcacgatgcgcgccacaatgacgagaacgagcttcggcagcccgtcgggcaccccgaagccggagatgatggcgtttaaggggaagatggtgtacacgagaatggcgatgaccatgaccatgatgaggaaggcggtgccgcagcgcacgtgcagacgcgggaactgccgggcgttctcgggagtcatgggaaggccgtgctcgaagcagtggatggccttgtgctcggcgccatggtacatgaacatgcgcttgatgtcctccatgcggccgatgagccagatgtagaaaacgaacacggccacgcgcagaagaccgtccacgatgttccaggccagcgtgtgatcgtcgtactcccccacgatgaggttcgtgatggccgcgggcgccacgatgaacagcaccacgcccagcacgaggcccaccaccatggagatcaccatctcccgatgcccgaactcctcatcggtggaagagccgcccccagcctgccgccgagccggcgcatcggcctcgctcaccacctccaaagtgcgctgggcacccaggccgtccaccatctcgtcggggtttccgaagtcgcgcttccaatcgaagccgccgcggccgtccgcgcgttcgccgcgcttctcctcttcgaccgccacggccaccgcgccctcaagctcggcctccgcttccacgaaggtcgcctcagcagcggctttctgctcgccatcctcgtcgccgaaggcgtgcagggcggcgatctccagggccttgaaccccagcatgagcgattccacgagcgcccggcagccgcgaacgagcggccagtacatccagccgttcttgtccttgccgctcgtgaggtcgtgttcctccacatagacggcgccatccggctcgcgcacggccacggcccagttgtacttgccgcgcatcatgacgccctcgatgagggcctggcctcccacgtgggtctttatcgccccgtcttcggaaaacgcgcgggacagatcgcttttctgcttggtcatacagccgtcctaagcgtcgagctgcgagcggtcgacgcgcgggtagggattgccgcaggtcatcttgccctcgggacaggtgccgtggatgcagggcgcgccggcgtcagcgaagatgtacggcgccgtcgggcgggcaagttccagcatcttccacgccatctcgcggatctcccactgggcgcggttgcagcagcgcagctcgaagaagtgcagaagctcgcgcacgttcatggtgatgacgatcttcgtctcgcaggcgttgggcagaagatagcgcgcgtcctctgcgggaatgcccgcgtccacgagcgcccggtaggcctcggccacggcggcggcggcctcgtcgaagaggcggtcgcactcggggtcggcggccacggtggcgggcttcaccatgggaatctcgcccttgaacttcacgtagcgctgggactgctggttgaagctggcgatgcggtggcgcaccagctggtgggtgagcgcgcgggagacgccgtcgacggcgaaggtgtagctggcgtgctcgagcgtggagaagtgccccgagcccatgatggtggacagcacgctcctcacgcgctccggcggcatggtctccatcagctcgctcgcgcccaccggcgcgtagcacagccgcgccgccgtggcgatggcgcgctcggggtcgggcgtatggtacagaagctctacctgcataacgtctcctcgcatctcgatttcgttccagagaagtataatggctgaacgaccgacgacacggcttggaggccccatgcacgacgaatttacacccttgctcaccacaacggattggaacgaggagtggaaagagcttcagaaggtgcgtcgccatgccgatgacgcggcattctgggacaagcgctccgccaccttcaccaccaaggacgccccgaacctctacgtggagaagttcctgggatacgcggacatccgccccggcgaaacggtgttcgacatgggctgcggcaccggggctttggccgtgccgctcggcgaggcggggcacaaggtggtggcggccgatttctcccagggcatgctggatcagatgcaggcgcggctcgacgcagccgacgtgcgcaccgtctttcccaagcgtatgagctgggaggacgattggccggccttcggcgtgcgcgagggcatgaccgatgtggccatcgcctcgcgctccatcgccaccgccgatttgcgcgacgcccttttgcgcctgacggaagtggcgcgccggcgggtgtgcatcacgctggccaccggctcctccccccgcgtcgacgagcgcattctggccgccgtggggctgccctcggtactcggacgcgactacttgtacgcgttcaatatcttggccgctgaaggcataagagccgaagtgcgctacattgacagcacccgcgacgataccttcgccactcccgaggacgcctacgagaagctggcggccatgatcgacgactcctcggcggtgcgcgcgtcggacgccgaacgggaacaggcgcgtgccaacttgcgggagtggctcgccgccaaccttgttcccaacgagagcgccggcgagcccgaccgcaagggcgtcgcccaactcgcttggcgtctcgccgagccccgcaccgtcacctgggccttcctcgcctggaacaaataagggtacgcacgacaaaaagggcccgggattgctcccgggcccttggcgtcatgtcagtttctaaaagttagatacgttccacgttgctcgcctgcagcttgccgttctgaccctcggtcacctcgaacgtcactgcatcgccctcgttgagcgtcttgaagcccgacatcttgatctcggagaagtggacgaagagatcctcgccgtcattctgggagatgaagccgtagcccttctcggggttgaaccacttgacagtgccttccgccatgatactttcctctttcctcccgctcgtctgacgagcgggtatagcaatacgggcgcgaagcccagctcccttttgggagcgcgctataactatacgctaacttcggccaatttcctcggggaatttacgcttctccatcacttgcggtcataagcgcctccagggcctcgtcgctgacggggtcggatcccaactcgtgcccgaaggcggcagcgacggcgcgaccctgggcacgccggagctcggccatatccgcacgtcccgcctcaccgtggtagcggccggagagcatgaggctgcgggcgatgtactccgtaaggtgcgggtcgacccccgacacctgcagcaccgaggccagcgattcgggcgcgagggagagcagcgcctcgccatccagatcggtggcatcgcccagggccatatcgagggcccgggcggctccgtccggatcctcctcgccggccgcccgttccatcgagcgccgaatggcccccagaagctgcgcgatgatgcgcatcagatagtcttgctcgaacatcgctgttcctccaatccctccgtaggggcagaccttggtctgccctcccgacagcgtcaacgccgcagaaaggggcggccaaggtcgccccctacggaaacgacgacagtcgaaattgcctcagctacggctagcatccctccggcggcacgaggcccaaatgctcccaagcgccggcagtggcctgacggcccttaggggtgcgcatcatgaggccctgttgcatgaggaagggctcgtacacatcctccaccgtgtcgggatcctccgccagcgccgacgccagcgtggtcaggcccaccggacggccgccgaactgcacgcaaagcacttccaaaagacggttgtccacggcatcgagccccagatgatccacctcgaagaacgtgagcgcctcggcggccacatcctccgtaatggcaccgtcgccgcgcacctgggcccagtcgcgcacgcgcttcagcaggcggttggccagacgcggggtgccccgggagcggcgggcgatctcaagcgcgccctcctcgtcgatggccacgttcagaatggaagctgagcggcacacgatgagggagagctcctcgggcgtgtagtactgcaggcggaaggccacgccgaagcggtcgcgcaaaggaccggtgagcaggcccgtgcgcgtcgtggcgccgatgagcgtgaagcggggcagatcgagccggatggatcgggccgccgggcccttgcccacgacgatatccagcacgaaatcctccagcgcggggtacagcacctcctccaccatgcggttcaaacggtggatctcgtcgatgaacagcacatcgccctcttcaaggttggtgagaatggccgccaaatcgcccgtgcgggcgatggccggccccgaggtggtgcgaatagaggcgcccaactcgttggccaccaccgtggcgagcgtggtcttgcccagccccggaggccctgaaaacaggatgtggtcggccacatcgccccgggcccgggccgcgtcgatcataatgccgagcgactccttcaccttggtctgacccagatagtcgtccagccgcttcgggcgcagcgagaaatccagctccaaatcgtcttcggtgaaggtgggcgccacggctcgctcgcggccctcggccgtcgcgcgtgccgcggacgcgccgccctcggccacgtacccgatgccctctatgtccagatcaaatgccatggctgcctatcgctatcgatttcccaaacgttttagcgcatattgtagcagcgcaccctcgccagcgccctcgggagcgcccttcaaggccacctcggcctcggcggaggtgaagcccatggaaagcagtgcctcggtggcaccggtaagcgccacgctgtccgccgacgggccgccggactccgcgccgctgtcgaacagcgtctccaggccgcgctccagggtgcccttcagttccaggatgatgcgctcggccgtcttcttgcccaccccgggaatatgggacacccgcgcgatgtcctgagcggcgatggcgtcggccagctcgcggggagtgtaggtggagagggccgccagggccattttcggtcccaccttcgacacgccgataaacttctcgaacagagccttctcctcgtcggagaggaacccgtagagccccagaccgtt

SEQ ID NO: 10622 - DNA, 3082 bp, Unknown
  gut microbiota DNA sequence
cgcacccccgcccgtaggggcagaccttggtctgccctcccgacaatggccatgctcgcgacaaggggcgaccaaggtcgccccctacgaagattatccgacaagtttttcgcagagataccgctattcggctgcctgctgagaggccagctcttgggcgagcgccttggcatcgtcgtaggccagaagctggtcgatggtcacgaacttgtagccctcggccctaagctgcggcagggcgatcttgagcgcctcgatcgtctggctgcgatcgccgccgccgtcgtgcatgagcacgacatcccccggcttcaccgacagcaggcgctccgcaatggcatcggcgcccggtcgccgccagtcctccgtgtccacgttccagccgatctcgctcgtgatatagggctgcagattccagatgatctcgtcgtggaagttgccgcccggcgagcggaacaccttagacgcctcgctgcccgtcgcgtccgcgatggcctgctggcccatttgcacctcttcgatctgcttttccgggctctggcgcgtcatgtccacgccattgccgccgccggtggccgcatggtcgtaggaatgggtgccgatctggtgcccctcggccgccatgcgctggatcgtctccacgtaatcggtcttatcggatatctgctcaccaacggtaaagaacgtcgccacggcgtcgttctccttcagcacgtcgagcagctcgctcgtcgtgggccacgggccgtcgtcgaaggtcagcgcgatgaccttctcgccgttcgtgttcgcgttgtacttcagatagacgttgtcggagccctccttcaccgtctcctgcacggatttgcccgataccttgcccgtgcgcgtctccacctgggccggctcgccgggcacgtacacgtggatggccccctcgcccagctccacctggcccggaaccgtctcctcggtggaaacatcgtagtcctcggtcgcgtcggcgccgtcgtccagctgaaccacatcgcccttgtgcagctcggtcgcgccgtcggtcacctcgttgccgttgaccgtgccggcaaagaccgcgccgcccccctcttccaggacttccccgtcgacggcgagcaagttgcccggctgcggggacaccacgccctcggcgatcatgtcgctcaaggtcgtgccccgatccaccgtgcgcgtcatgccgttgaccgtcacgttgaactgcagggggttcaaatacaggtacacccccacgccgatggcggccagaatgaccacggagacgataatggagacgacgctcgccttcttcttgcccttcttcttgtagcgccccatatcggcatagggagccacctggccatcggccttggtagcgggaacgacccgcgggggcacctgggccgcatagcccgcgtagccgtgcggcgacgatgcttgatgcggctggggctggggctggggcggctgatagtcatgcggctgatagggttgcgcctcgtgaaggcgcggatcctgcggctgggcggcagcggccggctgctcgcggggcgcaaccgactcctgctggagagtcggcgcctgcggtgccggctggacctgataccccgacggggcggccgtcgactgcggctgcggcgccgcggccccatgggcatggggaaccgaagtcggcgcaggagcacccggatggcggcgcgtgggcttcttgtgctgtcgcggattgttgcgggggttgttcgaaccgtgggaggcgggctgatcgggcatcgctttattcctttggaagtacttcaggtggtgcaggagctttctcgcgattatacgacgaagcgccagaacgtccacagcagagcagcttacatttccgtaaagttcgcaatcctcaagagttccacgaaaattgaacgcgtctcgtcaacccgtcggggcgccccgcgccgaaaggcgcccgcgatagcggcgaggcgcccgggcatcgggccctaattcgcgcgcgacgacccgcaggcggcgtgcttgcggttgccgtaggcgcttcccttgcgcgcgcccttcttcaaatccttcagcacgtcttcctcggacttgtcctccacggtgctcttcagcttcaccacctggtcgcgcaggcgcgccgcctcctcgaaatccatgtcgcgggacgcggcggccatgtcgtcctccatggacgagatgagccgcaggacctcttcacgggaaagctctgccagctccttgttcacctgctcggcggtggtgccctccacgtcttcggtgatgaagcccatgatgtcgttgatggccttgcggatggtctgcggcttgataccgtgctcctcgttgtaggccatctggatgtcgcggcgccggcgcgtctcgtcgatggcccggcgcatggaatcggtgatgcggtcggcgtacatgatgacctggccggacacattgcgggccgcgcggcctatggtctggatgagcgagcggtggttgcgcagaaagccctccttgtcggcatccaggatggccacgagcgacacctcgggcaagtcgagtccctcgcgcagaaggttgatgcccacgagcacgtcgaactcgccgcggcgcagatcgcgcaggatctccgtgcgctccagggtggcgatgtccgagtgcatgtagcgcgccttcacgccctgatccagcaaatggtcggtcaagtcctcggccatcttcttcgtgagcgtcgtgatgagcacgcgctcgtttcgcgcggcccgctccttcgcctcgtcgatgatatcgtcgatctggctggcgctcgtgcgcacgacgatctccggatccagaaggcccgtcgggcggatgacctggtccaccttcgcctggctcacgcgctcctcgtagtcgcccggcgtggccgacacgtagatgaactgcgggatgcgctcctcgaactcgtcgaagcgcaaggggcggttgtccaggcagctaggcaggcggaagccgtgctcggccagcgtgatcttgcgggagcggtcgccctcgtgcatgccgcggatctgcggcaccgtgacgtgggactcgtcgatgatgcagaggaagtcct

SEQ ID NO: 10623 - DNA, 379 bp, Unknown
  gut microbiota DNA sequence
atgtcttccaccaggaaggtgtctccctgcaggccgtcggcattgcgggcgcgggaaagcacgaacgtctcctcgtcttccctcgcacccgcgctcgcgtccgcccccgccggccgcgcgaaaagcagcgagcccgctcgctcggccccctcgggcttgtaggtgttccggtttcctcgagcctcctcccaaccgaacagcacgccgcccacaaaggaggccaccgtcgtcttgcccgcctcgttggcgcccaggacaatgttcatgcgatcgccgaagggcccgaccacggtatcgtgaaagcggccgaagcgctccaagtgaatagagcgaaggtagatgcgcggctcggtcatcggtcgtcgcccccctgcagcag

SEQ ID NO: 10624 - DNA, 2706 bp, Unknown
  gut microbiota DNA sequence
gtcttgaaagcggcacctcggtcacgggcaacacgcttgaagagctggccgaggccatgggagttcccgccggcaatctggccgccgctgtggcccgttacaacgagctggccgagaagggcgccgatgaggacttcggcaaagacgccgcaaacctgttccccattgcgaaggcccccttctacgcctctcaagtgaccgccgcgcttctctcttgcgcaagcggcctgaacgtagacagcgccatgaacgtgtgctctgccgaaggcgaggccattcagggcctgtacgcagtgggcaacgctgctggcaacttcttctccaacgactaccccatggtctgccccggcatcagccatggacgctgcctgaccctcggctacgtactcggcgagcaactggccaagtagagccacaaccctttcgcgcgagcgtctgcattcgcaccagtaccgcaatcacgctcgtgctcgcacaaacgtcgctctcagagcacgccctccctcacgtcgccccgagcagaactttgctcggggcgacgtttgcctgttgcctttattggctgcacaacgagcaacacaacctaagcgcaactccaacctctaaccacacaaaaaaggaaccccgctcgtgagcggggttcccagtaaccgtaaaggttggagaagtgtttcgcgaaagcgaatttacttcagggtcacagcagcgccggcctcttccagcttgcccttgatctcctcggccttctccttgttcacgccctcggcgaccggcttcggagcgccctcgacgacctccttggcctccttcaggcccaggccggtgatctcgcggacaaccttgatgacggcgatcttgttgtcgccgaagccctcgagcacgacgtcgaagtcggacttctcctcggcagcgccgccctcagccggagcagcaccagcggcagccacggccacgggggcagcggcggacacgccaaaggtctcctcgatgtccttcacgagctcggaagcctcgagcagggacatctccttcagagcctcaagaatctcttcacgggtaacagccatgttagtttcctttcaaagggggccggcgcctcttcgtgccggccaaatttctttttgcgttacgcgacccgtctcaggccgcccgagctgttaggcagcttccttctggtcggccacggccttgatgacctgggccataccgcgcggcacaccgttgatggtggtagccagaccacgagcgacgccagagatggcaccggcgatttgagccatgagctgctcgcgagagggcagagaagcaatggcctccacctctgcggccgacacggcagcgccttccatcaggccgcccttgatctcaaggttctcgttggccttggcgaaggtcttcagggccttagccgaagcggccacgtcgttgccggagaacacgaacgcgctggggccggacagcatatcgtcgagggtcggcagttcggcctcggacagcgccagatgaaccagcgtgttcttgtagaccttcagcaccgagccggtctcgcgaatgtcgcgacgcagctgctgcatctccttcacggtcaggccgcggtagtccacgacccacatggcggaaacgccgtcgagatcctccttgatgctggcgagcatctccttgttttgagcgttgggcatgttgtacgtacacctccttcttaaagctttccgggttccgcacctttgctgggtgggccgcaagccttaagaaggaaaacggcccccgcccataagacggaggccgtagaaattcacagttgcgaatcttcgaccacctcggcgggccgcttgcgcgattaaacgttgccgtaggcccgagggccggcgccgtgcctgctgtcttaagtagcggaacatatctgttcgttgcactgctcttttgagcagcttgtctagtttaatgcgcccgcttgctctgtcaatgggaaattcccaaaaggtcgaaaagttccttgcgggagttgatgcccatcttttcatagatatggcgggtgtgggccttgaaggtgccctcggcgatgaagagctcctgctgaatgacgcgaccagtctttccctgggcgagcagggcgagcacttcttgctcgcgagggcttaggtggtaggcgcgcgagagctcttccacgcgctcgccggtgcgctcctctgcggcgctgcgttcaatgagaccgccctcttccagaatggacacgccccatttgctggccagctctttctcggagaacagcagcaccgtggccgccagaataagcaccgacacaatgaccgtaactgccagtgcctcggtagatgcgggcagaccgagggcgcccagcaggctcgtcgcttcgccgccggctacctgcagcagctgctcggcgttcttgatggccatgaacgccacaatggccacgcccatgcgcttcgaaatatcgaagagcaagaacatcacgaggaaggacatgagcgagtagctgatggcgataaggtagctggacaccgccgtgccgaacaggctctcggcggacacaagcagaaacccgcacaccatgagcaccacgggcgagcggtacaaaagcccaatgttgaaccgcttcaacgcgaaataggccgtggcgaacagcaccgccatcaggatgaacgtcgataccgacgagtgtcgcccggccccggccaccagctggtt

SEQ ID NO: 10625 - DNA, 2653 bp, Unknown
  gut microbiota DNA sequence
cgcctcttcaactcccgcataaagagaccgcacatagacgaaggcgcgcaccgcgggtgggtgcgcgccttcggggagggtgccggcagggcggtccgacacgattatcgagcggtgcgccccgtcgccacagcggcgagggagcgcgacgcgccttctagtaggccatgttcagcagagcgtagccggccttcagctcgtcctcgcacttgtcgaggttctcctgggccagacccgggttgtgggcgccctcggagttctccaccatcacgtagtcccagtagaactgtgcatggcggtggatctggcgagcctgctccagagtggcctcgtccagggagtccttctgctcggccagggtcttgatgtaggcgtccagcttggccgccagctcgtgctcgcggtcggtggtctccttctgccactggacgatctgcccaggcaggtcggcatggcagccctcgcacttctccatgatggccggatcctcggtggggttcaccaggttgtgggagctgtactcggtgccgtcctcggccttggcgggggccatgtggcagtcggcgcaggtgtagccctgcttggccatggaggactgcgcgccgccgtagatggtctcgaattcagggtgctgggccttcagcatgggggcgccggtctcggtgtgctcccaatccttgaagcccatctcgtcgtagtaggcgagaatggcctcggcggtcatgccctcgagccccgtgtaggggttcgtggtagccttggtctcgggggcgaagtagtactcgttgtggcactggccgcacacctgggaatcggtggagaccttatccacatcggaacccatggaattcacgaagaacttctgggtgaccgtggtcttcgtcgggtcgttctcatggcagttgtagcagctgatgggctcggtcatctgcatgagcacctcggcgaagggcttctggtaggccgaatcgccctcggagttcaccatggcggtgtactggggcgtcttgcaggtgatgcagttggccagcgtgttctcgttcacgcggggcgtctcggccacggactgcaggctgtagggatgccccgccgcctcgtcgtagcccttggcgaagccgtagccggcgtacatggtcaccagctcgggatactcggtcaggtagtcctgcttgccctgggggctgttggactcgttggccatataggtttggtactcgttggggtagatgtccttccaagattccgccaccacgacgccgaaggaatcgggctcgggggtctcggcgggagccgcggccgcgggggcatcgctttctcccccggacggtgccgccgccggttcctgggcggccggcgcgcaggcggccagcgccgcgacgagcgccacggtacctgccgcgacggccgccgtcttgaacgtcgatcgtttcatggtccctccttttgatcgcttgtctcacgggcggccgcgccctggacggccgcaacgatagcccaagcttacgccgtgaatcccgccaccgaaaagggacagtttcgctcatattcatggggacagcaacagcagaggaaggggacggttacaccttgcttacatttcttctcgggaagggacgtccggcgagccgattcccccggctgcaaccgtcactgcgacatcaacgtctttgcgacttcccgccaatccgctttcggtacccttttgggaacggcgggggcgcccaaagcggaagcgcagggaggaagtagggcacacgtcaacgcaggcgccacaggccatgcagtcgccggcgcgcacgatcgtatcctcccccaccagcgccggcgcgaggatctcgggatcggcgaggcaaacgtgggtgcacttgtcgcagtggatgcaggcgtcgtgatcgatggcgacgttcacctgccccgcgcgcccgagcacttggaaggtgccgcccaaggggcacagcgcccggcaccacagacggcggctgacaagcagctcagcaatgacgatggccaaaagcgtgcccgcaccggcgaagcccccgaacacgaggcccttgttcaccgcgccgatgggcgagatcagctcgaaaatcgggaagcccacgagggccgacagcagcaccactgccgccgccacgccgatcttcgcgcgccgcggcaccgtgcgctcgggcacttcaatgccgagccgtcgacgagccgcatccacgccctcgccgacgaggttcaccgggcacacccagccgcaaaaggcgcgcccgcgcacgagcccgtagaccacaacgataagcagagcgcccgtaagcgccgatgccgccagcaagccgcgcgacgccgccatcacttccaaggcgcccaacgggtcgaacaacggcacgccggcaacgctcgaggaggacaggctgccgaagaacacgcccgcagccggcgtcgccacttccccatcgccgcccgcgaacagccccgccagcccccatccggccagcagcggcggcaagcagaacagccccaacatgcaaacctgcaccacccgccgcaccagcgttatctttcccatggatcgagtcacaattttctcctcaacaatggcaatgtgtagagggaacacggggtattctgaccgagcgaggactgtctgagcgaatcagaatacccc

SEQ ID NO: 10626 - DNA, 275 bp, Unknown
  gut microbiota DNA sequence
gtccggtaggggagggtggaacacccggtgtagcggtggaatgcgcagatatcgggtggaacaccggtggcgaaggcggccctctgggccgagaccgacgctgaggcgcgaaagctgggggagcgaacaggattagataccctggtagtcccagccgtaaacgatggacgctaggtgtgggggggcgatccccccgtgccgcagccaacgcattaagcgtcccgcctggggagtacggccgcaaggctaaaactcaaaggaattgacgggggccc

SEQ ID NO: 10627 - DNA, 5086 bp, Unknown
  gut microbiota DNA sequence
gaagcagaattcgtgatggtgggttcgttcgtggaatgttgtgaaagcggaaacggcggcaggcggcctggcgggctataatggcgggcagtgattctttcggaaaggatgctcatgcatcgagtgattttgcacgggtcgtgccgggccgatgggcgcagtgccgcactggccgacgagctgttcaacgcctgtatcgaggagtgcccggacgacggggtgtccatcgtgtcggtgtcgtctaccgaggtggggccgtgcatcggctgcgacaagtgccgtgcagccgccgacgagcccatccacctgttcgaggagggcgatccgctgctgccccaggagacggtggcggaatccggtgccctgtttcaccactgcgtcatcgacgacgacatgaacgaggtgcgcaagcacctggacgcggccgacgagctcatcgtggtttgcccggtgtacttcgccagcgtgccggcccagatgaaggcgctgctcgaccgcctgcagccctactacttcaccgacctgcgcacgcggcccaagcggcccgctgtcattcacgtggtgggggcaggcggcgatccccacggcttcgagccgctcatcggcacggtgcgctcggcgctgtccgtggccgggttcacggtggagctcgtgctcgactgggtagggaagatccgcgccgacggcgagatcaccgccgatgccgaggagtacccgctgccccccgtcggcggcttcggcgccatgggcctcgacttcgacgacgactacgaggtcgtagaagtggagggcacggaagaggtcgaagaggccgaagaggcgaaagacgaggtcgaaaggatcgagatcgccgacgcggacgacgcttgggacggcttccgggatgcggacgattcccgtaggggcggacctcggtccgccctcccaactgccgacgactctcgcgaggatgttcgcccgaaggatcgcgcgaagctgtccgtgagccagaaggcacccgctcccaagcaggtcgctccgaagtcgggctcccgcggcccgcgcaagtcctccggcaaggggggcggtccggcctatggcaagaagaacaccaagaagaagggcaacggccgtggtggccaccgatagctacgccggcggcgacgggcgcctgtcgccgctctctacgccgagtgccacccgcgcggtgctcgaggcccacggcatcggcaccaagtacacgctcggccagaacttcctcgtgaacgacgacgtgctgaagaaaatcatcgccctggccgaggtgggggagaacgaccgtgttctagaagtgggccccggcatcggcacgctcaccatcgcgcttctgaagcacgccgccagcgtcatcgccatcgagcgcgaccccgatctgcccgccgtcctcgccgacaccctgcacccctggcgcgagaagttcgccctcatcgaaaaagacgccctcgacgtaactgagggggatatcgttgcggcggtggccgagatcggcgcagacgcggggtgccttgaccgagcgagttccgcagcgaacgaaacagcccagtgggctgtttcgcagagcgaggactgtttgagcgaatcagggtaccccgtagccccgccccaggaagacttacaactgagtcttcccagcaagctggtcgcgaaccttccctacgctgtcgccgccacggtcgtgctcgactacttcgaatccttccccttcctggactccgccaccatcatggtgcagaaggaagtggccgaccgcatggtcgccgccgtgggcacgaagaactacggcgcctacaccgtgaagctcgggctgtacgccgagccagctggccgcttcgccgtggggccgggtaacttcttcccgccgccccgggtggattccgctgtcatccgactgaaccgccgtgtgccgcttatggccgacggcgcgccggcgtctccggaggtcatcgctgctgcggccctgatggccgacgccgccttcaccaaccgccgcaagaccatcgccaactcctgcaagacctacttctccggccgcggcccgatcttgctgggcgtcgccgactcgtcggcggccgagggcgccccgaccatcgcgctccccgacggcgctgccaccgccgagcgtctgcccgccatcttcgaggccgccgccatcgacccgcgccgccgcggtgagaccctgacccagcaagaattcctcgccctcggcgccgccctcttgagagtgacggcggcttagcggagtcgtgccaacgtcacctccgaccttctggcggatgtggcccaggccttgggaatgtgtgtggaagtcacgctggcgcccgcggcggtgtacaatggcgagcctgatggagaacgagtgggcctctaaggccctggaaatgagcgggctgtgaggccctggaagtgagcgtgccatgggaaagacggcgggacgggcaaggttcgcgcgcatcggcatcgcggtggcggtgttcgtggtgctcgcgggcatcggcgtggccctggctgcgacggtgggcggcttggccccggccggaggatcgaatgccctggtggtggaagagccgacgaagcggccccaagatacgctggaagcggagcccgaggcttcggccgatgccgccgcgcaagaggctccggctgaagaggacgtcccgcccgcgcccaccccttccacgaccggcgcgctcaaggtcgtcggcgcccagctcaccgatgccgccggcgagccagtgcagctgcgcggcgtctccacccacggcctggcctggtacccccagtacgtgaaccaggagttctttaccgaattgcgtgaggtgtggggcgccaacgtcgtgcgcctggccacctactcggcggaggagggcggttatgccacggagacgggcgaccgggcggcgctgaacgacctggtggtgcgtggcgtccagtacgcccaggccgccgacttgtacgcggtggtcgactggcacaccctgtcggacgcgaaccccctcacgaaccagtgggccgccgaggagttcttccgctccgtgtccggcgccctgggggacgcggacaatgtcatctacgagatctgcaacgagcccaacggcagcacgagctgggccgacatcaaggcctacgccgaagcggtcattcccatcatccgcaccaacgaccccgatgcagtcatcgtcgtggggacgcccacctggtcgcaggatcttgccgctgcggcggccgacccgctgcccgacgccaacgtcatgtacgcgctgcacttctacgccgccacccacgaagacgacctgcgccacgcgctttccacggcggtggccggcggcctgcccgtgttcgtgaccgagttcggtatctgcgaggcgagcggcgccggcgagatcgactacgcttcggcgaacctgtgggtgcgcctcatgaacgagctggatgtgagctacatctgctggaacctgtcgaacaaggacgagacggcggccctgttcaagcccggctgcgcgaagacctccggcttcactctggacgacctcactgatgagggcctgtggctcgtcgacacgctgaagagccccggcttttcccgcgaggaggtggcgctggcccgggccgaggtgaaggacaacagcgccggagcccagatgctcgtctccgccgacgacactctgcagtggacgtttcaggtggccgaccgctgggaggagggcggccgcaccttcttccgctacgagatggccggctcgaactacagcgccggcgtgaagagctggtcggtgacagtgcccttcaacggcgaggtgaccttggaggacgcgtggaactgcaaggctgaggcctccggcacgcggcttaccatcgacaacgacgctcacaacgggaacgttcccgccggggccttcgtgcgcgatgtgggcttcatcgtgagcggcccggcggatttggccgtggtggagtacgagtagcgcgcggcttcccctccgctcgccagttctccttttgacggcgacaggtgcgcgcatacaatagttgtcgcagtgtcacggcagacgatttaagggaggttcggttgtgcgcacggtaagactggcgacggaggcagacgcggcaggcattctggccgtgtacgcgccctatatccgagatacggcggtcacgttcgaaactgagaccccctcgttggacgccttccgctgtcgcatggcctctatcatcggcgactatccctatctggtggtggaagaggacggctccatcgtcgggttcgcctacgcgcaccggctgggggagcgcgccgcctatgcgtggaacgccgagctgtccatctacttcgcgccgggctgcacctcccgaggatggggcagcgtgctgttctgggcgctcatcgaccttctggccctgcagggcgtgcgcaacgcctacagcctcatcacggtgcctaacgaggcgagcttggctttgcatgagaagctgggctttacgctcatgggcgttcagaaggaggccggctacaagctcggcgcctggcacgatgtggcgtggctgcgcatggccatcggcgacttctcggcggcccccgagccccgcatgccgctttccgccatggatcccgaccaggtggccgaggtgctcgctgcggccgaggccgctctggcgcgcctcaattgagagggcgattgacctagctgcgacgccgcagcggttggcgcggggaacgtgccgggaatttgtgacggtttggggacggctctgccgcgaccacggcgccgccgatacccgctatactggctttcggaaaacgagagcgactgaaggcgggggaacgttcatggagcaaaagatggagcaggcgcgggccgtgctggcgagccgtttcggctatgacgcgttccggccgggtcaagaggcggtggtctcggcactgctggccggtcgcgacgtgctggcggtcatgcccaccggcgccggcaagtcggtgtgctaccaggtgcccgccgtcgtcatggaaggcatggcccttgtcgtgagcccgctcgtgtcgctcatggccgaccaggttcgggccgtgcaagag

SEQ ID NO: 10628 - DNA, 1706 bp, Unknown
  gut microbiota DNA sequence
cctcatgtacgtggctcccgagcgcctggccgatccgcgcttcgccgagttcgcccgtacggcgcagcttgcgctcgtcgccgtggacgaggcccattgcgtgtcccaatggggccaggacttccgcccttcgtacctttccatcggggacttcatcgccagcttgcccgtccggccgcccgtggcggcgctcacggccacggccaccgacctcgtgcgccgcgacatcgcgaggcttttggggctgcatgatccggcctgcaccgtgacgggcttcgaccgcccgaacctgcgcttcgccgtggaacggcgcgagcccaagcagaagctcgcgcgcctggacgagttcatcgacgagcgacgggccgagtcgggcatcgtctactgcgccaagcgggcgacggtggaggaggtctgcgaccacttgcgcgagcggggcatcgcggccacgcgttaccatgcggggctctcggccgacgagcgcgagcgcaaccagcgggccttcgtgaacgatgaggccccggtcatggtggccaccaacgccttcggcatgggcatcgacaagtcgaacgtgagctacgtggcccatttcaacatgcccggctccgtggaggcctactaccaggaggccggccgtgccggccgcgacggcagtccggccgagtgcctgcttctgtggtgcgacggcgacattgccacaggccgtttcttcatcgagcaggaatcgacccacgaagggctcaccgccgaggaggccgaggtggtgcgcgcgagccgccgccgcatgctggaatccatggtcggctactgctacaccaccggttgcctgcgcgcgtacatcctccgctacttcggggaaggcgcccgggatgagactctcccgccgcagggaggagcgaccgaggtcgcccccaacgacgactatgccgtctgcgctccagatccccgtaggggcagaccttggtctgccctcccgactgaggaaaatcctacgagttccccgccaaagcgctgctgctcgaactgcgacggggaattcgaagcggtggatgtgacggcggaggcccgcgccatcatgcgttgtgtgcaggccctgcgcggccgcttcggcaaaacgacggtggtggacgtgctgcgcggcgccgacaccgagagcctgcgccagtggggcctggtgaacctgccggtctacggcacctccgaggcgcggcgcgccctgctcatggaggtggtggaacttttggccgccgacggctacctcgccatcaccgaggggaagttccctctcgtgggcttcggcccccgctaccgcgaggccgccgagcccgatttcgcgctgagcatcaagcagacgccgaaggtgcgcaaggggagtgcggccaagctgccgaagtccgcccgcgcgggcgctgccgatctcaccgaggcggacgtcgagctctttgagcgcctgcgcgccctgcgcctgcgcctggcccaggaggccgccgtgccgccctacgtcatcttccacgacgccaccctggccgccatggccgccgcccgccccgtcacagaagaggagctgctggccctccccggcatcggcgagaaaaaactcgccacctacggcaaagccttcctggaagagattgcgtctgtccccgaagcaaccgaagttgagtaggctcggaggggccgagggggcccgcgcgcaggttgcgcag

SEQ ID NO: 10629 - DNA, 7408 bp, Unknown
  gut microbiota DNA sequence
cgtgttttgtcagtcattcgattaaggagggataaccatggcagctgcagagaaaggcaagaaaaagagggcgcctctgtcctcgttcaccatcttgctcatcatcttggtggttctggcgattgtcactgttatcatgtctgcgtcgggcgtcgagggcgtccagggcgcgacgctttcccaggtgctcaccgcgcccgtgttcggcttccaggacgccatcggcgtgtgcctgttcgtcatgatcctgggcggctttctgggcatcgtcaccgagaccggcgcccttgacgccggcatcgcggccctcgtgcacaagctgaagggcaacgagctcgtgctcatcccgattttgatggcgatcttctccatcggcggcaccacctacggcatgtgcgaggagacggtgcccttctacctgctgctcgccgccaccatggtggccgccggcttcgacagcctgaccggcgcggccgtggtgctgctcggcgccggcgtcggcgtcatgggctccaccgtgaacccgttcgccgtcggcgtggccgtcgacgctttgaacggcatcggcgtgtccgtgaaccagggcatcatcatcgcgctcggcgtgatcatttggctcgtgtcgctcgccatcgccatcgtcttcgtgatgcgctacgccaagaaggtgaaggccgacaagggctccaccttcctgtcgctgcaggagcagcaggacatgatgaacgagtggggcatgaaggagtccgagaccgaggccgccgacgatgacgccgccgcgacgccgaagatgtccggccgccagaagtggtcgctcatcgtgttcgcgctcaccttcgtcatcatgatcgtttcgttcattccctgggccgacctcggcgtcaccatcttcgatgccggcgccaccacccaggaagtgacgaccaccgtgaccggcgaggagcttgtgagcgcctacgacgaggcgaacggcaccacgacgacgcttgccgctccggttgaggccacctccgttgccgaggaggaggtcaccccggcctggtcgagcttcctgactggcgtgccgctgggcagctggtacttcgacgaggcctccacgtggttcctgctcatggctcttgtcatcggcgtcatcggcggcgtgtccgagagccgcttcgtgaaggcgttcatcaacggcgccgccgacatgatgtcggtcgtgctcatcatcgcgctggcccgctccatcaccgtgctcatggccaagacgggccttgacatgtggatcctgaacaacgccgccgcggcgctgacgggcatgtcggcgatcatcttcgcgccgctgtcgttcctgctctacatcgtcctgtccttcctgatcccgtcctcctccggcatggcgacggtctccatcccgattctgggcggcctggcccaccagctgaacttctcggtcgagaccatggtcatgatctactccgccggcaacggtcttgtgaacctgttcacgccgacctccggcgccatcatgggcggtttggccctcgccaaggtggagtactccacgtggctcaaattcggcgccaagctgttcgtggttctcggcgtggtctgcatcgtgatcctcacggcggccatggtgatcctgtcatagcatccagggcaagcgcacgaacttgtgcacttgcacagttctgacctgcggaaccgttagcgggagcgcccgggcacagtgctcgggcgctcctgtttttctcgggccgttcatgctattatggccgcttataggcgcgattgggtacggcacagcccgcgcgcgtggtaacgccgacgtactgaagacgtacagaagaggaagttagaccaatggaaattcgcgaatccctcgaagcgatcatcgacgccgcgatcgacgcggcccgtgccgacggctcacttgagctggcggaggccccgcaggcagctcttgagcgaccccgcgacgaggccaacggcgactgggcgagcaccgtcgccatgcgcaccgcgaagctcgctcacaagaacccccgcgagatcgcccagatcatcgtggaccacattcccgcaaacgacatgatcgcctccgtggagatcgccggccccggcttcatcaacatccgcctgtccgatgccgtgctgcagggcgtggtgcgcgaggtgcgcgaggagggcgacaacttcggtcgcggcaccattcccgagggcgagcgctacgtgaacctcgagtacgtgtccgccaaccccaccggccccttccacgtgggccacggccgttgggcgtccttgggcgatgccatggcgcgcgtcatgcgccacggcggctacgatgtgtacgaggagtactacatcaacgaccacggcaaccagatggacgtgttcggtaactccgtgaacgtgcgttaccagcagctgctcggccgcgatgttgagatgcccgaggcgtgctacggcggagcctacgtgaaggacatcgcccaggacatcatcgaccaggacggcgacaagtggctgagcgtctccgatgaggagcgcgtcgaggccttccgcgagatggcctacgacatgacgctcaagaaccagcgcgaggtgctggccaacttcggcaccaccttcgacaagtggttctccgagcgctcgctgtacgttgaggacgagaacggcgagagcgccgtgtcccgctccctggacgccatgcgcgagaagggctacctctacgagaaggacggcgccctgtggttccgctcgacggatctgggcgacgacaaggatcgcgtgctcatcaagggcgacggcgaggccacctacttcatgagcgacgtggcctaccactacgacaagatgatgcgcggcttcgaccaccttatcgatctgtggggcgccgaccaccacggctacatcaagcgctgcgagtgcatgctcgaggcttggggctggcccggggcgctcgaggtgcagctggggcagctcgtgaacctgttccgcgatggcaaggccgtgcgcatgtccaagcgcaccggcgagatggtcaccttcgaggagctcatcgacgaggtgggcgtggatgccacccgctacctcatgctctcccgctcggctgaccagcccatcgacttcgatatcgaggtggcgaagaagaaggacgcctccaacccggtgtactacgtgcagtacgcccacgcgcgcatctgctccatcctgcgcaaggcggccgatgaggccgacgccgccgccgtcgaggcgggggagatgacgatgggcgagctcgccgagaagatcattcccgaggattgcgacctgacgccgctcacccatccctccgagctggcgctcatgcgcaagatggccgacttcggcaacctcatcgccctggcggcccgcgaccgcgcgccgttccgcctgacccactacgcgcaggacctggcgtcgctgttccaccagttctacaccaactgccacgtgctcaccgacgacgccgacgtgcagacggcgcgtttggccctgtgcgacgccacccgcatcgtgctggccttgacgctgaacctgctgggcgtgtcggctccggtgaagatgtagccatcggattttgtgctttcacccatttgaaataatttgggtaattgactatcgggaagaacggccgtaatatccttcccgtcgaacaactatatagcatcttcagggcagggtgagattcccgaccggcggtaaagtccgcgagccttagggctgactcggtgaaattccgagaccgacagtacagtctggatggaagaagatcttcagcgtgcgcgcgtatgctcaagggccctggaacctcgtgtttcagggccctttgcaatgcgggcgcccccctgtcctgaggtgtctttgtgaaaggaggcatgatggacggagggtgcagcgtccccgatgggacgcgagggggcgtgcgatcgtcggaagtgggtgcgcaatcagcggatgccgacggctcgctgcccgctgaggctgatgagcgcttcatggcccgagccgttgagctggcccggcgcggagcgggatggacgagccccaacccccttgtcggcgccgtcattgtgcgagacggccgtatcatcggcgagggctggcaccaccgtttcggcggtccccatgccgagcgggaggcgcttgcggcttgcagcgagtcgccggccggtgccacggcctatgtcaccttggagccctgctgccatacgggcaagacgccgccgtgcaccgaggcgcttatcgaggccggcattgcgcgcgtggtcgtgggcgtgctcgatcccaaccctcttgtggcgggcaggggcaacgaggctctgcggcgggccggcatcgaagtggccgtgggggtcttggagccatcgtgccgcgctgtcaacgaaccattcctgcacgccatggagcagcgccgtcccctggtgatagccaaatacgccatgaccttggacgggaaggtggccacgcgggaggggctttctcgctgggtgaccggagaggcggcgcgccgccgcgttcatgaggaccgccaccgccatgccggggtcatggtgggcatcggcacggcgctcgccgacgatcctctgctgacgtgccgcctcgatggacgcgaggtctcccagccggcgcgcgtcgtggtcgatgccgccgcgcgccttcccctggaatcccaactggttcgcacggcaagcgaggcgcccgtgatagtggccgtggccgagggcgcgctgctggctcgccgcaacgccctggccgagcgcggatgcgcggtggttgcggtgcctgcgagagaaggtcgcgttgaccctcgcattctcatggagctgctctggcagcgcttctctctggactccctgatcgtggaaggggggccgacgcttctcggcagccttttcgacgaaggtttggtcgatcgcgtccaagcctacattgcgcccaagattttcggcggcttagaagctttgggccccgtggcggggcgcggggtgggggatccggcggatgcgcccgtcctttccgaggtgtccctgcagatgatgggaggcgacgtgctgctggaagggaggcttcagccatgttcaccggtatcgtagaggaagtgggacgcgtgcgtttcctgcgcggcggctccaaagacggcgtgctacgcattgccgccaagcgggttttgggcgatgtgcgactgggcgactctatcgcagtcaatggtgtgtgtctgacggtgacggacttcgacggcggctctttcacggcagatgtcatgcccgagaccctgcggcgatcgaatctgggaatgctccgcgcggggagccccgtcaatctggagcgcgctctggtggccgacgggcgcttcgggggccatatcgtatcgggccatatcgacggtatgggcacgattgcctcggtgcgccaggaggcgaacgccgtgtggtacgagatagaggcggcgccctccctcctgcgcctggtcgtcgagaagggctcggttgccctcgacggcatcagcctgacggtggcaagcgtctcggacgcttctttcacggtatcggtcattccgcacacgcgggagcagacaaccctcgcctccaagggcgtcggcgataaggtcaacatggagaacgatgtcatcggcaagtacgtggagcgtctgctgccgcgcgcatcgcccgggaaggacgagctttggggaaagggtggcggcagtccgaaggcgagtccgtcgtcaccgggtctcacgcgggattttcttgcggcccatgggttttaggctcgcatctgcacggcaaggttatcagagaaagagaagcatcatgaacgacttccaattcgacaccattgaacaggccttgggggacctgcgcgcgggaaaggtcatcctggtgaccgacgaccccgatcgcgagaacgagggcgatctcatctgcgccgcgcaattcgcgacgacggagaacgtgaacttcatggcgagcgtgggaaaggggctcatctgcatgcctatgagcgcagagctgtgccgccgcctgcgcttcccccagatggtcaccgacaacaccgacaaccacgagacggcattcaccgtgtcggtggatcatgcggacacgacaacgggcatctcggcggccgagcgcggccttacggcgcgcaaagtggtggatcccacctcgtcgcccagcgactttcgccggccgggccacatgtttccccttatggcgaagcccctcggcgtgctggagcgcaatgggcacactgaggcaacggtggacctgtgccggctggccggccttgagccgtgcgggctgtgctgcgagatcatggccgatgacggcacgatgatgcgcacgccgcagctgatcgagctggcaaggcggcatggcctgacgttcgtgtccatcaaggcgctgcaggactatcgcaagaagcacgaagtgcacgtggaacaggtggccgacgtgttcatgcccacggaatacggcgagttccgcgccaagaccttcgtcaaccgcttgaacggcgagcaccatatcgccctcgttaagggggcgatcggcaacggcgaggacgtgctggtgcgcgtgcattccgaatgcctgaccggagacgtgttcggctcgcagcgctgcgactgcggcgcgcaatttgcggcggccatggcccaggtggaagcggccggccgcggtgtggtgctgtacatgcgccaggagggccgcggcatcgggctcgtgaacaagatgcgcgcctacgagctgcaggagcagggcctcgacacgctgcaggcaaacgaggcgctggggtttgccggcgatctgcgggaatactatatcggggcccaaattctgcagagcctcggagtgaagaccatgcgcctgctcacgaacaaccccgacaaggtgtatcaattggaggatttcggcctggtcattgctgagcgggtgccgatccagatcgcacctacagcccacgacggcttctacctgaagaccaagcgggagaagatgggccatatgctcaaggcggaggagccgcagccccaggtggcgtaacagacggaaaattcgaaaatttggaagctcgaaaggaattgagagaaaggcaagatcatgaccgtatttgagggaaaactggtatccgagaacgtcaaggtgggcattgtggcctcccgcttcaatgagttcataacgagcaagctgatcgccggggccatggacgggcttctgcgccataatgttcgcgaggaggatgtggacatagcttgggtgcccggtgccttcgaggaaccgcttgtggcgcagcgcatggcccgaagcgggcactacgatgccgtgatctgcctgggagcggtcattcgcggcgctacgtcccactacgatttggtttgcaacgaggttgccaagggcatcgc

SEQ ID NO: 10630 - DNA, 10165 bp, Unknown
  gut microbiota DNA sequence
cgagatggtgaacctgctgcgcgagatcgagggctagctgacacgcgccctgggaaaggagaggcgaatgggcgatcgacgaggcacggtgttcttcgactacgatggcacgctgcacgatacgatggcgctctacggaccggcttttcgcgcggcctgcgcatggctttcgaaggagggctggctcgagcggcgcacctacgctgacgccgacattgcatgttggctcggctggacgaccgaggagatgtggaccaccttcgccccgcatcttcccgagcccgtgtggcgcgaggcctcgctgcgggtgcgagacgagatggagcgtttgcgaaaggaaggccgggcccggctgttccccggtgtcgaggaggccctcgatgaggtagcttcccgaggggcgaccatggtgctgctgtcgaactgctggcgctcctacggcgaggatcacatgcgggagttcggccttggccgatggattgaagggcttcactgtgcccaagacttcgactggattcccaaatggcagatctaccgcgaggtggcttctttctatccgttgccccatattatggtaggggaccgattccacgatcgcgaggtggccctgcgcaacgacattcccttcgtggcctgcgcctacggatttggcgagccaggggagtgcgaaggcgcagacgccatcgccgaatgcgcggaagagcttcccaggctaatcgcacaaaagctcgccgcgtttgaaagatagcgtcgtatagcaaatgcgcccgccggaaatatccgacaggcgcatgtctgtttttggtagggccgcccggattcgaaccgagaaccaagggattatgagtcccctgctccaccgttgagctacagccccgtaagtgcgttggctattctagcacacatttagagactccatcgaagtcctacgggttgcagcgcttgcaggggtcgtagccgttcgcgatgaggttctcgcgggtgccctcgatgtcctcgcggttcttggggctcatctggccgaccgacgagcagctcggcaggtggaacttcctcgagttcgtgttcagcacgtactcggcgacgcccttgccctcgtcggagcccgtcgcgcccttctcggacgcctccctggcacctgcgccttcgcttgcggcatcgggtgcgctttcggctcccgacacgtcgggcaggggagtggcgtcctcctcgagcatcgattcgcccgtgccgtagttgatgaccactcccggctgcacgttgtagcagaagacgttgaaggccacgccctcgccgccgtcttccacggactccgccatcatgtgcacgccgcgggccaccagctcgctgctctcgaagacgggcgtcacggccatgagcacatggttgcccgtggcatccacatagtcggccacggcgttctcgaagggcagcatgccctggacgttcaaatagcgcgtgccggtgatgaggtttcgctcgttggcgttctcgcccgtgagctggtagcccagaagatggcagcgattgaacaggtacttgccctccacgaaatcgtacttggccatctgccagccggaggggcgcacctcgccgatggaaccgcgcttctccgtgggctgggtctcggggcccacgacggcgaaggcggcggtgcagcggcctaactcgtccagctcgccgtaacgctcatacccgggctcggccgcgcgctgctcgtcggtgaacaccggctcgccgtcgttcacgtagacgtagggattgccatcgaaggcggggatgtcgcggtaggagagggcaccatcgtcggttacggatcggttttcgctagcagcttcagcattctgctggtttgcgtcctctgggggagtggcctgcggctcttgcgagtcgtcgggcgcccctgtgctcgcgagctcaggggtcgacttatcggtcggcgcctcatcagctgccatcgaggcactgcatccggccaaagagctcatcgagagcaagaatgccagagcgataccgatggtgggggtcaaatttttgtgctgcgaggattgttgggacatcgtcttctcctaatcggggccgcaagcgccttcccgacaaaaactgcgataatatggtcacaaaatcgagttttgaactctctatcttcgattctgaaccctattttgctagtttaacgcctcttttccgcgtttcagtgctgaaaatgacgggtttgcggttcacgaagagttcaaaagtcgattttgtgaccatttttgcgaaacttattgcaagagcgcccatgttcgacactcggcgctcttcagggaagatgggggtgtgctcgtggatgacctcttcgcgcggacgcggttgctgctggggcaagacgggctcgaccgcttggcggcggctcgggtggccgtgttcggtattggcggagtgggcggctatgcggtggaggcgctggctcgcagcggggtgggggcgctcgatctcgtcgactccgacacggtggatcccacgaacctcaaccggcagattatcgccacgatgggcgctatcgggcgtccgaagacgcaggtggcggccgagcgcgtggcctctatcaatccgtcgtgcatcgtgcgtcctcgccagtgcttcttccttcccgagacggctgaccagttcgatttcgcgaccttcgattatgtgattgacgcggtggacacggtgagcgcgaagatcgccctggtggaagccgcctttgcggcaggtgtgcccattgtgtcgtccatgggcgcaggcaacaaactcgatccgacggcgtttcgggtggcggacatctacgagacctcggtcgatccgcttgcccgcgtcatgcgtcgcgagctgcggcggcgaggcattccgtcgttgaaggtggtctactccactgagccgccgctcgttcccgcggatgacgacatggctgtgaaggacggtacgcgtccggcacccggctcagttgccttcgtcccctccgtagccggcctcattctcggcggggaagtggtgaaggacttggcggcctgctaaagcgcaccgcggcgtgctcgtcggcgccggggtactcggaaacggtcggacggtggcgagacggatcaacgggcgacgggagtggtgccggcagcggcgacgggagcggcgcccatggcgcggggagcggcataggaaaaataactcttgcacccaggctctctgttgcctataattctgccttgcgcgaaatggtgggtgtggcctagttggctaaggcgccagattgtggctctggagatcgtgggttcgagtcccatcatccaccccagcgcgcttgaaaatttagggcttgcaattctgaaaagcttcgcctagaatattcaagcgctttgcgcaggaaccaagtgcaccattagcttagttggtagagcaggggactcttaatcccaaggtcgaaggttcgagtccttcatggtgcaccaccgaaatgctaggccagcggcttatcgtcgctggcttttttgttgcctcggctgcccctatcccacgacttcctgtattctcgggaggaaaggcgcttctcaacgttacggcttgacctgagtccaagataggtgcagcattttaggccgaagtgtgccatactgagtgacaaaggccccttatctcaagcaaggaatttacctcccatggaatcaaagacaaccactgagtcgtccgaccgccgcttcgcgctgctcatcgacgcggacaacgtgtcggcgcgctacttgaagccgatcttgaacgagctgtcgaagtatggcaccgtcactatcaagcgcatctacggcgactggacgctcaccctgcacgcgaaatggaaggacgcgctgctggagaactccatcacgcccatccagcagttcggctacacccagggcaagaatgccacggattccgccatgatcatcgacgccatggacatcctctacaccgacaacgtcgatggcttctgcctcgtgtccagcgactcggacttcacgcgcctggccagccgtctgcgcgagagcgggcgcatggtcatcggcatgggggagaagaagacccccacgcccttccgccgcgcctgcgacgtgttcaccacgctcgagctgcttgtgcagaacaagcgcaacgagaagggcggcggcagcaacgcggtgccgaaggactccgtggagcaggccgtggtggacatcatcaccgacaaccagaacaacggcaaggccaccggcttgggcgagatcggcagccgcctgcagaagcgctaccccgatttcgacgtgcgcagctacggcacgaacctgctctcgaagctgctcgaggagttcacgcgggtgcgcatcaccaaagaccacagttcggtcaccgtggaactcgccgagggcgaggagcgccccgagaaggcggagaagcccgagcgtgcggggaagcccgagggggcggggaagcccgagaaggccgctaaggcagaagaggctgccgacgtcgcctctgagctcgatggagaggcggccgcgactgaggcgtcctcggccgaggccgagaagcccgagatggagaagcctgagaagccgaatcgccgctcgcgcagccatcgcggtacgcgccgggttgcgacgaaggccgtggggcgtttgtcggagggccgccaggccgccgcggcgttgcccgagggcgaagcggagcagtcggatgtctccaccgaagtggcggtggaggtgccggcgtccgaggccgtcgaagtggtcgtggaggcagcgccggagacagaacctgtggcaccggaggctcagaaggacgtgcggcccggccgccgcgcccgcgccgagcgcaagacccgccaaacgaagaaagccgatgccaccgaagaggcgaaggcgcgcgagacgaaggagccgacggaggccgagaagcccgcggagacggaaaagccgacgcggcgccgccaggcggccaagtcgaaggcggaggagaacccggccgccaagaagactgccgcgaagaaggagaccgccaagaagactgccgcgaagaagaacacggccaagaaggaggccccccagaaggcgccggttcgcaagaagaagcccgcgggcgacaccccggccggctacatccgcgagctggtggccggcgctggcgccgagggcatcatgctctccaccatcaccgacgccttgcgtgccaagttcaaggacttcaaggtgcgcgatctcggctattcccagatgcgccagtacatggcctcggtgggagattacgagctggagaagagcggccgcaacttccgcgtgcgcctttcccaatagcccgccatgctctaaaatatcttattcgcccattgccgacacccaaaaggagatgcatttgtggaagcgctgaccctcggtctgctcctgctcgtcgccgtcttggcgtcctcgctcatcgaccagattatcccgcgcgtctcgcttccgctcatccagatcgtcatcgggctcctcattgccgttgtggccggcggcgaggtggaggtgacgctcgacccggagctgttcctcgtcatgttcatcgcgcctttgctctacgacgaggcgaagcacgccgacaagcaggcgctctggcgcgggcgcaagcccgtgctctccctggccataggcctcgtggtggccacgacgctcgtcatcggcttcctgctgaacgcgttcgtgccctccattccgctggcggcggccttcgccctgggcgcggccttgggccccaccgacgccgtggcggtctcgtcgctttcgaagcaggtggacatcccgaagcgccaggcctccatgttgaagggcgagctgctcttgaacgacgcctcgggtatcgtgtccttccaattcgccattgccgccgtggtcaccgggtcgttctccctggttgacgccggggtcgacttcctcgtggaattcgtcggcggcctgctgctcggcattctcctggggctgctcggcaattgggtcgtcaagcgcgcccgctccatcggcgtggagaacacgaacttccacgtgctcttcgaagtgctcattcccttcctcatctacctggtggccaacgtgtgccacgtctccggcgtcatcgccgtggtggtggccgggctcatcaacgtcacgtctcccaagggggttatcgggccttcggtctcgcgcatgaacatcgtctcgggcagcgtgtggcacgtgctcacctacgccctgaacggcatcgtgttcgtgcttctgggaacccagctgcccctggccatgcaggacacgtgggagaacgtgcgcatcacgaactccacgctcatcctgctcgtcttcgggctcaccttcgtgcttctggccacgcgctttttgtgggtgctcgccatggattttttccacgtggttcgctccgagaagcgccggttcaataagggcgatctgcgcagcgcgctcatcacgacgttttgcggggccaagggcaccatcacgctctccatcatgttctccattcccacctatgccgtttacgggccgcccaacgtgcccttcccccagcgcgagctgctgatcttcctcgcctgcggcgtcatcgtgtgcacgctgcttctggccaccttcgtcgtgccgcttctggcgccggctcgcgacaaaggggaggaggagctgcgccgcatcgaccaggacgccgccaccaccatggacatcatgcgcgaggtcatcgagatgctcgcggcccagcagacgcgggagaaccgcgcggagacccgggccgtcatccgctcctacaacgaccgcctcgcgcgcatcaaggccaacaatggcatcgagagcgaaatgaacgtggagctgcgcgtccaggccctgatgtgggagtacgagcgcgccatggagctgatggagcgcggcgtcgtctccggcgtggtggcctaccgctacatggggcgcctcgagcaggccatgcagcttctgcagcacggcaagggccatggcacgctgaagcgttggaacgggcgcttccgggcgctgtggcaccgcggcgtgcgcgcggtgctgcgcgagctgccgggcaacacggagctggccgagcagaccgaggagatgcgctggctgcagacggccacgcgcacctatgccgtggagcatttggaagcggccgtcgcctcaagccaggtgcccaccgaggacgcggcggcggtgctcgtggagtaccagcgctcggtggcggcgctgcacgacgcgcggcccacggtgacctccgtcatcaaggccggcgatcgcaccgaggacatcaagcgcaaggcctacaccttcgagctggagcagatccagagcgcctacgaggacgaccgactctcgcgcgcccatgcccagcgcatgcgcgagagcgtccagctcatgcagatggatctggaggactccgtatagaaaaacggcgccccctccgctaaggggacgccgtggtcgcgcggtatcgataagcttgcccgcggcggctagtacaccatgcccatggcctcgcgcacctcgtccaaggtggtgttggcgatctcgttagcgcggcggttgccctcgtgcaggatctcgcgcaccatctccggctggccttccagttcgcggcgacgctcgcggatgggggccagatacgcgttcaccgactcggtcacgtagcgcttgagggcgccggcgccgtcgttgccgatctccgtcgcgatgtcctgctcggtgcgaccggtggtcagcgccgccgtagtcagtagggccgacacgccgggacgattctccttatcgaaggtgatcatgcgctcggagtcggtctgcgacttcttgatgagcttggcggtctcctcttccgtggccgaaagggcgatggcgttgccgtagctcttcgacatcttgcgcccgtcgaggccggggatttccacggcgtcggtgagaagtccgtggggctccgggaacacatgcccgtagcgctcgttgaagcggcgggcgatctggcgggtctgctcgatgtggggcagctggtccttgccgacgggcacgacgttgcccttgcagaagaggatgtcgcaggcctggtgcaccgggtagctgaggagcagccccgtgagcgcgtggcccgaggcctcctgctcggccttcaccgtggggttgcgcatgagctcggattcggtgacgagcgacaggaaggggagcatgagctggtttagggcgggcacggcggagtgggtgaagatgatggtcttctccggatcgatgccgcaggccagataatcgatgaccatgttgtgcacgttgtcggcgatgttggccgtggtgtcgcggtcggtgatgacctggtagtcggcgatgatgatgcgggtggtgacgccgacgtcctgcaaagcgacgcgctcgcggatggtgccgaagtagtggcccatgtgcagacgccccgtggggcggtcgcccgtgagcatggtgtatttctctgggtgcacggccagatcggccttgatctcgtcgctgatcttcttggaggcgaggaaggtgtcgctcgtcaaatcgcttgccatgggggcggatcctctctttctcgtgcgccgtttcggggtggacggcctcggcactgaaagcgcgggaagagccgccaaacggtggaattgtgaatatgttgggatagtatacaagattcccccttgcgcgcgtcgcggaatccgtgtagtatatacagccgtcgcaagtcaccaagtgagttgcgaaaacctttcggtcgcttggctcagcgggagagcatcgccttcacacggcgggggtcacaggttcaaatcctgtagcgaccaccataaacagcaggcccctcctcggaggggccttttcgtattcaaagagcttttcgcccggggaaggaagccgtcgtgaagcggattgcatttgctgtggtgaccgtggtgctcggggcttgcgccggggcgttttgctgggcgttcttctttctcatgaacgcgggcctcgatcttttgtgggtgaaggcaccggcgtggctggcggcgatagggatgcccgctgtcgtatacccgcttgccttctgcgttgccggtggcgttgccatcggattgtttcaaaagaacgtggggccgtaccccgatgatatgaacgcggtgctcgccgaggtgaagaaaaccgggcgctacgattaccggcacttgggggccatgttcttcggcgcgctcctgccgcttctattcggcggcagtatcgggcccgaggctggtctcaccggcgtggtggcggggctttgcagctgggtgggggatcgactcaagttcgtgggcgccgagatgcgcgagctggcgaacgcgggcacggcggccattttgtcggcgatcttctcggccccgctgttcggtctggcggcgccgctgttcggctatgcggacgatgccgacgggcgtcggcgccggatcgactcgttcaccgcgacggtggtttccgcgccccaggtttccaaaccggtcaaaacggcggtgtacctgctctccgtggccggggcgctgggggcgttcatgctgctcaacgaggtggctggcggcggttcggggctgccgcacttctccgacatggccgtggggacatccgaactcgcctgggcgcttcccgtcattgcgcttggcgcctgcgccggctggctattccatggcttcggctgggccgtgggcaagctgtccgcgcggctcggcgatcgcgtcgtagtgaaggcggtcgttgccggtgcgatactgggagttcttgggatctttctcccctttaccctgttcgccggcgaggcccagaccgagatgctggcgcagcagtggacggccctcggtgccggggcgttgctcgcgacggggtttctcaaggtgctggccagccaggtgtgcctcggactcggttggcgcggcggccacttcttcccgctcatcttctcggggatcgccatcggctatgccgccgccgggctctttggcatcgacccggtcttcgcgctttccgtcagcacggcggccctcttgggtgccgctatgcgccagccgctgatggtggccttgttgctcatcctgtgctttcccgcgaaagccgtcgtcttcgtccttgctgctgcgtgcttgggcgccgccgttccggttccgaaggcgttctctcgaaaactg

SEQ ID NO: 10631 - DNA, 64319 bp, Unknown
  gut microbiota DNA sequence
tctctgctatggtacgggggtgtttggaataacctactcgaggaggcggccgtggggcacgcgcaatatgatactgatgggttcgatcaagccgcggcgtcgaagccgagggagcgcgttgcggtaaaaggctgcatcttcaaggacggccgcatgctgttcctgttcaagcccgatgcggcgcgccgtctcagcatcgcgcccgatctcgaggaggatcttccggggggatgtgtggaagcgggcgagagctggcaggaggcgctggtgcgcgaggtgcgcgaggagaccggtctggagatcgaggtcggcgagcccttcgacgcctggacgttgcgcgccccggggcgacggattctcggcgtcgacttcgtttgccactggcgctccggcgacgtgcgcctgagccatgagcacgagtccttcgaatggctcaccctggaagaagtggaggcgaagggctgggaggcggagcccgtctaccggaaggccttcgaattggttgaggcatgagggggtgcggacggttcccgataagcccaacagccgttttcagaagtaccggaaggcatagcggggcgcatcgtttctcggatgcgttacactatgcagttggcaaaagcggggcggcttggcgtcgtccctcgacgactgattcgggaagcgcttatgatcctgcaaactgaacatctttcgaaatcctacggcggtcgcacgctgttccacgacgtgacgttccgcttggaagagtacgaccggctggcgcttgtgggccctaacggcgcgggcaagacgacactgctcaacatcatctccggtgaggacgatccggacgagggccgcgtgctcttcgccaagggcgcgcgcgtgggctatctggagcaggaggccatcgagatgggcgatctccccgtcttcgaggaggtcatctcgtcgcaaaccgaggtactcgaagccgagcagcgcctgcacaagctggaagcggagctgggcgcgaaccccaccgaagcgcagctggcggccgtgggccgggcgcgggacgcctacgagatgctcggcggctactcgttggagtcgaaggtgcgaagcgtgctgttcggcctcggcttcaccgagcgcgacatgacccgctccaccaccgagttctccggcggttggcagatgcgcatcgcgctggcgaaactgctcatccgcaatcccgaggtgctcttgctcgacgagccgacgaaccacctggacttggaatcggtgaagtggctcgagggctttctgcgcgggtatgccggcacggtcatcgtcgtctcccacgaccgcgccttcatggacaacatggtcgaccgcgtggcggaaatcgacaacggggaagtgaatctgtacaagggcaactactcgaagtacctggtggcacgcgaggagcgcttggagcgcatcaaggcagagcgtgcgaaatcgttggaggagatcgcgcacctgcaagccttcgtcgaccgcttccgctacaaggccaccaaggccaagcaggcccaggagcgcgagcggcgcatcgagaagatcaaggagacgctgccggtcatccccgaggagaagaagacggtgcacttcaacttcgtgcagccgccgcgcacgggagatgaggtggtgcgggcgcgcggcctcgtgaagcgctacggcgaccacacggtgtacgacggcatcgacttcacgatgtaccgcggcgacaaggtggcgctcgtgggccccaacggcgcgggcaaatccacgctcttgaagatgatcgccggggtggaaaagcccgacgccggcaccatcgactatggcgtgaacgtcgatctcacctactacgcccagcaccagctggaagagctgcacgcgggcaacaccgtcttcgaggagctggatcatgccgcgcccggctggtccatctcccaggtgcgcagcctgctgggcgcgtttttgttcacgggggacgccgtggacaagaaggtgtcggtgctctccggcggcgagaaggggcggcttgccctggcgaagatgctcgtggcccccaagcccctgctgtgtttggacgagcccaccaaccacctggacatctccagtgccgacgtgctggagcaggccctgcagcacttcgacggcaccatcctgttcatcacccacgaccggcacctcatccgcggggtggccaaccgcatcgtggaggtgaaggacggccagatcaccaactacgagggcgactacgactactacctgtacaagtcgggccagctcgatggcgacgtggacgccgaccgctcggtggtggacgaggcgctcgccgatgcgggcatccacgggaaggggagcggcgcggcccccgagaagcgccgcgccggtgcggcggcccccacgaagatcaccgtgaaccgtcgccgcgaccgccaaggctcgagctcgacggctgctcgggatggttccgtaggggctgacctcggtcagccctccgcagctgtcaagggctccgggaatgcgccttccgcccgtcccgaggtgcagctcaccgcgcccaaaggcagcgcgccgaagaccaaggagcagaagcgtcgcgaggccgaagcgcgcaaccgcgcctacgccgccctgaagaaccaccgcaagcgcatcgcccagctggacgaacagatggaacgagacaacgcccgcatggaggagctgctggccatgatggccgatccggacttctacgtgaacgaggatgcctcctccgacgccatcgccgagcacgccaaactgaagcagcgtctggccgccgccgaggaggagtggttcaccctcaccgaggagctggaagccgaaatggcccgccaacaggagcgggcttaggggatccctccggttcgagctgcggggtaccgttcagtcgctcagacagtcctcgctcggcggaaatgcccacggggcatttccgttcgctgcggaactcgcttggtgaacggcaccccgcatctcgaacctgctctaccaactatgaaagggttgcaatgttgaacattgttcttgtggaaccggagattccccagaatacggggaacatcgctcgcacgtgcgcgtgtgtgggggcgcggctgcatttggtggagccgatggggtttcggctgacggagaagaacttgaagcgggccggatgcgactattgggacgatgtcgaggttgtgcggtggccgtgcgtcgagacgttcttcgcggctcacggcgatgatgagctgcaccttttcacgggacaggcggcgtgcggctatcgcgatgccgtctacggaccggacgcgtttctgctgttcgggcgcgagagccgcgggctcgatcaggcaatcatcgatgcccgcgccgaccgttgccggcgcatccccatgcgcgagggcgcccgttccctcaacctttccaatgccgtcgccatagctgcctacgaggctctggcccagcaaggctttccggggttggtgtagatggagaccttcgagctgattctgttcctgctcacggcggtcatcgcctccagcattctggacaagttcctgccgccgctgtcgctgccgcttgtgcagatcgccctcggcgccgcgctcgcgctggcggtgcccacgccgttggaatggggcatcgatccggagttgctgctcatcctgttcatcgcgcctctgcacttcaacgagtcgcgccatgtggattccggcgccctgtggaaaaaccgctggggcatcgcgtcgctttccgtgggactcgtccttgccatcgtcgccgcctgcggggcgacgctgcacgcgcttttgcccgccgtgcccctggcggctgcctgcgcgctcggcggcgccatgggatctaccgatgccgtggccgtcacggcgctgacccacgaccgccggttcggccgccgtcacgaggcgctgctcaagggcgaggccctgttcaacgatgtgacgggcaccgtggtgttccaatgctgtctgacgattctggccacgggatcattctcgcttctgcatgcgggcgaggaattcgccctcgatctgttcggcggcttcttcggcggtcttgtcatggggcttctcgcctggggccttttgcgggtgctgcggcgcacgggactcgacaaccccacgctccacgtgatgctggagctgcttttgcccttcgtcatctatctggcggcgaaatcgttgcacatcggcgcggtcatcgccgtggtggcctcggggcttatgctgtccctactgccccagcgccacacggctgccacggcccgcaccaagctgcaggcccaaagcgtgtggacgaccttggagttcgtgctgaacgggatcatcttcgtcgtgctgggcatgcagctgccgcgccttctggaaccggcggccgaggggagcttgggcgatccggcgacgctgctgggcgtcgtggtggtgctgactctcgtgttggaaggggtgcgattcctgtggctgctcgccatggacgtgagggctgcgatcgcatcgggcaagggggcgcgcagttgcttcgcccctgcggccctgcgcggcacccttgccatggccttcgccggcgccaagggcggcatcacgctctccctcatgctgacgctgacggcggccgcgggcttgtccgcttccggtcaggccacgctcgtctccattgcctcgggcatgatcgtgctgaccctggtgctggccgacttcgcggtgccggcgctcacgccctcaaaacgttcggcgaagcgcacccgcgatcgggtggatgccgagatcgacctcaccctgggcgtgatcgcctccatcgaggccgacgcgcatctcaccggggcggtgaagggcgctgccgtcgacgccgttgacgagccggccacggtcatcgttatgcaccgttacgccgggatgctggaagatctcgcgcctgcggcatcgcccgcggcggcggcccgggcccgtgcggaggtcgctcgggtgcgcggcttgtacgaccagctggacggcatcgctcgcagggcggcgcggtgggatgagggcgaaggcgacatggaaggggaggagagtccggctgcccccagcctgtccgaccagttccatcagatgcgcgagacccatgacgctgtggaggacgtgcaggcccaggccctcgtccgcgagctgcagctcatcaaggccatggtcgccgatgactccatcgacgcggcccatgccaaggacctgcgcaatgacgtctacatccagcagctggtactcgactagcgctttctcctatttgcccagatgggagccgagtcggtataatggcgcaggtgacgtagcgcaaggagggaatgtgggcatcggagaacaggggtcggcgaaggaccgcgcgacggacagtgcggcggctggcaaggggcgccggccggccgtgctgcgcaatttcgacatttcctacatcggggtgtgcgcgccgcagatatggatctactgcatcgcccatcgcagcgacggggcgctcggcgaggtcgcgttgggcgtgccgctgtatttggccctttcggcgacgatggccgtcgttatgatgctggtgctgagggggtgcgtgccgagtctccggcgcctcgcgtggcccttggccgttgtgcaggggcttgccagcgtcgctttggtggtgccgctgctcccagcatcaccctcagcttcgatcttttatgcggtcgccgccgcgctcgcgggcgcgggcgtcgcgtggctctatctgcaatgggcgccgttcttcgccagcttgggagctaaagatgtcatcgcctgcgtgttcatcgccatggcgataggttccgcgttgaaggtgcccctcgatatgctgccagctcccgctgcggccatcgtgctggcgctgcttccggccgtctcggtggctctcgcgcgccgcgccgatgcccgccccgtgcctgcagagcgcgcgccgcgcatgttccacgaggtgaatcccacggcgattccctggaagattctcttcggcgtggccgtctacagcttcgccatcggggccgtgaagggcgttcctgttcaggcggaccccgtgcccttcgtggcgctcaccgttgtgcaccacggcgtcgagatcgttcttgccgcagccatgctgtggtgggtgctcgtgcgcgggcggctcattaacttctcggggctgtggcgcgccgtgctgctgttcacggcggcggcactgttctttctgcccgtggccggccccgcggccgtgccctggttgcttctcggcgccggtatcgcccaaacccttgtggtcatgctgctgtgggccatgctcgccgatgtggcccaccattccacggcctcgcccctcgtgatcttcgcctcgggatggctcgcctactcgctacccttggccctgggcgagacggcgggcgtgctcctcgggcagttggaatctcccgcgatcgccgtggcgatgctggcctatgtcgtcacggtgacggtggtactggccttgaacgacagcgccttcgcgcagcggcgcatcttcgccgatctggatgtcgccgctccggtgcctgcggtcttcgaaagtctggatgcgggctgcgagcgcctcggtgccgagtgcggcctcacggtgcgcgaggtggaggtgctccagatgctcgtgaagggccgttccaaatcttatatcgccgagacgctgttcatttccgagaacaccgtgcgatcccattcgaagcacatctaccagaagcttggcgttcactccaagcaagaggtgctcgacttgctcggtcttggcgactgagatgccgccccgcatcgtccccccggccgccacggtgcggcctttttcttcggcaacgctttcaggttttgcccgtattctcaatgacctggggaaacgtccgtatcacccccttcgtgtcataggggttctccgcgaaaacacaccgttcgtgtactagtccgcccgccgggccgagccctaggatggcctcatcggcggcgagcagacggctcaaccgcccaaggacatagggagacccgaggaggacaccatgagcactatgattcagaaccccaacgagatcgaggccttcacgcgtcgtcagcgcgccctcgcccgtatccatcgcaacatcgcggagaagttccagctgaaccgccgccagttcatcagcggtagcctcgccaccatggcgctcgctgcgctcggtctttccggttgcgcgccgaagaccccggcggcctccacgggcgatgcctcgccggccttcactcccggcacctacgaggcgaccgctcagggccgcaacggcgagatcaaagtgtcggtgaccttcgaggccgaccgcatcgcctccatcgaggccgaccacatggagagccgcaacatcggcgatgccgccgtgcgccttctgaccgacaactacctggacacccagaagctctccgtcgataccgtgactggcgccaccctcacctccatggccttcgccacggccgtggccgagtgcgccgaggccgcgggcgccgacatgcgcgccatcatgaagggcgacgcctccgtgaacgctgccgagcccataaacgacgaggccgacgtggtcgtcatcggctccggcggcgcggcactggccgccgccgtgacagccgccgaggcgggcaagtccgtcgtcatgcttgagaagatggacatctacggtggcaacaccaacgccggcgagggcacgttgaacgcgccggacccggagcgccaggagcccatgggcatcgaagactcgccggacttctactacacccagaccttcgagggcggcgactcggcgggcgacccggccctcgtgcgcatcctcgccgacaacgcgctggacgccgtgcactggatggaggaccacgggcttgtctacgagaaggaggtcttcacggccatcggcggcctgtggcagcgcgggcacgcggtcgaggtcgagcgcaagggcgagcagggcggcagctactacgtctcctgcctgatggacgccgcccaggccacgggcaacttcaccctgtacaccgatgcgaagatcgaagagctcatcgtggaaggcggcgcggtcgtaggcgtgcgcggcacccgtccgtcctccggcgaggccgtggaagtgcgcggaaagtccgtggtgctcgccacgggcggctattcccgcaacgcggagctcgccatgcagtacgacaagcgcgtgaccgaatcgatgccctcatcgaacgtgtgctcctccaccggcgacggcctggctttggccgaggccgccggcgcggggctgcgcaacatggagctcgtgcagattcaccccttgggcgacccgcagaacggcggcgtggccaccttcgtgggcaactggctgggcgtggaagactacgtgatggtcaacgacgatgccgttcgcttcgtccgcgaggacgagcgccgcgacaccatcgccgatgccatcctggagcagccgaacgacgagatgtggcttttggtggattccacgaacatcaaggacgaccgcttggaggagatcgccgacttggtggcgaagggccacagctttaaggccgacaccatcgaggacttggcgacccagatcggcgtagatccctcgacgctcgccgagaccatcgagggctacaacgcctgcgtggccgccggcaaggacacgcagatcgcgcccggcaaggagcttctgggcgacgcggtgtccgatccctccttctacgcctccaagcgcatcccgaccatccactacaccatgggcggcgtgtgcatcagtcccgaggcccaggtgcttaccgccgcaggcgagatcatccccggcctgttcgccgctggcgaggtgactggcggcgtgcagggggccaaccgtctgggcggcaactcctacaccgatctgatcgtattcggccgcatcgccggcgcctcggccgccgctgccgcctaagatccctgcgcccctcctcttttgggccccgcgacgcctccctccctccgtcgcggggcccgctgtcgttcatcggcggtttctgtgggtttggaaggcggcgcgatgatgagggcgcgcggtgcgctacacttatgcgctatggttaaccttccctacatcatctgctcggtgctgagcttcatcccggctctcgtgcttcacgaggttgcccacggctatgcggcctacaagctgggcgaccccacggctaagcgctccggacgcctttcgctgaacccgctcaagcacatcgaccccttcggcacggtcattctgccgcttctgctcatggtcatgggctggccggtgttcggctacgcgaagccggtgccctacaatccgcgctacttcaaggatccgcgccgcgacgatgtcattgtgggtttggccgggccttccgccaacctcgccatggccgcgctcgccgctgcggtggcgtggggctgctcggggctcgtcagcaaccccgccttcgccaacaacgagctgttcgcttacttctacgtgatgttcctacccacgttcgcgctcatcaacctgtaccttatgttcttcaacctgctgcccatccctcctttggacggctcatccatcttcgccatcctgttgccgccgaagtacctgccgaagtactaccagatccagcagtacgccttccccgtgttcatgatcgccatcgtggtgctgccctacgtgttcaacttcaacccgttctcgtggtatctgggggtcacggccggcaatctgttcgatttcatgttcccgccgtttttctcctaagagacggcgccgcccatgtcctacaaagtccgcatcgacagcttcgagggccccttcgacctgctgctttacctcgtgagccgccagaaggtggatatcggcgccatctccatcaccgagatcgccgatcagtacctcgccgaggtgtcgcgcatggagaccctcgatctggacgtggcgagcgactttttgctggtggcctctacgctgctcgagatcaaggcccaaagcctcatcccgcgcgaacgcgacgagcttgacgacgacttggcggagctcgcgccctccgaggcccgcgatatgctggtcgagcgcctcatggaatacaagaagttcaagaacgccgccgcggtgctccacaaccgcttcatcgccgagggtcgcatgcacacgcgccccttcggccctgatgccgacttcctcggcctcatgcccgacttcctggaaggggtgtcgctggacgcgctggcctatcaggcggccgcggcccttgcgcgccgcgaggtgttcctgctggaaagcgagcacattgccgccaagcccattcccgtggaggtgcacgtgcgcgccattcatcagcgcattcgcacggccaagcacctgcgtttctcgcagcttgtgggcccgggcacccccaaggatgtggcggtagtgacgtttctggccatcctcgagctgtacaagcgcgtcatggtgaggctcgagcaggacgagctgttcggcgatatcgcgatcgactacatcgagggttcgggcgatttgcgtttggaaggcgacgacgccctcacgtcggtgggggaggagtagaggcacatgtttcaaggattgcaggaagaccagctggcgggcgccctggaggcgatgctcttcgtgaccgacgagcccgtgggtaccatcgcgcttgccgagatgctcgagtgcgaggtgggagcggtggaggcggcgctcgtgcggctgcgggatgatctggaggcccgcggctccggcatccagctgcgcgaagtggccggcggctggcgtttgttcacgcatccggcctaccacgagctcatcgagaagtacgtgctgtcctgggacacgcgcaagctttccgcggcggccatggagacgctggccatcgtggcctatacccagccggtgacccgtgtcggggtggcctcggtgcgcggcgtgaactccgacagctccatcaactcgctggtggagaaggggctcgtgcgcgaggtgggtacagaagacgcgccgggcaacccggtgctctacggcacgactcggggctttctggagaagttcggtctgcgcagccctgccgacctgcccgatttggccgatttcgcgcccgatgcggagacgcgtcggctcatcacggagcggttgtcggccacgcgcaaggacgcggttgtctccgacgagcaggcccgcaccatggcccgcgcgctcatgggcgaggacttcgaggccgacgacggcgaggccatgctatctgacgaggagctggcccagggcacggatgcggcggccgaggtgctcgcggacgccctggaggaggagcgcggggaggaagcggcagcgatagcagctggtcgagcgaagatcgaggaagacggggatgccgaggctgctgggggtggcgcggatactggagctgcccgcatcgccgtgcccggcgctgccgccgacgcgctcggcaccgcagacgccgacgccatgttcgctcgcgccatcgcatccacgctaggcgtcgtcgacaagatcgacttcgactccctcgtcttcgagaccgacgacgagtaggtcccccgccatggccgaaatgaggttgcagaagtttctggctcgggccggggtggcctcgcggcgccatgccgaggaactgatcgcggctggtcgcgtgaccgtgaacggcgcgcgggtgaccgagatgggcgtgaaggttgatcctgctgcggacatggtggccgtggatggcgcgcccgtcgcgctgcccgaggagaacgccacgttcctgctgcacaagcccgccggctacgtgaccactatgagcgatccccaggggcgccccaccgtggctgcgctcatggccgacgagctgctcgcccatccggggcttttccccgtggggcggctggacaccgacactacggggcttctgctgttcaccgacgacgggcagctgggccatggccttctgcacccgcgacgccatgtggagaagacgtatctggccctggtggaaggggtgcccgacgcgggcgacgtgcgacgcttgcgcgaaggggttctgctggatgacggccccacgctgccggcggccgtgcgcgtgctcgagggcgccgacgcctgccgggccgcgcagctcatcggcgagggggccggtgccagcggctaccgtcagcgccacgggggcaagcgcggccgcgatgcgctgggcgccagggggtcttacgtggaagtacgcctgcgcgagggccgcaaccgccaagtgcgccgcatgctggacgccgtggggcatccggtgatcgcgctgcatcgcgaggccttcggcccgctcgtcctgggggatctgccccggggcacctcccgtccgctcgcggaagaggaagtggcgcgcctcaaggagctcgcgtcctagctcgggcgccggcgagggcttggtttggcccatgttccggcgtccgcgagtatctgagccgatccgcgtcccggcgcgatccgcgacgcgcgccaacgtcgacctcttgtcggggcgcgggtcgcagccggctttcttatagatcgcaagaatggcagtatcggcaaatctgatcgaaatcaccaacatttcgggatgctgcgccggcgtcagcgcttataatacgcgccagtgaaggataccgttgcacccgggagggcccggggcgacaggatcgaaaggaagtaaccatgagtgttaccgtatcgacgtttctcaaaatgaaggccgagggcaagaagatctcgatgatcaccgcctacgactacaccacggcacggctcgtggacgagtccggcattgattccatcctcgtcggcgactcgctcggcaacgtcatgctcggtctgggcgataccgtatcggtgacgatggaggacatgatccaccacggggccgctgtggcccgcggcacgaagaacgcactcgtcgtcgtcgatatgcccttcatgtcgtatcagtccagcgtctacgacgcggtggtgaacgccggccgcctcatgaaggaggcgcgcgccaacgctgtgaagctggagggcggcgtggaggtggccgaccgcatccgtgccatcgtcgactgccagatccccgtgtgcgcccatatcgggctcacgccccagggcatcaacgcgctgggcggcttcaaggtgcagggcaagacggccgattcggcccgcaagctgctggaagacgcccacgcggtggaagaggccggcgccttcgccgtggtcctcgaggccatccccgccgagcttgccgagcgcgtgtcggcggagctgaccatccccaccatcggcatcggcgccggcgcgggctgcgacggccaggtgctcgtgaaccaggacatgctcggcatgttccacgacttcacgccgaagttcgtgcgccgcttcgccgaggtgggcgacgtcatgctcgaggcctaccgcgcctacgatgccgccgtgaaggacggctcgttccccgccgccgagcacacctacgccgcccccgcgggcgtgctggaaaacctctaggaggccggccatggagatcattcgcactgttgcggacatgaaggcccgggcggccgcctggaaggccgaggggctctccatcgggctcgtgcccaccatggggtcgctgcacgagggccacgagagcctcatggacgccgcccgcgaagcgagcgaccgcgtcgtcgtctcggtattcgtcaaccccatccagttcgggccgggcgaggactacgaggcctacccgcgcgatctcgaacgcgacgcgcgcatctgcgagcgccacggcgtcgacgtcgtcttccacccggaagtggacgacatgtacgccccggcccacaacaccttcgtggtcatggaaacgctcaccgactcgctgtgcggcgcctcgcgcccggggcacttccgcggcgtgtgcacggtggtcacgaagctcttcaacatcgtgcagccgcatcgcgcttttttcgggcagaaggacgcccagcagctcgccatcatcaagcgcatggtggccgacttgaacatgaacgtgaccgtcgtcggctgccccatcgtgcgcgaggccgacggtctggccaaaagctcgcgtaacgcctacctgagcgcggaggagcgccaggcggccctcgtgctgtcgcgggccatcttcgccgggaaggcggccgtggaggcgggggagcgcgacgccgcggcgctcaaggcgctcatgggcggcatcatcgaggccgagccgctcgcgcgcatcgattacgtggaagtcgtcgacggtgtgaccatgcagccgaccgacgccatcggcgccatggcgctcgtggccatggccgtctacatcgggagcacgcgcctcatcgacaacttcctgtacgaggaaggggagtagcccatgctgctgaacgtcctgaaggggaagatccaccgcgcccgggtggtgcaggccgagctcgactacgtcggctccatcaccgtggacaccgagcttgcccgcgcggcgggcatcttggagtacgagaaggtgcaggtcgtcgatatcgacaacggcaaccgcttcgagacctacgtcatcgccggcgagccgggaagcggcatgatctgcgtgaacggcgcggcggcccactgcgtggagccggggcacaaggtcatcatcatgtgctacgcgcagatgactcccgaggagttcgccgatcccgacaacgccccgcgcgtggtgttcgtggatgacgacaaccgcatcgcccgcgtcacccgctacgagaaacacggacgtttggaagatatgcagtagcgactcctcggggggcgggaccacggggcaccttgattcgctcagacagtcctcgatggtatcgaaggcccaaggtcgccttttccctgcgtcgttgcgccttcgataccatctgcggaactcgctcggtcaaggcgccccgtgttcccgctgcgcattgccaccgttgaatatagcaaggaggctcctatgaagcctattgaaaatgtcgccattgtcgggttcgggtcgctgggggccatgtatgccggctgcttcggggccgccatggggcccgagcgcgttttcgtggtcgccgatacggcccgcaccgagcgctaccgcgccgaggccgccacgttcaacggcgagcccatccgcgtcacctatctgacctacgatgaggctgccgagcgcgccgcggaggaacccttcgacgccgtgctgtacgccgtgaagtacggtgcgctgcccgaggccatcgagcagtcggcgccgctcatcggctccgataccgccatcatctcggtgctcaatggcgtcacgagcgaggaagttctcgccgagcgcttcgggtgggatcgcgtccttttgtgcgtcgcccagcagatggactcccgcaaggagggcgccacggtgaccgccggctgcgtgggcgtgatggccctgggcgtccacgatgccgaggacgcggcccagcgggcgaacctcgagcgcgtcacggaatgtctcaccgccatcgaccagcccttcatcacgccggatgacatccggcaccagctgtggggcaagctcatctgcaacgtgggggtgaaccaggcctgtgccgtctacgactgctgcttcagcggcatccacgcacccggcgaggcgcgcgaggccatgatcgccgccatgcgcgaggtggcggcggtgggccgggcggaaggcgtgggtctcaccgaagaggacgtggcctactggctcgatatcatcgaccacttgaacccggagggtctgccgagcctgcgccaggacgtgctggcgcgccgtcccacggaggtggaactcttctcgggcaccatcaaccgcctgggcgcggcccacggcatccccacgccgcaaaacgagcgcttctacgccgccatcaaggagctcgaaagctccttctcgcaggggcgaacctcggttcgccctcgtcaggcacgttaatctcgcctgagaggggcgaccaaggtcgccccctacggttgggttgcgggccctttcaagttcaccgtcgagttacgttctcgtgaccgcttgttttcagtgataaactgacgcaggaataacaagcatgcacaaggacggcttttggagcgcagaaagtacatcgccatcgtatcggccgcggcggtcgtcatcgtcgtcgcggtctgcgtctacctggcccaactctccgcgacggtcgccggcaacctcatgacctccgtggacgagatatcccgccacgacgtggagaccatcgagggcacgctgaacaattgctacgcgcgcctgggctcggtggccgaccgcctcgaggtctacgacgtgcagacggtgcacgaggcccaggagcagctgaacctggaggcggcctcgtcggccatgttcaacgcggtctatctcatggaagccgacggcacgctctacagcagctcgtacgtgcgcctcggtgccgacgagcacgcctacgacgagcttatggaagacgggcgcgagcacttcgccatgctctacgacgacgagaacggccggctggaaaccaccaaggagtccctcattttcggcatccgtctgcccgatacggaaatcggcgggcgaaccttcgtggccatgctcgcccgcagcgacttgtccaccatctccagccagctggtcatcgagagcttcgacggccagggcgtctccttggtcgtgaacgcgcggggctattacatcgtgagcgccagccctgccaccgacctcgccgggcgcgacaacttctacgacacgctcgaggccgggcgcatcgacgacggcgtcacggtggaggacatccgccgcaacatcgccgcgggcgagagcttcgtcatcaattgcacgacgagcgtcggcgaggatctcgtcatgtccttcgcgccggtcgcaggtaccgagtggtcgttcatcatgacggttccgacggaggtgttcagccagcgcttcgccccctttatcgccatgacggtgggcatgctcggggccatggtggcggtcatctccatcatgctggcggtcatctaccggttcatgaggcagtcgatccaggctcgggcggaggccgtcgcgcgcacggagttcctttcgaacatgagccatgagatccgcacgcccttaaacggcatcatcggcctgaaccatctgatggagcggcacgtggacgacgccaccgccatgcgcgactacgtgaatcggctcggcaaggccgcccagtacctgctatcgcttgtgaacgacatcctggacatgtcgaagctgcaggccggcaaggtcgatttgacgagcgagcctttcgacgtgaacgcgctggtcgacaatgtctgcgagatgcagcgcgggcccatggctgaccgcgggatccgcttcgagctgtcgcgcacggtcgagcacccgtggcttcaaggcgacgaggtgcgcctgtcgcaggttctcatgaacatcctgtcgaatgcggtgaagttcacgcccgagggcggccgcatcaccatgaaggtgcacgaggcggtgtacgcgtcggggaatgaggccgtgctcacggtgtcgatcgccgataccggctgcggcatgaccaaggagttcgccgagcatgtcttcgacgccttcacgcaagagcgcaaccgcaacagcgattcccagaagggcacggggctgggcatgtccatcagctacctgctcatgacgcagatgggcggctccatcacggtggaaagcgagccggggtgcggttcctgcttcaccgtcatcgtgacgcttcccactgtcgcgaatggcgatgagctgacgcctgcccaggcgccctcgctgatttcgtcgagtgcagaaggcgcggaaggcgtgggaggcgtagaacgcgcggaagaggcggagggcgaaaccgccgaaaccgccagagtcgccgaaaccgccgaaaccgtcgaagcccccggggcccccggagccgttcgggccgtctcctcgccgtctggtgccgaagccgctcgggcgcctgtcgagatcctcgtggccgaggacaacgagctgaacgccgacatcatctcttccatcctcaccgaggagggcttctccatcaccgtggccgaaaacggcgaggaggccgtgcgcctgttctccgaatcgccggtgggacatttcgcggccatcctcatggacgcccagatgccggtcatggatggctacgaggcctctcgcgcgatccgcgatctgaagcgagccgatgccaagacggtgcgcatcttcgcctgcacggcctccacgttcgccgaagatcgcaatcgcgctttggcatcgggcatggacgactttctcagcaagcctttgaacgtgacggtcatgctgcaaaagcttgaggccgttcggaagggcggtgcctcatgagtagcgagagccgcagaacgcatcgcaggatgatcgagccggcattgtcgccgacgcaaagcgtcgcgccgccgatccctcgtcgcggcatgacccgccgcgccttctgcgcgggagcggccttcctcgcggccgcgggggcgctgccccttgccggctgcagcggcctgcccttcacgggtgccgcgcccgttcgtctggtggtcaaggtgccccgcacgggccacgatgtcgtcttcgacgactccatcagccaggtggagatggtcatccagggcatggccgacgagttccagcgcacctacgcgcgccccgtcgacgtcgaggtcatcgttttcgagcagaaccagtacgacgaggccgtcgaggggtcgttcgatacggacaagtcaccggacgtgctttacggcgactatttcaacatctccacctacattcgcaccgggcgcgtcgtgccgttggacgatgtcgctactccggctatccgcgacgacctcttcgacgatttgtggaacatgggcgtggtggagggccgcgcgtatatgatgccctatctggcgcgccagaacgtgctcgcctacaacaaggagatgttccgcaacgcggggcttggggagttcatcgccgaaggggaaatcaccgcctggtcgctgagcgagtggacgcgcatcttggacgcgctttccgcctcgcttcccgagggaagcttcccgatgatgatgtacgcgggcagttcccaaggcgacacccatatcgtgacgcttctgcgctcggccggatccgacatctacgacgaggctggccacttcaatctctcggcacccgagggtgtgtcggcgctccggtggattcaggacggcgtgggacgcggctggttcccgccgcacgcggagaatctcgagatcgaagactgctccagtttgttccgccaggggcagttggccatctacatggtgaacaacgcctccatcacccgctacggcgatgcggtggggctcgtgaacttcccgggacccgatgcggacggcagcgccaccgccttcgcctcgggcttccagatcttcgacaacggcgatgccgagaagctgcaggtggcgagggatttcctctcctttgtgtacggcgatgggcactggctcgattacgcggcgggcgcgataccggcgagcaagcgcgtgtccgaccgctacggggccgacatccccttctacgatctgttccgcgccaatgccggcaacgtttgggatttcacgggcaacaaccccgacacccaaacagtgcgagaaatcttctatacgggcatccacgatctgctcatgggcaagacgactcccgaggggtgcgccgcctttttggacgagcgctgcaacgccgccatcgacgaaggctgggccaaaagccagctgcatgagtagagaagctcgctcctcgggcagggcattgccctaaagggcgccaaggtcgatggcggtgaaccccagctcttcgatgaactcgtccggagtgcttgcgggaatgcctaaggagaggaatggctcggtgtttcgcgtgatgacgaggtcgatgttctctgtgcgggcgcaggcggcgatgatgctgtcgccgtagctcgaaagcctcagctgaaggccgctacggcatacgatgctgtcgacggaaagtatctcggcgagatccatgaggcgttccagcatctcgtaggcgatggtgcagccatctgccgcgctcgctatggtgaatgcgtctctcaaggtggtagccgcagcggtcatgatgatcccatcgtcgatgcagccgtaaagcgcggcaagggaggcgtcgtgcccatcgcgccctagcgctacgtcgagccagacatcagtgtcaacgagcaccctcacgaggtcacctcgctctctgcttgaagtgcggccgaaggcaggtcgtcgcgacggacatcgcttcgcgaggcggaggcgcccgccaagttgtccaagcttcgcaaagcggaatgcttgtgcatgcgctcgtcttgggcgccttcccgcagatctcgcaatatgaaatccggaacggctcgggtgcgtgccatttcggcccaaagcgctcggattgcctgagaaggggagccgcccgccttgctgagcacgtcgtctccgcgcttcttgagcgttgtgctgattctcacgttgatggtcgattggtctgtcacgggatcttcctcggattggggcagccgcctcaggagcgcgttgcgagcagaaggcggttgtctggaacgcatcgaatgatagcgcagcaggcaatcccctggggcttcaaggtgaggttttctttgaaataatgttgaaaatggcatattgctttaccgtaaagcaccatgttagaattgacatagagtcggctccccctaacgggtgcatcgctgggatgcatccgttagggggaaggcggaaggccgctccactgcgagaagggaacaccctatggaaacagtggagctgattaccaagctggcaaccatgataacggccattgtagggctgatcagggaattactcagaaagaggaaagagccgccctcagccgagtagctaaaggcgaccctccaaccacgaaatactagtcaattcgtggagcggtcgccgtagcagcggcaaccgccttctcctgcattgtagcacggtgcgggagatttgcgccgaacattttccgaacgatcccaggagggttaatgacgaacaaggctggtagaacggttcgcaagcaaaaccccgagcccgttattccgaaagaaccgccattggacgtgcggtgcctgtgtccgaaatgctccaatctctttagccccgaagagattggaggcgcgtatcttaatcggctctgcccgtcctgcggaactgctctgtccgaaacagcccatgacgaacgggcgcgcgccatctgcgaatcgctcgatgagatcgaagcgaggctccttctggagaagaaggaggcggaaaaatggaaggaacggcgcaatggcaagctgtttgtctgggttgctcctctgaagcgctacgcggatcggaagctgcgggcgattgaagagacgctgggcgatatccgcgctgacaagttagattcttggcgagaccttggtgcccttgctctgtcgcgctactatacgggggaatggtacctgcgcaccggctttccgctcgagcgcacagtgatcgatcctttcaagctcgttcccgagcactcggcagcaggagcatggcgtcttcccgcagggtatggcgatgtggcgggcatgacggccgagttcgaggtgttccagagggtgctcgagaaggtgcgcgacgtttcctcgccgctttaccaggctcagcttctgcccaacttgtacttcccgcgcgagccgtcgaacagaggggaatgggctctttgggatcaagtagacctcatcgtggcaacgcgtcaggcggcgttcgtgctggaagtgaaaagccgcaagggggtgagcgtgacggctttcaagccttttgaggctgtgggcatcaacggtgccgaagaaaccgccgctctaactcagaattctcgtcatgccgtggcttttgcggacatctgcccaaagtatcctttcgagagcgtgtatgagcagttggtgttcgctaggcttgattcgttcgagaccgatgagacggggtttgtcaacaacatcaacgtgagcgtcgtggaaggagatggcgcgggaggtttccaggtcgtcgaaggccaccacgtaggcgcgcttggtcatatcgacaccttgcacggtgcccttgccgaagacggggtgggccacgcgctcgcccgcggagaactgcgccgcggcggcccgttcggccagccgcagatcggcggcggcttgtgcctcgcgggcctgggcgaggtactccggcggcatggggctgcgcagcagccgctcgtagccgctcgcctgcagaaggtcagcgagcaccgccgacacgggccgctcggcgtaggtggccgagaacgtctccaccagcttcaggaagtccgcggcgcccgtgcccttgaagatgtcgtcgccgatgtgggcctccagtgcctcgtacagggtggtgccctcgcgctcggccgcctcttccaaatacttcatgcgccggcgccccaaattgcgcttgggcacgttggccacgcggcggaaatccaggtcgtttttcgtcgcgatgaggcgcaggtacgacagcgcgtccttgacctcgcgtcgggcgaagaacggtgtgcccgagtacaccgtgtgggggatctgctcgcggatgaaggcttcctccacggcccgcgaggcgtaatgggcccggtagagcaccgcgatgtcgccataggccaccccggcgccgtgcagtgcccgcactccctcggcgatccaggcggcctcggcgggggagtcggcgccgtggtaccacacggccggccccgcgtccgtgcggcgtgccaacagatcctttgcgatgcgctgccggttgcgggcgatgagcgagtttgccgcggacagcacctggggtaccgagcggtagttctccagcattatgatggtgcgggtgccgtggaagtgtgcatcgaactccgtgaggtagcgcacgttggccccgcgccaggtgtagatggtctgatccgggtcgcccacgacgaacaggttgccgtgatggcccgcgagcgcctccatgagcgcgtactgcaagccgtcgatatcctggaactcgtccaccatgacgtactccatgcgctcctgccaggcgcggcgcacctccgggcaggtgtcgaacaggtgcagcgtcaggatgatgagatcgttgtagtcgagcccgaagctcttcttctgctgcagcaggtggccgtagaagataatgtcgtcgacggtctcggcctcggcatagcggcgcttcagctcgtcgtcgcccatggcgatgaagtcgtggaagtagtcggtgcggtcgcgggtcttcagcatctctatcttgtcgcgggcctgggcgtaggtgcgctcgcgcagggtgagcccgcgctcctcatagacgatagcgagcatggcgtcgatgtcgccgttatcgagcaccgagaagctcttcggcagctgcagggcgtgaccgtcggcctgcagcaccgccacgcgcaagccgtggaaggtgttgatgagtcccgtgtccgcatcgccgatgaggcgccggatgcggcggcgcatctcgccggccgccttgttggtgaaagtggcacacaggatgtggcccggcaggatgcccagcacgttcgctaagtacgcgaatcggtaggcgagtgcccgggtcttgcctgtgcccgcgccggcgatgacgcgcacgtagccctcggtggtcgtgaccgcctcgcgctgcgcctcgttcagggagccgagccagtcctcctcgggcgcggccagctcgctatagggcgcaaggccgccctccagaacctcgtcccagcctatgttctcacgattctccatggcgagaggtatagcaaagtttctcgaaaatactagtataaatgtacgttgcattatggtgccatacagttgctgggtggaagggtggtgggccagaaagtgaaatagccgctcccgataagtatggaaaacggctacttcgccaagttaaaaacttgaacccgaggtagccgccgttgccgcggcaagccacccagccccgtcagtacataaccccgatttgaatgctgtcaacgtcaatgtgtgttgcggtgctgcccgcctatcagctagccgcagctagctgcgttagccgctttcgcctcgcgaccacccttgaagaaggggagctcgcaaccgcattcctgcagcagatccaacatccagcggatcgtctcgtctcgggtttcgcgacgcaccgcctccagcggatcaagctccatcgggacgtccaggatgtcgctgggaatctccttagcgtcgcaggcctcggccacctcggcgcagcccagatcgtccgtcagaacgagccgcacgcgaccgtcgtaccactccgcgattctctcgccgatcccgagtagcgaagctgcggcgtccgggttggccgccagcaacgtcgccagctgatcgacggaaacgaccagcctcccgtcgggcgcatcctcaagggcgaggtccaactcctcgcgaaggctcatgcgcgcgatctcgtcgatcttcacgagaaacgacttcgcccgcttggcgaacagcagataggcgaccgccgtttcggcgctatcgataccgccgcactccacaagcgagggaacggaatgcgccgacagagaaatgtcggcatgccgccgcagcttccccatctcgcggcgcgcgttcccgtgcagccagatgaccggcgcgtcgttgccgtcaccggtgaggttctcttcgatcatcttcgaagcgttctgaatcatcttgtcgttcatggtggtgtcctttcatccgattgaatgatccgtgaacagccgaatacgcgcgcagtttccaaggcagcaaaagaccgccgcgctgacctccttcctgaaaatgagcgcacgagtctaagggttatgaagttgtgagtggaaaatgccggcagagatgccgagggaaagttgcgagcgatattcagttgtccatcgcccaactatcgcgctggcgaggcgcccctcaaaaaagaaaacgacacacgaatacgagggcccgcgtgcctaacggaacttagagtagccgatttaaagcaggagcgcaaggtattgctttgtgacggcactggccacctattaactaattgaggtggttgaggtttgagtttatgacattgtccctcattttgaaggagcatcttaattcatctagttggttcaagacatctgccgccgttgggcagttcgctactctctacgccctggatacgccggtcagtaggctgacgatggcgagcgatatggatctggcgtgctggaacagggcgattgccaccacttagtccgacatcatagtgcattctcccgttggaggctctatgtcatattgtctgtgatgcggcagtcgtaggtttgcatgacagcattcagcgtaccgtctaactcgcgatgtggcagccggatgctgctccgcgctaagcgccagataggttctaggtgcggggaatacgtcgggtcgacaatgagcggctgagaaggcgaatgagcactggagaacgttatgcgctatgctaggtgtcgggcgtatgccctggcatgtgaggggcaatgacaagaaagaggagcaatgaacttcgaggaagccgcgaataaggcgttggcattcagggatgagagagattgggcccagtttcacaaccccaaagacattgcgatatccgtaaacctagaggcggccgagctgctagaggtgtttcaatggtccggcgccgatctggtagttgccgcaaaggccgataaggcgaagaaggagatggcagacgttgtcatctactgcatttaccttgcagacactttgggcgtggacctggcggatgctatcagtagtaaaattgacgaaaacgcaaggaagtacccggcagataaggcgcggggcaacgcgagaaagtacaccgagctgtgatagccattcagacaaccgcatcggccgaggttcctacgggttcacctttcatcatcgacagatgcccgtttcgcttcggcgagcagatagacctcgcggttcttgatctggccgaggacaagatcctcaactggcctatggtgtacattttggcaaacagggattccgcgtacgtcggacagaccacgagcgtggcgacgcgcatgagtcagcacggagcgagcgaggagaagcgcgacttcgagatcgtcaacatcatcttcaacgaggagttcaacgcctcggttgtcacggactacgagcaccgtctcatcggctacatgcatgccgacggtcgctacaggctcaccaacaaaaacgacggcatgaccgacacgaactacttcagcaaggccgcatattcggccatgttcgaggatctttgggaagagcttcgtaggctcgagctagcagatcacaccattgcgcagatcgaggaatcggaagtcttcaagtactccccattcaagggtcttaccgccgaccagcgcgtggccctggataagatattaggtgccattgatgctgggctagacaagtcggagcccatcgtggtcgagggcatgcccggcacaggaaagacggtgctcgccatctatctgctcaagacgctgcgtgatgatccgcactacaaggacatgaatattcgcatagtcgagccagttacgtccttgcgcaatacgcttcgcaagtcgctggcaaacgtcagcgggctcgatccctccgacatcatcgcgccgaccgacttggtcaaggccgccatggggtatcagccgggaaaggggaagtgcttcgacatcctgctggtggacgagtcacacaagctgaagcgccgtgtgaacctgggcacccagttcaagaactacgacgacgtgaacagagagttggggctcccggagcaggctacccagatggattggattctcaagctggtgaagctccccatcttcttctacgacccgcttcagagcatcggcccatcttgcctcgggcgggacgccatgaagcgggcgcttggcaaggcggccgacaaccccatcaagctcgaaagccaaatgagggtgagaggcggggacgtctatctcaggtacattcaggatgtgcttgacgggacccaagacgattgtcgaaccttcgaaggatacgacttcgttctccatgatgacttctcggactttgtcgattgctttgagcgcgactaccgggagcacaacctcagcagaatggtcgcaggctatgcttggagatggcagtctaagaaggatgtcgctgtgagcgacatcgtcatcgacggcatagggctgaaatggaactgcacgtacgacaactgggtgggccggggcgtcgatgatcccgccgtcgctcacgaggtgggatgcatccactccattcagggctacgacctcagctatgcgtacgttgtcgtcggcggggatctcatcttgggtgacgacggtgtgcctgaatcgaacaaggccagctactacgaccgcaacggcttcgcgacggcctcgaaggaggagcttgatcgctacatcaagaacatttactacgtgctgctaactcgcggaatcctaggtacgcatgtgtatgtgcaggatccgaagttgagggagtacttctcgcaatacttctctcgagctgtctaagctggatgctgccacagctttcagtgttccatagggaatcacgaagaacgagcagcaattggaggaattgatgcgccatagaagcttggttctattttgcgaggaggccggctgtggccaccatcgacgttgatgcgctgcgcgagtacctgcgcgactattacggcacggccatgctggccggcctttggccggccgtggccgatttgggagagctggacgctctcgatggccgcgagctgtgcgagcgcgccgaggcgatgggcatcgacctgcagcggttcgtcgtaggctagtccagtcgggggatttcccggtaggcgctggcggagggctagcggctggcggcctccggcggaactcgccattcattgcgaggtgttttgtgctgttcggaaagagcgtctctgctataatgtatgacatgtcataccaaaggaggtagccatggacgctgtgcttacggttcggctggatcccgctatcaaatcgcagggctctgccgttatggaacggctcggcaccacgccctcgaaagcggtgcgggagctgttcgatttcgctgtgcgcaacgacgcgcttcccttcggcgatgcgcatgctccgtctggtgaggaaatcgctcggcgcatcgccgccttcgaccgctgccatacgaaaaagcccctcgcgctcaccgatgacgagctgcgggacgagcgcctgaggagccgctatggatttgatgcttgacaccaacatcgtcctggatcacatcggtcggcgcgaaccgttctacgagctctcgcggcgcacctgcctgctcggtatcgtcggcgaggcacgcaccttcgtctcggcaagcatggtcaccgacctcttctacctgctgcgcaaggatttcggcagctgcgaggcgcagcgcatgatcgaggaggatctgtccttcctgcaggtcgtgggggtctcgcccgaagatgtggcagcggccttggctcagaagtggaacgatttcgaggactgcctcgtcgcccgatgcgccaaaaaggcgggggccgattacatcgtcacacgcaatgtgaaggatttcgagcgctcctccgtgaaggccattacgccgcagcagcttttcgacgagctggacgcccgcggcgtcgtctatcgggagattccctggatggaatagccccttgcaagggtctggagacgtgcggaaaatgcgccgctgtcgggtgctcgggcacgggggcggcggcttcgtatacaatgggtggtgaccgataccttatctattgaggaagcgtgcacttccatgactgaatctgctgaattgagcgccgtgcccttctcggccgtcgccgtcatagggctcgggctcatcggggcgtcgctggccggggcgctcgcggccaagatgcccggtgtccgcgtcttcggggtggacaccgacgccgccacttgcgctgccgccaccgatcgcggctggtgcgcggcggcctcaggccccgacgaccctgctttccgctccttcatcgagaacgattgcgagctcgtggttatcgccactcccgtggccgccgtggacgactacctcgcccgcctgcgcgactggggctacaccggcgttgtcaccgacaccatctccaccaaagggcacatcctcgccgcggccgccgagcttctgcccgcgcccgaacgctatgtgccgggacaccccatggccggctccgagcagagcggcatcgccggcgcacgcgccgatctgttcgaaggcgcgaactggatcctctgccccgacggggctaccgtgcccgaggacttccagcatctgcacgagctggtgaccggcttggatgcccgcgtggtgtcgctgcgccgcgaggagcacgacgccgccgtggccgtggtgagccatgtgccgcacatggtggcctcctccctcatgcagctggcgagcgcgcacgccgacgataccggctccatcatgcggctggccgccggcggtttcaaggacaccacccgcatcgccgcgggcagcccgaagctgtggtgcggcatcgccttcgacaacgccgacgccctaaaaagcggcctcgacgagatggccggcatcctgggctccttcgccgccgcgctggaatccggcgaccgcgagacgttcacgcgcctgctcgccgaggccgccgatgcccgccgggcgctgcccgccgcctgggtgccctccaccgagaagcttctggaggtgcgcatccccatggtgaatcgcaccggcgtcgtcgcggaggtctgcaccattgccagctcggtgggttgcaatatacaatctattgacatcgaccatatcagcgagggcaacgccgtgctctccctcatcctcaccgacgagggcgatatcggccagctttcgatgcagctgattaacgccggtttctccgtatcgttcagtccgctcatgccgaaggagtacgctcatgtcgaatagcgaagccgcagaaccctacacgatcatcgagccgctcggcggcccgcttgcgggcgacgtctccgtgccgggcgacaagtccatctcgcaccgcgcagttctgttttcggccatggctgcgggcacttcgcaccttacgggcgtgctcgactccgaggacgtgcgcgcctccatccgcgccgtggaggccctgggcgccgtcgtgtcgctcgaccgccaggctgacggcacgctgaccggcacggtgaccggctggggcgccgaagggcccagccagcccgacgcccccatcgattgcggcaattccggcaccaccgcgcgcctgctcatgggcatcgtggccccctgggacatcaaagtgaccattaccggcgacgagtcgctcaagaagcgccccatgcgccgcatcgtggcgcctctggcgaagatgggcgtcgatttcgtgcccgagacgcccgagacgctgcctatcaccgtctgcggcaatcgcgccctgcgcgccatcgactacgcgagccccatggcctcggcccagctgaagaccgccgtgcttctggccggcgtcttcgccgacggcaccaccacggtgaccgagccggcgccctcgcgcaaccataccgagctcatgctgccggaattcaacgtgcccaccacggccggcacccgcgtggccaccgtgaccggccccgccgagatgctcgcctccgacgtcgtcgtgccgggcgatccctcctcggccgctttcgtggccgcggccgcgctgctcaagcccggcagctccgtcatcatccagaatgtgtcgctgaacccggcccgtatcgggttcgtgcgcacgttggagcgcatgggggccgacatccgcgaatcctacggcggacatgagggcaaggagccccgcggcaccattacggtgaacttcacgcccgtgctgcgcggctgcgaggttccctcccagcacatcgcgtcggttatcgacgagattcccgtgctcgcgctcgtggcggcccacgcccgcggcatcacggtgttccacgaagtgggggagctgcgcgtgaaagagtccgaccgtcttgccgccatcatcgacggcctggcgctccttggcgtggacgcttgggaagagggcgatgacctgttcgtggagggcaacccgcagctgcaggtgcccgagggcctcgtcttcgaatcccacggcgaccaccgtttggccatgacctgggcgcttgtgggcgcctgcgggcgcattcccgtctcggtgactgatttcacgtgcgtggccgtgagctaccccgattttcttgctgacttgaaggagctggtgaaataatgatcgtcgccatcgacgggccctccggggccggcaagtccaccgtggccaaggccgtggccaaagaactcggcttctcctgcctggacacgggggccatgtaccgcgccatcgcctggcgcgccctgcaagacggcgtcgcgctcgacgacgagccggccttgggagctatcgcccgcacctacgacatcgccttcgggcatgtggagggcgacccggtgccgcgccgcgtgttcatcggcgacgatgaggtgaccgatgccatccgcaccgccgagatcgaccgcgcggtgagcccggtgtccgccgcgcccgccgtgcgcgaggcgctgctcgaccagcagcgccgcatcggcaacgccggcgactacgtggtggagggccgcgacatcggcaccgtggtgttccccgatgcggccgtgaaggtgttcctcacggcctccgacgaggagcgcgcccatcgccgcgtgcgccagaacgtcgaccgcggcatcggatcgatcgactacgacgaggtgctggccgacctgcgccgccgcgatgaggccgactcctcccgcgccacggcgcccttgcgccccgccgacgacgccgtgcacatcgactccactagtcactacatcgaagaggtaatcgaccagatctgttcgctagcccgagaggcgcgctgatgtttctaaaatactccgagatgtgggacatggatttgggcggcgagcccagcgaaaacgagatcccgcactggttcggcaacgcggcctacgtggtggtgggcggcctgtgcaagctgctgttccgctaccgggtggacaaccgcgacaagctgcgcgccttccaaggcgcggaaggggcgctcgtcatctgcaaccacacgtcgttcttcgacgtcgtcttcatgtacctggccgcgcgcccgaagcaatgggtgcgcctcatgggccgcgacagcctcttcgacaacgcccacggcctgctcggccaggcgctctcgcgggtgggcgccttccccgtgaagcgcgacacggccgacatgacctccatcaagcgcgccgtgcgcatgctcaagcgccgggagctcgtgggcatcctgcccgagggcacgcgccgcggcaagaccgaccgggtgccctccatccacgccggcgtgtcggtaatcgcccgcatggcgaaggtgcccatcctgcccatgaccgtgcgcggcgtggagcgcatcaagcagaagggccagcgtgtccatttcccgaaggtgaccgtcgactacggcgatcccattctcgttggcgatttcgacttcctgccgaaggacgagcgcgtggaagcctgcacctggtacgccatgcgcgagtgcttcgcgctgtactaccgctgcgctcccgaggacgtggacatggcggcgttgttccccgagacacgcgactacgccccggtgttcgctgagcatcccatcccgcgccacacgagcgaggagctggcccgcgccgcccgcaccgctcgcgccgagaaagccgccaaggccgccgcgaaagcgaaggagagctagccgtggaagtgattcgcgcgaaacgggccggagcctgctacggggtgcagcgggcgctggatatggccgacgaggtcattgccgatggtgggcgggcctacacgctcgggccgctcattcacaacccgcaggtggtggccgatctggccgctcgcggcgccgaggccgtcgattccgtggaggagatccgctgggaaggtgccgcagctgcgggtgcgcctgcagacggagtcgtcccgacgaatgcaaacgcgccgtcggtggtcatccgctcccacggggtgacgccccaggtgctggccgccgtggaagaccgcgggttttccgtggtcgatgccacctgcccccatgtgtcccgggcccagcacgccgccgcggagctcgcggccgagggttgccgcgtcatcgtggtgggtgaggcggggcacccggaggtggaggggctcaccgcctgggccgaggaagccggcggcaaggtggacgtggtggccgcgcccgaggagatccccgagggcctgtacgatccggtgggcgtggtggcccagacaacccagcgccgagagaacttggaggcggtggtggccgccctgcgcgaggcggggcttgagcccatcgtgaagaacaccatctgctcggccacgcgccagcgccaggaggccgcggccgatctggcctcggccgtggacgccatggtggtcatcggcggccgaaactcgtcgaacaccacgcggctggccgaggtgtgcgcgctcacctgcccgcgcaccttccacatcgaatcggccgacgagctggatccggccgcctttgccggttgccgccgcgtgggtgtcacggccggcgcgagcacccccgagaaccagatcgccgccgtggaagcgtttctgcgcacgctgtagccatggcaacctatcccggaaaagacatcgagcgcgaggcctcctgtgcctcttgcgtcgcctgcgaccaggcgagtctcacggctgccgaggcggcggctgcggcgtgggaggggccggcggcgcgtatcgtcgccgtggagccggagagccccgccgatgacgccggctttacgcccggctgctacctcacgacggtggacggcgagcctctgcgcgacatcatcgactggcgttggcttgcggccgacgacgtcatctgcgtgggctatatcgatctcgacggcgaggccggggaggtggaactggagcgggagccgggggagcggtggggcttcgagttcgacggcgtgctgttcgactccgtgaagctgtgccgcaacgcctgcgtgttctgcttcatgcgccagctgcccgacggcgtgcgcccctcgctggtgctgcgcgacgacgacttccgtctgagttttctgtcgggcaccttcgtcacgctcacgaacctgaagccggaggacgaggctcgcatcatcgagcagcgcatcagccccctgcgggtgagcctgcacgcgagcgagccggagcttcgccgccgcatgatcggcaagcacgccgcccacggccttgaggccctcgaccgcctgctggcggccggcatcgaggctcacgcccaaatcgtgctcatgcccggcgtgaacgacggcgacgccctgcgcgagacgttggaatgggcctgggagcgccccggcataaacggcgtgggcatcgtgcctttgggcttcaccaagcaccagacgtccctgcgcgagagcttcaccacccccgaggccgcccgcggcgtcatcgatgtgattgcccccttccaacagcgcgcccgggccgagcgggggacgccctgggtcttcgccgccgacgagttctacgtgaacgccttcggcgccgccacgccggcccacatcccgccggcctccgactacggcgactacgacatgttcgaggacggcatcggcatcgtccgctcctatgtggacgagttcgaagaggtctgcgaaaacggcctggctgcccgcgccgccgaggccctggccgcccgcaacctcacggcccgctatatcgtcggcgaggccatgcagcccttcctggacgccatgatcgcgaacagccccctggccggccgtctcgttccccttacggtgagaaacgactacttcggcggcaacgtcaacgtcaccggcctcctcaccgcccaagacatcgcccccgccatcaaggccgccagcgaggaagagaagaactcaaccatggttgagcagggggcagacgcgcggtgctctgaccgagcgagttccgcagatggtatcgaaggcgcaacgagaaggggagtgaatagccctgatgccttcgataccagcgaggactgtctgagcgaatcagagtaccgcgcgtctgcccccggagggacccgtcagctctttctccttccgagcgtcatcttcaacgacaacggcgtgacactcgatgacatgaccgtgcaggatatcgaaaacgcggcaggtgcttcggtgtccgtggtatcctgtaacccttgcgattatctgcctgagatcatcaagctcgcccaagacgagccgtaaagaatagcgaggataaccatggcccttcccatcgtcgccatcgtgggccgcccgaatgtgggcaagtccaccttggtcaaccgcatcgcccaaaccggcgatgccatcgtgcacgagatgcgcggcgtcacccgtgaccgcagctaccacaaggccgactggaacggcgtcgagttcatgctcatcgacaccggcggcatcgagatgggcggcgacgacgccttccagggctccatccgcgcccaggccttcgagggggcgcgcgaggccgacgtcatcatcttcctcgtggacggcaaggccggcatcaacaccgatgacgaggaagtggcccgcatcctgcagaaggcgggcaagccggtgttcgtcgccgtgaacaagatggacaacccggcccgcatggatgaagtgtgggaattttacgcactgggtctgggcgacccgtggccggtgagcgcccagcacggcaacggcacgggcgacttgctggacgaggtcgtgaacgagctgcggaaggtagagatcgttccggaagaggaggtcgaggccatcaacgtggccatcatcggccgcccgaacgcggggaaaagctcgctcaccaacaagctcaccaacaacaaccgctccatcgtgtccgacgtggccggcaccacccgcgacgccatcgacaccctggtagagcacgaggggcagatgtaccgcatcgtggacacggcgggcctgcgccgcaagagccagatcgacgaggacgtggagtactacggcttcgtgcgggccatgcgcgccatcgatcgcgccgacgtggccctgctcgtcatcgacggcaccctgggcctcaccaacgaggaccagcgcgtggccgggtacgccgccgagcgcgggtgcgctatggtcatcgtgctgaacaagtgggacatcgtggagggccccgaggagaaggcgaagatccgcgagcgcatcgaggaccgcatgacgttcgtgggctacgcgccggtggtggccatctccgcgctcaccggcaagcgcgtcgaccgcatctggaacgccatcgacgatgtgtacgccaactacagccgcaccatccccacggcccgtttgaacacgtggctcgccggcatccgcgagacggggcacaccgtgtcgaagggcaaggcggtgctgcgcatgaagtacctcacccagaccggtacctgcccgccccacttcaccttcttcgtgaatcgccccgatgtcgtggacgacaactacgagcgttatcttgagaaccgcatgcgcgaggccttcccgcttgagggcactcccatccgcctcaagttcaagaagaaggactagcccgtggacaccgtcatcacgtatctgaccctgtcgttcatcgtctcgtttttgctgggctccatcccctggggcgtcatcgtctcgaagctggcctttcacaaggacatccgcgacgagggatcgggcaacatcggcaccaccaacgccttccgcgccatggggaaggtcgggggcgcgctcgtgttcgtgctcgatttcgggaaagggcttttgtccggctggctcgcggcctttgtgttcgccccggccatagccgcggtgccggtggacgccgccactcccgacggccagctgcttctcggcatcttcggcaatccggctttgaatccggtgggcctcgctttggccgtcgctttcgcgggctgcacgctcggccacatcttcagcccctggctcaagttcaaaggcggtaagggcatcgcagtggccgctgcctgcctgtggttcgtgttcggtccggtgggttttttcatcgagatcgccgcgttcgccctcggcatcgccgtcacccgctgcgtgtccgtgggctccatcgccgcggcggctatctgcccgctgctcgccctgtacttctactggggccagtgggtaccttggctcatcatcgctgccacggcctgcgtcgtcatctgggcccaccgcgccaacatcgcccgcctgcgcgcgggcacggagaacaagatcgggagcaagaagacagcctaagcatcaaccatggttgagtgaagcggaaacgtcgggtgccttgaccgagcgagttccgcagatggtatcgaaggcgcagcgataaggggagaaaacgatcttattgccttcgataccatcgaggactgtttgagcgaatcaaggtacccggcggttccgctccgggggagcttcaaccaagagagaggatcgatatgcgcgtagcagtgataggagctggcagctggggaacggcgctggcactcgtgctggcggaagcggggcacgaggtggtgctctgggcccgcacgcctgaggtggcccgcgccatcaacgaggagcaccgcaaccctcggtacctctcggactaccgccttccttccgccatccgcgccaccgccgagtacgcggctgcctgcgacggcgccgaggccgtggtcatcgtgacgccctcggccgccctgcgctcggtggccgccgacctgcgaaaactcgtcgcgcctgcgacccccattgtcatctgctcgaagggcgtggaggagaagacgggccttctgcctatcgataccttcgccgctgagctggggaacgcgggccgtatggcggtgctgtcgggcccgactcacgccgaggaggtcatctgccgcaaaccgtcggccgcggtggtggcctcggccgacgaagggacggcgctcttcttccgcgatctgttcgccacgcgatttttccgcacttacacctccgacgacccggtgggcgtggagctgtgcgccgcattcaagaacgtcattgccattgccgtgggcatctcctacggcatgggcttcggcgacaacaccgcggccatgctcatcacccgcgggctcgccgagatgagccgcatggtggtggcggccgggggagaggcgctcacctgcatggggctgggaggtgccggcgacatggtggtcacctgcatgtcgcagcactcgcgcaaccgccgtttcggcgagcagtacgtggcccgcgggcttaccctggacgatttcacggcccagacccacatggtggtggaaggggccatcgcctgcaagaccctggccacgctcgaggcccgctacggggtcgatttgcccctcaccgacacggtgcgcagcgtcgtgtgggaaggggtgaacccgcgcgaggccgcggccgccctcatcgatcggccgcttaagagcgagttctactagtaagctcgttccagctgtccagcccgagcttcgtaaaatacgagcgattgccttaagatttcgccaggtaaacggggcgcatacatggtcgcaaccgtcgggccttcccgcttctgtgaggacgggaaggccttattgttgtcatcagccgagcggaagggcggaaatccgggcaaccgggcgcccgtaccgcgaggtccttgacaaccaattcgagctttccgtcgcaccgtctcctgcgtgaaccctcctctctcctctctcaaaaccctcgcggcggaaacgatttccatgcgcacgttatccccttctcctccgtgcgtactgagcaaagctcctccggttcccctgccggaggagctttttatttgcaggtcatctgcgaaaggggctccggaggtcgtctgccgcttgcggttttcgcgtcaataccgtaacgttagcagaacgtctcgaacggaggtaattgtggaaggcaacggcgaaaagaagacgtacatccgctggatcgtcgcggttgttctcatcttcgcgctcatgggggcctcgatctacggagtggcgaaaaagacctatgacgacatgtcggacgcggccatccagaatctcaacgagaacctcaacctcatgcggaacaccgtcgaggccatcatgcgcagcgaggccgagttccagcagctcgtcgccgaggagatcgccgcggcgcccgacccctcgtcctacgtcctgaacctcaggaacaacgataccacctcgaagctgtccgtcgtgctcgcgggcgaggaggccggcgcctcgaacgacggcgagtcctttttccccgagcagctcgacttctccgccggcggcgcgatcgcgggcctgcccgtgtcgcagtcctacgtcaacgatgcgggcacgtgggcctacaccatcgcctgtcccatagcgcgcgagggcgaggatgtcggcacgctgtacgccgagtacacctacgaggccatcgaccggtcgctgccggtgggcttctacgacaagcaggccgtgctctacctcatggacgcggccacggagcgcttcgtgctgcagcccgagggcatgggcgagcgtgacgcggggcacttgaacctggaggacttctaccgggccaacaacgtggtggacgctcagacgctggagctggtggagggcggcatcgccgagaagacgtcggtcatgttctcgcaccaggtgaaggggcgcgactcgctgtgctacctgtggccggtcaacgacgggaccgcgtactcggtgggctacgtgcccgcctcggccatccagcgggaggcgcaggcggtcaacgtggccctggggctcgtcatcgccatctccgccgcggccttcgtgctctgcctggccatctacgcctaccaccaccggcgccagctcgagacccagcgcgcccgcgccgccgagcgcgccctgcacaacgagcagctgacgcgcgccctgcaggcggcccaggcggccaacgagtcgaagtcggccttcctcgccaacatgagccacgacatccgcacgcccatgaacgccgtgctcggcttcaccaccattatctccaaggaggccgacgatcccgcgaaggtgcgcgactgcgcgagcaagatcatggcctcgggtcgccatctgctcgatctgatcaacgacgtgctcgacatctcgaagatagagagcggcaaggcgacgctgaacctgaccgagttcgatctgggcgactcgctcgttgccatcgagtccatcatcgcccctatggcccgcgacaagcaccaggccttccacaccgagatcgtcaacgtggaccacgagcgggtcatcggcgacgagacccatatcaaccagatcctcatcaacctcctctccaacgccgtgaagtacacgccggagggcggcgacatctggcttcgcttcatcgggctctcgcagcactcgagccagttcgagcgcatccgcatcgaggtggaggacaacggctacggcatgacgccggagtttttggagaccatcttcgactccttcacccgcgccgagaacagcacgaccaacaaggtgcagggcacggggctgggcatgtccatcaccaagagcctcgtcgagctgatgggcggcaccatcgaggccgagagcgtcgagggggaggggtcgctgttccgcgtcgatttggagctgcgcatccccgaggagcaggcccgcggcttcttctggagccagcagggcatcaaatcgatgctcgtggtggatcgatcggcggcggggcaaaagatcgcgcaggcgcagatggagggcacgggcgtgcgcgtcgacgtcgcggcgaatcgcgccgagggcatggagctggcgcgccgcgccgcgagcgagggcggctaccaggcgatcatcctgtgctgcggcacgctgggagaggcgtgcgcgggggccgccgaggagcttcgcgccgccgcggccgccgagggccagggcgcggccggccccgtgccggtcattttcgtgccggatcatcatttcgacagggaggagggcattcctttgcccccttgctccggtgtccttgtgcggccgtttttcgcgtccacgctgcagcacaagatcgaggacatcgtcggcaccggcagggccgccgaggtcgcggcctacgacaaggtgctcgagggcaagcgctttttggccgccgaggacaacttcctgaatgccggcatcctgaccgagcttctcgagctcgagggcgccacggttgagatcgtggagaacggccagctggcggtggagcgcttcgagcaagcgtcccccggcgagtttgacgccatcctcatggacgtgcagatgtcggtgatgaacgggcacgcggccgcgcgcgccatccgcgccctcgaccgcgccgatgcccgcacgatacctatcatagccatgaccgcggacgccttcgtcgaggacgagaaggcggcgctggccgccggcatgaacgcccatgtggcgaagcctttggaaatcgacgacctcaagcgcgccgttgatcggcatgttgagaaaggacgagcatgatgcatcttaagaaacgcggccttgcccgcgccgcccttgtcgccctcgccgctttggcgctctgcgcgctcgttgcgtgcgctcaagaggagggcgtgaacttggccgtgcaggacgagggtgcctcggtggtgagggtgaacttcttcggccccatggagaaggccaatcccgatgccgagaacaccgcccggacggcgagcgacctgaccatcgctatggccgaggagcggctcggggtcacggtggcctaccgcacctacaccgccgaggactaccaggagaaaacctacgacgaggtgtgcctcgagcgggcgcgcagcaacaaggacgatttgtacctgctgaacaccgacgccatcgtggccctcggctcggaggggcacctggccgatctttcggggctttcctgcgcgcagaacctgcgggaggtggtgcgcgtggccaacaccgtggacggcaagctggtggccattccccaggaggtggtggcctacggcctgttcgtgaacaaggacatcttcgatgcgtgcgagctttcgctgccgagcacgcccgaggagtttctggagtgctgccgggtgctgaaggagaagggctacgatacgtctgtcggcgccaatcgctggtggctggagaccttcgtgttcgcccaggcctatgccgacctgtacaacggtggggacacggccgccgagattgaggccctcaatgcggggcgggcccgctacagcgactacttgcgccccggcttcgagttcctgcagacgctgattgacgcgggctacatcgatgcggaaaacgcgctggtgagcgaggccttcgagggggtcggcgagggcgccgacttcatggcgggggactgccccatcgtcatggcctactggggcgcggccaacaccgacaccgcctacgggagccccgatttcaatatggaggtcatcggttttccgaccgagcgcgggcagatgcccgtgctctcgatgaccggttacgccgtgggggagggctctgcgggacgcgacgaggccctcaaggtgatggacgtcatctgctcggacgaggcgatgcagctgtacgccgagactaaccgcgtcgtctcgccctcgaagaacgtcgaggtcgattgcgtcgagccgctgcgtcccttgaacgagctggtgcaggccgacacctacgtgctcgcctcgaatgcgggcatggatgttgagcagtggggcaatgtgtgccttatcgtgcgcgaccttctgggcggcgcgacggttgacgagtgcatggcgaagctggacgagctgcaggacgccgcctagagcgttcgatctgtccgccccggcgcatacgagcgctacttttgcggtgcttgctcgatcttgagaagggcggcgttgatgtcgctggtgggcttgccggtggcggtgacgatgcggtgggttggtacgagcaggggagtggggcaggcgcgcagggcggcgccgacggagcggaaggagccggggcgccccagcgtttcggcgagggcgcgggccgtggtcgtgtgcccgtaggggatgttcgccgcggccttccatacctcctgctggaaggcgctgccctcggggcgcatgggaacggtgaacgccgagcgctggccggcgaggtaggccatgatctggttggcggcctcggtggtgagcgccgtgggctgccggtcgccggggaggttctgctcgccgaagctgacggcggttacggcggtaccgtcggcggcgatggtgacgggcccgaacttcgtcggataggtgaagaaggtgctgcgagtcgtgctgggcatgggtgtcctcgctctcgtcggaaggcgtcggcgccccatcggggcgcgggcgcatctgcggggccggccgtgggcgccgggccgctccgtgcaggtttgccgctgatggtcattataggccgtcggggcctcgccgtcgcggtagaatgtcgccatcggaaagccgcgagatgaggatgcgtcctatgtaccaacctgtgaaaatcgccccttcaatcctgtccgccgatttcatgaacctcgggcgggacattcgcatgatcgaggagggcggcgccgccttcgtccacatcgacgtcatggacggccacttcgtgccgaacctcaccatgggcgtgccgctcttgaagcagctcaagcccgccacgaaccttctgtgcgacgtgcatctcatgatcgacaacccgctggacgagctgccatggttcatcgacgccggcgccgaccttttgaacgtgcacgtggaggcgctggacgaagccgaccttaagcgggccgtggcccagattcacgaggcgggccttctggcagcggcggccttaaagcccaagacgcccgcgagcgcgctttcgccggtcatcgccgagcttgacatggcgctcgtcatgtcggtggagccgggcttctccggtcaaagttacatcgcgggatccgatttgaaggtggccgaggtggtgcagatggcgcgggcggccggcaacgaggagctgctcatccaggtggacggcggcatcgggctggccacggcgcctttggtggctgctgccggggccgatgtgctcgtctgcggcaacgccgtgttcaaggccgacgacccgcgggctgccataggcgccgtgaaagacgcggccgatgaggcccgcgagaatgccttggcccgcggccaatggaattgggaagaagaaggagcgcgatgagcaacactgcggaaaaccttgcggccgtcgagcgcgagttggcggccgatgtggccatggccgaggggcgcgccgatgccgaggacgccaccctgcccgagtcggcggcggacttcacctacctggactacgccgccaccgcccccttgtgcgccgaggcggccagcgccatggcgcccttccaggtgcccggtccggccaacctcgccgtgaacgccaacgccaacgccctgtacggggtggggcgcgccgctttcgaccttctggaaagcgcccggcgccgcgcggcccgggccctgggcgcccggcgccccgatgagatcgtcttcacctccggcgccaccgaggccgacgacgcggccatcctcggcctcgtgcaggcggcggccgagcagcggcgcctcggcggccagaaggatcgcgccctgcacgtcgtcacctccgccatcgagcacgacgccgtgctcgcgccatgccgccgtctggaggccgagggcgtgcgcgtcacctacctgcgccccaaccgccagggcttcatcgaggccgcctcgctcgccaaggcgctcaccgatgacacggtgctcgtctcggtgcaggcggccaactccgaggtgggcgccatccagcccatccgcgagctggcagcgctggcccacgagcgtggcgccctcttccacaccgatgccgtgcaggcgctgggcaagatgcctctgaacctccaggagctggacgtggacgcggcctccttctcggctcacaagatcggcggccccaagggcgtcggcgccctgtacctgaaggcccgcactcccttctccccgtaccttttgggcggcggtcaggaatccggtcgccgcagcggcacccagaacgtcgccggcatcaccggcttcgtcgctgccctggaggcggcccaggaggccgagccggaggagtccgcccgcctgcgcgccctgcgcgaccgcctctacgcggccatagccgccaccgacggcatccagcccacggtggaggtggatgcgggcagccgcgacttcctccccaacatcgtccacggcctggccgacgagtgggagagcgagaccatggtgctgcgcttcgaccagctcggcatctgcgtcgccggcggcagcgcctgctccagccactccctggagccgagccacgtcttgcgcgccatgggcatcaccggcgatacatcctacaacgccctgcgcatctccatgggaagatacaccaccgaggccgacatagcggccttcgagaaggcattaaagaaggtactaaactggtaagacattcgtattcgtaagagcagcgtgtggggtgggggcggtggtgccgcatctgagtgagtgcagcggtcgaggaggcggaggtggtgccgcgcgcagttcattgaagtgcatttggcaatgctagaaccctcagtgagccctgcacttcaatgctgtttgagcacggcacttcctccgcctcctcgaccgcggacagatagcataagccattcagatacggcgcttccgcccccagtccacacgtggacaaggagaacaattaagtggaactcgtaaacacccattgccattgcgtctattccggccacggcatcggaagtatcgccgagtacgccgacgccgccgcggccgccggcctgaccaccctcgccttcaccgagcacttcccgctctctgaggccttcgaccccgacgagtacctctccatgaggccgccgatggtcgatgcctacctggccgagatcgacgaggcccgcgcccggcacccgcagatcgagttcgtcaccggcaccgagatggactacctcggcgccttggaggaccgccagctcaccgaggacgctctggcccccttccgcttccgtctgttgtcggtgcacttcatcgacggctgggccttcgacgaccccgaccagaaggcccgctggacggagcccggcgcaccggatgccatctggcgccgctacggcgagctgtggtgcgaggcggcttcgaatgcgagccttccctacgacgccatgagccatcctgacttagcgaagaagttcggctactatccgagcttcaacttggagcgcctctacgatgagatggccgaggcggcgcgcgccggcggccgcatggtggaggtgaacacgtcgggcgcctactacgcctgcgccgagatgttccccgccccggggctgctcgccgctttctgccgtgccggcgtgccctgcacggtgggctgcgattcccacgatccggtcaacgtggcccgggacatcgagcgcgcctacgggctcatgtacgaggcgggctacagaagcgttaccgtcccgacagccacaggcgaccgccgaagcattaccatcgaatagggtgcgtccgcgatagggcgcgccgattccgttccaagaaagaagctgatcatatgggattgttcaacaaggccgacaaggccagcactgaggctctttccaagcggggcgagtcccatctcgcgccgcgtacgttcaacatgaccatcggcggcctggagaaggcgctgctgaaggagttcccggccgaggatgccgagaagtgggaccgcaccgggcttctggtgggggagcgctcgctgcccgtgacccgggtggccgtggccctggacgccacgccggctgccgtggccgcggctgccgaggctggggccaacgtgcttctcacccatcatccggcgtttctcgaggcccccgacggcttcgcgcccgaggcgagcgccctggaaagcccgggcgccgtggtgtgggccgccatctgcaaccaggtggcgctcatggatttccacacggcgctcgatgtgagcccggcggcggcccgggtgctgcccggtatgctggggctcaagttcaccctgcgtttcgccgagcccttggagggttcgcggcgcaagggctacgggcagatctgcgaggtgcccgacaacgacggcgagcccgagaccttggcgcgcctggcggctcgctgcatggcggtcttcgggcgcgcgccgcgggtatggggcgcgcccgacgctgcggtgcgccgggtcgtcacggccacgggctcggcgggaagccttgcgccggcgctcgtcgcggccggggtggacgccgtcgtctgcggcgagatgaagtaccataccgcgctggagctggcggcggcgcacgtggccgtcatcgagctcggccacgatgtgagcgagctgcccttggtggccgtgctggccgaggcgctggcccgcgccggcgtccccgccgaggcggtgacgctcgtcgatcagtccgagaactggtggacgccggaggccgtccgcgtctagttgcgtaattttctccattgcccctgcccaagatctgggttttcgcctattattgtcagggagaaaacagagatcgaaagtgaggttccatggaggctacgcgcgacgatatcgaaggtctgttcgaactgcagcgcatcgatctcgagatcaagcgcctgagcaaagaacttgacgagctgccccagcgcggcatcatcgtggccgcccgcgataagaagaccgccatcgaggccaaatccgagcaggtggccgagctcaagcgcgccactacgaagaagatcacccgcatcgacgacgaggacgcgtcgctcgccaagaaagaggccggcgtccaggccgccatcgacgcggcccacggcgacttccgcaacgtggaggcccgcaccaaggagctggccggcatcgttcgccgccgcgccaccattgccgaggaccgcgccgcagcggccgccgagctggacaagatcagcgccatggaggcccagatctcgctcgccctcgaggagatcggcgccaaggagcaggaggccatcgactcgttccagaagcaggggggcgacctcaagctcgccatcgccaagctggaggcggcccgcggccaggtggagacgaaggtctccctgcagcttttggacgtctacaaccgcacggcggctcgctccggtgtggccatcggcgtgctcgacggcaaccgctgcggcgcctgccgcacggtcatcgacggaggccgtctcatcgatctgcgcaaccaggcaccgctgggtatgtgcccctcgtgcaagcgtttgctggtgatcgcataatttctgttgccctctcgccgcgcgctgtgctatagttgacgagctgtgtccaaaacgaaacaacaagcactacggagttgatatcaatgtcgaaggtttgcgaagtttgcggtaagcatccggttgccggtcgtagcatcagccactctcaccgtgtgagcaaccgcatgttccgtcccaacatccagaagatcaccattcgtgacgcgaagggccatgtccgtcgcgccaacgtgtgcacctcctgcatgaaggccggaaaggtggagcgcgcctagcaagagcgctcccgctttcttttccagagaatccaaaagcccgccccgcgggctttctctgttttggcgcaaagttgacgacgcgaaggaggcgggacggcccgcgcgcaggttgcgcagcgactggaacagcccagtgggctgttccaccaagcgagccattgcttgagcacgggtcgtcccgcctccttcgcggcgcccccggtgatgcgagttcgtttgtggaatatgaccgactgtcatcagggggtaacggcggcggagtgttcgttgcgctatactcttctcgactgtgtatgcaaagctcagcggaaaggatttgtcccatgagttctacgatacccggcaacctccacgttgccaacgacgtgcttgccgacctggtcggcaacgccgccatggaatgctacggcgtggtgggggtgtgcgctcccaacgccgccgacagcatcgccaagatcctgcccgcctcgcgcctgcgccgcggcgtggtggtcagctctctggaagagggcgtgcacgtcgatttgtacatcgtcgtggaatacggcaccaacatcgccacggtttctcgcaacctcatcgaccaggtcagcttcgcgctgaaggagtacgcgcgcgtgccgctggccggtgtggatgttcacgtcatggatgtcaaggtgcgccgctaaggctcatcgcgagatgggctcaagtgcccgcctgatgcgggcagctcgcccttgaaggagaattaacccctcatgtctactacgacttactcttccaacaacgtgctgaacgccgtggccgccgccgccaaggttctcgacgagcgcaaggaggaagtgaaccgcctgaacgtgttcccggtgcccgacggcgacaccggtacgaacatgtcgctcaccatccagtcggtggtcagcaacgtggcgaaccttcccatcggtgcctcgggcgccgacatccgcaaggccgtcaccaccggcgccctcatgggtgcccgcggcaactccggcgtcatcacttcccagatcctgcgcggcctatgcgagggcagccagggcttcgacgagttcgacgtcgagtccatcgccggcgccttcgatcgcgcccgcgaggtggccttccaggccgtgcgcaagccggtggaaggcacgatcctcacggtgctgcgcgattctgcagccgccgccaaaaacgcagctgagcaggaactgcccctgcccgacgccctggacgccatcgtggccgaggcctacgcctcggtgcagcgcacgcccgaccttctacctgtgctcaaggagcacggcgtggtggacgccggcggtttcgggctcgccatcatctttgacgcgttcacggccgccctgctcgggcgctccggcaccatggtcgacgagatgtccttcgcccggggcgcgcaccccaaggtggagatcgagcaggtgaacgactgggagggctcccagtaccgctactgcaacgagttcctcgtggattccgacaccctggacaaggacgccgccctggagttcctctctaccatgggcgactgcgagctgtgcgtgggcgaggtgccgaagttcaaggtgcacgtgcactccgaccaccccgatcaggtgctgaagtacttcctcgatcacggccagatctccgaggtgttcatccacaacatgcagatccaatccgccgagcgcaacgagaagctggccgccgaggaacaggccgagcgcaagcctttgggctttgtggccgtggccgccggaagcggtcaggcggagatcctgaagagcctcggcgtcgatgtcatcgtctccgggggccagaccatgaacccctccacgaaggacttgctggatgcggccggatcggtgaacgccgacgcggtcatcattttgccgaacaactcgaacatcatcatggcggccaactccgctgccgagctgtccgagacgccctgtgccgtcgtgcccaccaaatcggtgccccaggccttctcggccctgttcgccgtggatgtggacgcctctttggagacgaacgtcgaggagatgaccgaggccgcccaggccgtgaagaccggcgaggtcacttgggccacccgcgactccaaggacgccgagggcaaccccatcgccgagggagacgtcatcggcatcgccgacggctccatcgaggcggtggacgattccatcgacggcgcggtgctgacgctgctcggcaagatggaggccgaggacgccgatacctgcaccattctggccggcgagggctactccgacgaggatctggaggcgctcgtggcgaagatcgaggaagcctacgacgagctggaagtggacgcccaaagaggagagcagcctctgtaccccatcgtgttctcggttgaataatctgcttgaagctctcccgggacgcgagctggacggcatgttcagtcgctcagacagtccccgctggtatcgaaggcgttaagggcatcgtctccccagcataagccgccttcgatatcatctgcggaattcgcttggtgaacacgccgtccatctcgcgtttggctttgccataatagaaggaagatagtttgcccattgatcgggaaaaagctacgctctcgctggacgagcccgtgtcgcgggttcgtctggtcagccctgcgcgggctgcggcgctcgagaaactcggcgtgcgcacgctgcgcgatttgctgacgcacttcccccgatcctatatcgacctctcccaggtggagacctgcggcaccgctcgcatcggggaagtctgcaccattcgcggcacggtgcacgagatcaagctgaagaagccccgctacaatctcaggctcgtggagatcgcgcttgtggacggcacgggcattcttatagtcacctgctttcgccagccgtggctgatggatcaggtgaaggcgggggatgcggtggccgtttcgggcaaggtgaccttcgactacggctacaagcgcatgaccaatcccttcatcgaggtgatcggggaaggcgaggaggtcaccggttcggtggtgccagtgcatccggccaccgagaagctcacggcggcctgggtgcgacgcatcgtggccaacggattggaagccgccgaggggctcttcgatccgctgcctttggggctgcgcctgcgctaccggctcatgagccggaacgccgcgctgcgcgccatccatttcccgcgcacgatgcccgaggccgacgaggcgcggcggcggctcgtctacgaggaactgctgtatttggagctgttcctcatgcaggagggcgccgcccgcagcgccgggtgcgtgccccacgcccacgtggtggacggcccgcggcttgccgctttcgcctcctcgcttcccttcgagctcaccggcgagcagcagcgggcgcgcgacgagattctttccgccctggccgcgccgacggtggccaaccatatgcttctgggagacgtgggcaccggcaagaccgtcgtggccggccacgccctggccgctgccgccgattccgagggacaggccatgctcctcgcgcccacggaagtgctcgcccgccagcacatggagggcctgggcgagcgtttggaaggcgccggggtgcgcgtcgccctgctcacgggctctacggctgccgccgagcgggccgctatcgtggaaggcttcgccgccggggaggtggacgtgctcatcggcactcacgcgcttctctccgacgacgtcgtgccgcacaacctcaccctggcggtcatcgacgagcagcagcgcttcggcgtcgatcaacgggcgaagcttctggaaaagggcgaggcgcccgacgcgctgtacctgacggccacgcccatcccgcgtaccttggcgctcgcgctctacggcaatctcaccttgtcctacatcaagcaccgcccccacgacagcgcgcggcgtacgacgcgggtgctctcccgcgagcagcagggagacgccttcgaggcggcccgcgaggcgctcgaccgtggcgagcaggtcttcgtcgtctgcccgctcgtgggcaaggacgccgaggcgcgtgacgcgaaggcggccggccggacgcgagatgccgacgccgcgggggaggagtaccacccggctgtggccatcgaggacgatgccgacttgtccggcgacgatgtgacggcggctacccgcgaggccgagatgctgcagcgcaccaccttcgccgactggacggtggggctgcttcacggcggcatgggcgccgaggccaagcgcgaggtcatggagcagttccgcgaaggagaggtccaggtgctcgtggccacgacggtcatcgaggtgggcgtggatgttcccaacgccacggtcatgatcgtccaggacgccgaccgctttggactcgcccagctgcaccagctgcgcgggcgcgtgggccgcggcgagaaggcggccgaggtgttcctcgtctccgcttcccagtgcgaggagtcgctcgcacgtctggcggccatggagagcaccgacgacggcttcgagttggccgccttcgacctgtcgctgcgccgcgagggcgatatcctcgggaaccgccagcacggcgccagcgggctgaagctcgtgaacatcatgcgcgacggcgccgtcatcgaggccgcccgcgccgacgcccaggcccttctggaggtggatccgaacttggaggagcccgaccacgtcgccctggctcgcgaggtccgcctcgccttcgcccacgaatccgccatcgtcggcgggtagcctccgctctaaccccttcggagcggtcgcaaccgctcctgaacccagcgactgcggtcgcccgtccgacccgacccgtagggggcgaccttggtcgcccctcctcaagcgagaaggagacaccaatgcgcatcatcgccggagaattccggggccgcaagctggacgcccccagaggcgacggcacccgccccaccaccgaccgcgtccgcgagtcgctcatgagcgcgctcgtttccctgcgcgacggcctcgacggcgcggtggtgctggacgccttcgcgggttcgggggccctgtccctggaggctctttcccgcggcgccgatacggccgtgctctgcgagcgcgaccgggacgccgccgccgtcatcgagcgcaacatctccgccctgcgcctcggccgcgatcgggcgcgcctcgtgcgcggcgatgtcctcaagcgcggtgcggcggcgcccgggcgtcccttcgacctcgtcttccttgatcctccctacgccaccgatccggcgcagatcttcggcctcctcggccgccttggcgacgcaggcgccctggcccgtgacctcattgtcagctacgagcacgacgcctccgacgacgatgccgtggaggcgctggccgaaacgtcccgctacgaaatagcctcccgtcgccacttcggcgacaccaccctcgatcttttggagcgtttgtgcacggaatgagggggggtattccatagtttttccatcatggtagaatggtaaaacttagcgtgcacgacgtctgtccgcgcgtgtccaaatggggccgcggggcgatgcgatatagtcaggaaggaacaacatggacgaaaccggagtacttgggctgctcgaagagctctcgatcctcttggaggactcgaagccggtcttcggcaagaacaaccttcgccaggtcgatatcgccgccgccttcgacatcatggacgagatccgcgacctgttcccggcggagttctcccaggcccgccagatcgtgcgcgagcgccagagccttctggacgacgccgaggtcgaggccaaccgcatgatcgaggacgcccgcagccaggcgatcaccatcgcctccgagcaggagatcgtgcgcatctcccagcagcaggccgacaccatcctggccgatgcccgcgagctggagcgccagacccgcgccggcgccgaggactacgccgatgaggtgttcgggcacatcgagcagagcctcgacacgctgctgaacaacacgcgccgttgccgcgatcgcctgaacgccgcccgctaggctgcgtggcgccagtaaggaagtaagtgacgagggcgcgccgtctgtggcgcgtcttcttttttggaagtaaatgccacttcatggccgaaatggcacgatttgagtcaaaaagggccgttttcgtgacggctcgcatgccatttcggggtcgaagtggcatttacggaaaggaaattgaaatggctacggatgccacggcgattatcgccattcccgaggcgctgctggagacggcggcgacccggcatttcgaaggaacgctcgatctggccgagctggccgccggccccgacacctacaccttcgccgcgcccgtctcctggtcggtggaggccaccaacaccggcgacgccatcctcatccagggaacggccgcgggcgacgccacgacccagtgcgcccgctgcttggaggacgtgacctacggcttggagggtgatatcgaggggtacttcctcatcggcggcgaggaggaagcggagacaccggaggatatggaaggcgacgagttcgacttcctgcctgacaaccgcaagatcgatctggtgccgctcatcgtggcggccctgctgctcgaggtgccgctcgtgcccctgtgcgacgacgactgcaaggggctgtgcccccagtgcggcgccaacctgaacgaggggccctgcggctgctcccgcgacgaggcggacgtggaggcgagcccgttcgcggccctcaagaacttcgacttcggcgacaagtagaagatccggtccataacggcttttcaacgaagggcggcgcggcggaaacgcttcgccgcccttcgggctatgagtgcgaaaggtcgtctaaagttgtcccgtacggttcggatgcgtgaaagcgaggaggcatgcggtgaaaggggcatcgagcgcgcaggtgctgcgccacggggtgttcgccgtggccgtcggcgtcgtgggggcggcggcctcggtggtgctgtgcctcgttgtcggctgggcctacgatctcgtctgcacccatggctggctactgtaccttctacccattttcgcggtggcgagccttctgctgtaccgcgccctaaggcttccgctggacaccacgacgcacacggtgataaacgatatctgcgccgatcgccccatctcgcccgcgctcgccccgggcattctgctcggcacggcgctttccattctcggaggcgcctcggtgggcaaggaggcggccgctctgcacatgggggcgtcgctgggcgatcttgtcgcgcgccctttgaagctgcggcccttgacgggggtttggaagggcggaagccgtgccgacggcgcaggtggcgcggacggcggtgacggcgcggtcggaagcgcgggcgccagcaaaggcgcaggcaacgccggaggcgcagccgccagcggcggcgtgcacgcctatgccgcctcctgcggcatggcagcgtgcttcgcggcgctgttcttcgcgcccttggggtcgacggccttcgtcatcgagctctctcgctacgaccgctcggtttggcggcatgcgcccttcatgctgctggcgtgcttcgtggccttcggcttggcgagcatcatcggcatcggcgatgtcattcccaaggtgccgctgcctgcgctgtcgtggcccgttatcggccaatgcgtcgtgatcgccgtcgcctgcgcgctggtgggaaccgtctacattcaaatcatcgacggcgcccagcgcctcaccaagcgcatctcgcagaactactatctgtgggcggccctgggcggcgtgctcatggcggtgctggtcacgctgttcgattggcgcgggttcgagggcacgggtgccaacctgctctccgacgctctggccggccgcgccggcagatggaccttcgccgtgaaagcgctgctcaccatcgtgtgcctcgggctttggctgcgcggcggcgagatcatgcccaccttcactgtgggcgcgctgctcggcgcgagctgcacggtcatgacccagggcgatccggccttctcggcggctgtggggctcgtcgccttcttcgccgccatgagccgctgcccggtgaccgccttcctcatgggctgcgagattttcggctgggccggcgcgcccgcgttcgctttggccgtggccgtcgccttctccctcggccgcgacgtgggactgtacgggcgcggggccaccggcattctgaagcgcgcgacttcggcggcgcgggcgcgccttgtcgtgaagaagccgtgaccgctggcgaattcgtgggaaattgcccttgcggggccgcgtgcggttgggtatcatatcagatcgtgcgtttacagaagaagttgtgaacggcacccgctgttcccagctatagaaggagtaatcgagatggcagtacctaagcgcaaaatgggccgtgcccgtacccacgcccgtcgcagcaccaacgacaagatcgcggctcccgcccgctccatttgcccccagtgcggcgaggtgaagcttcctcaccgcgtgtgcggcaactgcggctactaccgcgaccgcgaggtcatcgagaccgagtagcttttgtgcgtgacggtcgcggaggcaccaggtagcctccgcgatgtcggcaaagcctcctcgcatgccaagctggataagcctggtctgccagggggctttttggctataggcccgtgcctccgaccgtgtccgcaggctgtgcggatagggccggatgcgcagtgcccgtgcagcgaaagaccctgccgccccgggcggcacatcgttttgaggagatacgcaacgtggcagaaccagtaacaatcgccgtggacgtcatgggcggtgaccgcggcccggccgtggtgctgcgcggcgccctgcaggcccttgaggccgatcccgacttgaggctcacgctcgtcgggccggccgaggaggtggagcccttcgccgccgctcacgatcgggcgacggcgcaagcggccaccgaggtcatcgagatgggggagcatccggccggcgccgtgcgcgccaagaaggactcctccatcgtcgtgggctgccgtctcgtgaaggagggcgccgccgacggcttcttctccgccggctccaccggcgcctgcctggccgccgccaccctcgtcgtcgggcgcatcaagggcgtgaagcgcccggccttgggccaggtcattccggcttgggcccgtccgaccctgctcatcgacgtgggggccaatgccgactgcaagccggagtacctcgtgcagttcgcccagatgggcgaggtgtacatgaacgctatcatgggggtggaacacccgaaggtcggtcttctgaacatcggcgaggaggacaccaagggagacctgttcgcccaggaggcccaccgtcttttgaccgaggccgtccccgccttcgcgggaaattgcgaggggggcgacctcatggcgggcgacttcgacgtggtggtcaccgacgggttcaccggcaatgtctgcctgaagaccatcgagggcacggccaagacgctcatgcggaacctgaaggccgcgctcatgtccacggcgctttccaaagtgggggcgctgctcgtgaagggcccgctcggcgcgctcaaagagaagatgtcgccggacacctacggcggcacgccgctgctcggtgtcaagggcgccgtcatcgtggggcacggctcctccaacgagacggccgtgaagaacggcatcgccgtggccgccgccacggtgcgcgcccatgtgcccgaggtcatcgccgagcgcgtggcctccgcgcccgcgtcggcttccgcggccgttggcgccgaggagaagggggaggccgccacctctgatgcccgatgagcctcaccgcagaacagcagaccaagctggagcgcgcccagcagatcgtgggtcgcaccttcgagaacacccagtacctgctctcggccatcacccatccttccgccaccgagggtcgggccgtgaaattctcctacgagcgcctggagttcctcggcgattccattctgggggctttggtggccaacgccgccttccatcagttccccgaattggacgagggcggcctcacgcgcattaaggtggccctcgtctccggggcgagcctgtcggaggtggccgagaagctcgggttcgccgacgtcatcgtgttcggctcatcggagaccggcacgggccggcgcgggctgcactcggcgctcgagaacgtctacgaggccgtagtggcggcgctgttcctcgacggcggcctcgatgcggcgtgggccttcgtcgatcgcacgctcatgcccaagatgtccctcgagcttgcccgcgagccggagaatcccaagagcgccctgcaggagaagctgcaggagggcggcatcacgcccacctatcggttggtggagacccaggggccgccccacgaccgcaccttcgtcgcccaggtgtacgccggcgacaaggggctcgcgcagggcgtcggccgcacgaagaaggaggccgagagccaggcggcgaaatccacgctcgcgcgcctctccgagttcttcggcatcggcatgaccgaggagcaggccgccgagaaagcggccgagaaggcggcccgggccgaggagaaggccgccacgaaggcggcgcgggtcgccgagcgcgaggctgcggccgccgcgaaggccgccgcgagggccgagcgcgccgccgccaagaagaagcaggactaggcgcccatgtatctgaaatctctcgttctcaagggcttcaaatccttcgccgaccgcagcgcgctcacgctggagccgggcatcaccgccgtggtgggtcccaacgggtcgggcaagtcgaacatctcggacgccgttctgtgggtgctcggcgagcgcaacgccaagaacctgcgcggccaggccatggaggacgtcatcttcgccggctcctcggcgcgcaaggcctccggtctcgccgaggtcgatctcgtgctcgacaattccgacggcacgctgccggtcgatttcgacgaggtggccatcacccggcgcatgtaccgcaacggcgagagcgagtacctcatcaacggcaccgtggcccggcgcatggacgtgctggacatcctgcacgactcgggcctgggcaccggcacccattccatcatctcccaggggtcgctcgactccatcctgcagagcaagccggaggatcgccgcgcactcatcgaggaggccgccggcgttctcaagcacaagcagcgcaaggcgaaaagcgagcggaagctggcgaacatggaccagcacctcttgcgcgcccgcgacgtggtgggggaggtggcccggcagctcgggcccttggagcgcaaggcgaaaaaggcgcgcacctaccaggagctcgccgcgcagcaggccgagatgagcctcaccatcgccgtggacgatttgcacgggctgcagaaggagtgggacgcggccaaggcgcgggaggcggcgcttgccgccgagctggaggagcgaaggggcgccatccaggaggccgaggccgctgtggaggccttgcaggagcgcatccgccagcagacgctggacgccggcgacctgtcgcggcgccaccgcgcggcggcgacggccgtcgagcgattcgactccgcggccatgatgctgcgcgagcggcgtcgggccgccacggcccgggccggcgagctggagctttccatcgaggccaacgccgtgaaggccgacgaggcggcatccgaactcgcgcgcgcgacggcccagtacgaggaggcggccggcgagctggatgcggccaagaagaaggtatcggacttggacgcggtctaccgcgatttgggagtgcgccgcggcgcgctggaacgcgagctttccgccctttccaaggacgctgagaagatgaccgccgagcgcgagacggcgcgtcgccgccatgccgagaacaccgaggcgctctcccatggcctcgcccacgtgcaggtggtggaggggcgcgccgccgagctggcgctcgagctcgcacgcgctcaagaggaggccgagcgcgcggcggccggggccgccgaggccgatggcgagctttccgcgctggtggcggacgaggcggcggcgcgcgccgccgtgggcaccgccgtgcagtctcgcgacgcggcccgcgccgccatggacgaggcccgcgacgcccatcgggcgctttcggtggagatcgccaccttggaggagatggagcgcgcgagcgccctgtccgcgggcgaggcccgggcgtggctcgtggagcacgtcgacgaggtgctggggctctgcgagccgctctcccacgtcatccaggcctcggccggcttcgagcctctggtggaatcgcttctgggcggggatgtggccacgctgcttgtggaagacgcgggcgcggtagagctcatcgccggccagctcgccgccgccggtgccgcgggcgaggcatccttcctcattcgcgacgacgccagcccctcccgcatccgcggcgccgccctcttgtggcgcgagcgatccggcggggccgagggcgtcccgctcgtggacgagctcctcttcccggaagaggcccggggcgccgtggaggcgcttctgggcgatgtggcggtgtgcccgaccctggaggcggcgctttccgcccacggacgggacgacgcggccctgcgcttcgccactccggatggtgccattgtatggccctccggcaaggtgagcgtggggggcgccgtggtggacgagggggccggcgtgctcgcccgcgtgcgccacttggaggagctgcgggcgcagctttccggcgcggcggcggcccaggccaaggctgaggaggcccaccgcttggccgaggaggccctgcgccaggcccaggccacgtccctggagctttcccaggccctggccaacctgcgcggccgtgccgaggcggcccgcaacaccgcgagcgccgccgccgagaagctggcctcctgccgccgcgagctggaatccgtcgagcgccagcgcgccgaggccgaggccgccgtggcgtcggcccgtcccaacgtggaatccttcgaggcccgggtgaaggagctggacgcggcgctgaatgcgggcaagaagaagcaggaggccctgaccgaggagctggcacctctgcgccgcgaggcccatcgcgtctccgacagcctcgccgaggcgaagctggcgcaggccacgctctccgagcgcactacctacgccgagcgcgtccgcgatgcccgtgtccgcgacttggaggcccttgccgccgcgagcgaggaggcccgtgtggccctgcgcgcgaagacggtctccgccgcccgcatcgagccggtgctcgccctcatcgacgagctgacggcctcggcccagaagtggacgcgtcagctggaggagcaggccaccgccgccgaggactcctccacgggcttgcattcctccgtcaccgaggcccgcggccgggcccatgaggcccacgctctcttcgatggcgtgagcgagcggttgagcgaggcccgcgtgcagaaggggcggctcgagctccaggttgaggcggcggtgaaccacatcgcgaccgatctggcggttcccctggagacggcgctttccgtgccgcccctggagaaccggcccgagatggaggacgccctgttcaagatcaaccgccgcatcgccaacctcggcaccatcaacccggacgccgccgaggagtacgacgcgctgaaggtgcgctacgactacctggccgcccagctggacgacctcgatcgcgcccggcgctcgctcgcgaagatcaaccgcgtcatcgacgcgcgcatgaaggaggacttcatccgcacctacgaggcggtggatcgcaacttccaagagatcttctccatcctcttccccggtggcagcgcgaatttgtcgctcgtggatccggatgatctggagaacaccggcgtggaggtgaacgcccagcccaagggcaagcgcatcgcgaagatgatgcttctgtccggcggcgagaagtcgctcacggcgctggcgcttctgttcgccgtctaccgcatccgctccaccccgttctacatcctagacgaggtggaggcggcgctcgacgacacgaacctgcgtcggctcgtggcctacattaacagcctgcgcgacgagacccagctcatcatgatcacccaccagcgccgcaccatggagatggccgatacgcttttcggcgtctctatgcaaggcgacggcgtcaccaaggtcatcagccaaaaactcgaccaggccctaaagcacgcggagtaggggagacggcggccgcttgccaagggtgcgacgggtcgtccggcgggttgtcccgttgttgggcggcgtcgaccgattgaggcagctgtggttgggctgcggcgcctgccagaccgcgtgcccctatgatgcgcgccatttggcggcgtcggaggacggctatttcggctcggagttgaacgagtacgagacggtgatgtatgaagcgatgcctccgatgaccgtcttgcgcagtcggcagcctcatcgctcatccgcgctgcctgcgcattccctcctccgcaggcagcacctccctcccttcgcggcggccccatgcgggccgccgctttgcgctttcatcttaattgtgcgagatatccgtcattgagttacttcggccataattgcgttgaagaatcccgtggcttccgggcactcgtagaccttgttgcgacgtccgtgactgacttgaacgataatgcctgccttctcggcggtgtcaataagctttgctgcagtggtgaatgttgtgtcgatggattccgcgagagtggaagcggaaaagacggggctgccaatgagggagatgagaaaacgctttgccatctccgtaaggcgtcgctcgccgtttagcgctcgtccccagctttcgatggcacgacaggccagactgtaactgtattgggccacttcgaaggcattgcgagatgcgcgagcggtgtggtacacccattcgtcgatcatttgcgtttcgctggcgccacggcagaactggtacggttggagcacttcgtcgtgattgcgttgggcgagagccggcgtgatggcgatgggggccatgatgtgcgtgatgaggtttgcgttgcgccagatacccaccaggagtgctcgggcgagctggtcgatatcggtgtcgaacatcttagttgcttccatctggtagtgcatgagcgccactttcgcagagggccccagcttcgaattgttgaggaacattaccagatcctgaaggaattcaggaagttcgagtggggagggggg

SEQ ID NO: 10632 - DNA, 9516 bp, Unknown
  gut microbiota DNA sequence
gttcggctgatggcttggtggagggctagtacgtaacgaggggtgatggtggttggagccgccccgcacagcgagttgatctcgatagccatcatctgatgggcgcatcttgaggcttcgagcactttctgatcaagccggggagatcccataatagcctcaacctttgccttgtcgggaacgccttttgtccaacctccggcttccttcagataatcgaggaagcagcaggtacggtaatcggcgcgggcgccgttgaggagggcgacgaaaatgccgtccatgcgagccaaggtgcgactcagagaagggccgagcggggaggtgccgatagtgcagtcgcaacgggaggcgaatatctcgaattgggagatcgccccgagcgtttcgtcgctcagaatgattttccggcccatcaattggaaaggctggtaaatcgctcggtcatcttgcgctgtcttgccggcatcgccgcaggcgcctgcggcggaaagcacttcgtgaagatgggcgagatcctccggggcggcttctcgcctgaacgatgtcctcagtctcacgatccccctctcatttgaaaaccctatagtagcgcgacaaagtcgaatttacacggaacaagggcgcttaatgcaagtttcgcccgctttcttcaataaaggactgctccatatttcattctttgcgggcattggaacagaacttgattgatctttttgaagtcgtgaatgctgatcataatgccacgtcgtcgaggatcctgtctggattttctcgattcggttcaatgcttaagagaggagaaggagactatggaggatgtgaaggctcccgcgtcgtcgacgcagtcgggaatcacacgccgcagtttactgaaatggacggccctcgcggctgcgggaacggctgcgctcggcacgacaggttgcgcgggcttcaacgagaaggagcctttaagtgagaccggtggcgagaacgtccagccggaaggggagtggattccctgcagctgttgggccgactgcggctccaagggctttaacaaggctttcgtacgcaatggggaagtggtgcgtttgggcaccgaccagacccatgacgacacgccggactgcccccagttgcgcgcgtgcgctcgtggtcgcgccctgcgcggcatgatcttcggcgccgatcgcatcaagtaccccatgaagcgcaagaactggcagcctggcggcggtgagaacgcccacggcgagttgcgcggacgcgacgaatgggagcgcatcagctgggacgaggctctcgacctcattgcaggtgagatcctgcgcatcatcgacacctacggcaacgagggcattcttctgcctggcggcgtgccccagcgcctcggcgattacgacatcggccgcatgatgtatattaaaggcggctgcctcgagcagaccggcgcggtgtcttctggcgcctggaccgagatggccaagctcatcggccttcccgaggaaaccaacgaccgcatcgatttgcgctcgagcgaggtcatcgtgctgtggggttccaatcctgcctggagccgcgcgggcctccccacctatgattaccttcaatgcaaagaggcgggcgtgaagttcgtctgtgtcgacccgttctatacgcccacggccaaagtgctcaccgacgactacatccccattcgccctggtaccgacagcgccgccttcctcgctatggcctacgtgctgctcacccaggacgatccggagaacaatccgctcatcgattgggatttcctcgaccgctgcaccatcggcttcgatgccgaccacctgcctgagggggccgatccgaagaagaactaccgtgattacgtgcttggcacctacgatggcgtgccgaagacgcccgagtgggcttcggagatctgcgggtcgcccgccgaagacctggagcgtctggctctgatgctgggcggcgccgagcgtgctgcggtcattacggcgccggctttggcccgtaccggatccggcgcgcagctctgccagaacctcatggctttcggtgccatggccggcctcatcggcaagcccggctgctgctgcgcttccgactgcggccattcctggatgcagggtggtttcgagacgctgctcaagggtggcatgaaccacgccaatccgcgcaacgctacgctcggcaatatggagcgcatccccaatccgctcgagtaccgcaaggtgaacgtgaaccagatgtggacctccattgtcgatgagcgcaagtacatcggtctggacggcaagacctacgacaacaatgtgcacatgatctacgaccgccaggaaaacttcctcaatcaggggccggccaccatgaagggcatcgaggcctatcgcatgatggatacggtggtggcccagaacctggtcatgaccaccaattgcaagtatgcggatatcgtgctcccggttgcgagcccctgggagcgctacggcgatctcagccccgcctatcgcgagaccatcgtgtggttcagccaggtagtggagcctctgttcgaatgcaagagcgatgccgagatcgcccttgagctggccgaccgcatcggcgtggatcgcaatgtgctgcgaccggtgagcgagaagcagctgatcataaatatggttgccgcttctcagatcctctcggaggacggcgagaacttcgagaatctcgtgagcatcaccgaagaggacttggccgaactgggcgttgagggccagccccaggaaggtcgcgtgccgattctcgatttcaagcgcgatggcatcttcactatcgagcgctccgttggcgacggcctcgatttcattgccctgaagcctttccgagacgatcccgaggcgaacccgcggcccacggcttcgggcaagctggagatctactgccaggccgccgtggacaaggtgaaagaattcggcttcaaggagatatctcctattcccgagtacgtgccgccggtggagggctatgagcagactttctccgattgggaagcgaaggaaaagggcgagttcccgttccagatctacagcctgcatatcttgcgccactcccattcctcgttcgccaacgtgccgaatctgcgcgaggccttcgaccatcctctgtacatgaacagcctggatgccgagcgtttgggaatggagactggcgagacggtgctcatcacttccaactggggccgttgcctgcgccccgtgcaggtaactgagatgatgatgccgggcgttctggccatgggccagggcgcgtgggtcgagatcgacgaggagactggcatcgacaaggccggctgcatgaatgtgctctgcggaccgaacgtgactacgaccggttaccaggcctggaacacctgcatctgcaacgtcgagaagtgggatggcgagccgctggtacccgactatctatgggattcgcgcgaagtgctcaaggaaggagagtaaatcatggcccagatgggatttttgatcaaaagcgcccaatgcagcggctgcaaggcttgcgagttggcgtgcaaggatatccataacttcgagatcggcccccgggcacgtcgggtgcgcgaggtatgcggtggcggctggtctgtggacgagaagaccggcgtctgccatccgagcggggtgttcacctattcggtgagctattcttgcggccactgcgataatcctgcctgtgtggcggtgtgcccgaccggcgcccatgccaaagacgaggagacggggctcgtgaccatcgatcaggagcaatgcatcggctgcaagtcctgcattcaggcctgcccctatggcgccccgcagttcgtcgaggccaagggcgtgaccgagaagtgcgatatgtgcgcagaattgcgctcttacggggaggaaccggcttgtgtggccatctgcccccagcgcgcgctcaaggtgggcgatatcgacgagcttcgagccgagttcggcgactgtgccgatgtagctcctctgccctcttcggccgacacggcgcccaatgtggtcatcgtggctcaccgcaatgccaaaacgaacctggctgacgtgcgtatcctgtcgctggagcagtagggagcacgctatggatgagaggatcgaggacgagcggctctctgccgaatacctggaagaaggcgcggcactgtttctgctgctgggacggctcttccatggagtaccggatccggtgctgttcgctgaggcggccaatgaccgtatcttcgacgagatgcctttcgtgcgcggagaggaggcgctgcgcgctggcgcttgcttgcgcgcatgggcggatcggtgttcctcgcccttctccgacgatgacttccacgaggtgtccgccgagtacgcgcgattgttcgttgggggcctgacggtgccggcgccgatgtgggaatcggtgtacttcaacaaggatcgcatggtgtttcagcatcagaccttcgaggtgcgggcgatgtacgcacgctacggcttggaggtggatgcgcttgctcacgagcctgatgaccacctggcctatgagctcttgttcgtagcgaggctcttcgccctggccgccgagcatcggcgcgccggttgccacgatgaggcagatgccgttctggccgatctggtctcgttcgctgtgtgccatccgctgacgtgggtctcgcagtggcgcgacaatgtgcgccggtatgccaaagacggcttctatcgaggctacgccgatctcgtgtgcgcggcgctgactgaggtagaatgtgcgttggcgccccaaatggcatcagcgccctcggtttagttcactctcaggcaggcattgcctcgagcgatgactcggaggtgccttgccggggcccggaagtctcccctccctgcttccgggcccctgttttgcgtggcgtccgagagattttgcgcgaggcgaaatgcgggagggatgaggggaaaaggaagaggggaggacagtgagaggaagaagcttttccaatcgatcgctcgttgccggcgccacagggtttgtgctgaacttacttctgggcgtcgtgtacgcctggtcgatgttcgtggagcccctggaggcccagttcggctggacgcgcgcggagacctcgctggtgttcaccgtctccatggcctgcctgtgcgccggtcatcttgcctccgggatcctcttgccccgcacctccccgcgctgcgtgctgcttctggccgctgctttgtcgggcgcgggctttctggcaagtgcggcggggaattcgctcggctggttcgccgtgtcctatgggatttgctgcggtctggcggtgggcttgggtgccaattgcgtgctctccacggtgcttctgtggtttcccgaccgtcgcggtctggcatcgggcgttctgctggccggtgtcggcctcggctccttggcgctcggcgtgccggttacgtcggtgatcgaggcgctgggttggcgggcggccttcgcctgtctcggaatcgccttcgccctggctttgggcgtgggggcgcttctgctgaaggcgccttcgtcgcaaagcgaggggccgcaaagggaaggggcgctcggctcgagggagactggaggagcgccttcggaaagtgaaccggcggcacccgctgcctgccggggtatgaccacggctcagatgctgcgcacagggtcgttctgggggttcttctgctggatcgtcctgatgggcgcgggagggctcgcgcttatcagcaacgccgtgcccgcggccgccgtggtggtgcagcgatccggtggcggcgcgggagcactcgccttcgccacggccgccatgggactcatcggcgtagcgaacagcgcgggaaggctcgcttccggatggatttgggatcgtttcggcttccgcgtcgcgcttgcggcggccccgatggcgctcatggccgccatggcgctgtgcattgtcgccgacgagctcgcgagccctgccttcatcatcgggggctttctgcttctgggcgcctcttacgggggatcggtctcggcgggcagcgcgctgacgggatcgtttttcggcatggagtgttaccctatgaactacgccgtcgtctcgctcaacatcctcgtcgcctcgcttgtcggccccgctgtgacagccgcgagctgggatctctctgggagctaccttgccgcctacgtgatccttgccctcctggccctcgcggcgttgatcatcgggcgctttctccgtcctccgcgagattgagacgggaggcgcttggcaactgtgctcttgaggtggctggcgataggtatctcctgatttgtcgggcacccgttaggatagatggcgtgctggctatcggtgaagaatggagtggcatgggcgctcgatacgagagaggggagctggagtacgcctccggctacgagaagatgtacggcgtgaccgacgagcagctggcgtttctctcctggcaccagggcaatctctgtcgtttcgcggtgcagccgatctatgacgctgcgctcgaggccgatcttgagcggctggcgctgctggggtaggcacctgccgcgggttcggtcggcgaaggtgccctttttgcatgagatctcgagttataagcgtcttgggggtgcgcgtcgggccggattgggatgtgtctcagctaggtacaatgatttgaccaggcgtttctctaaacctactttggacgtcgaagctcgggccgcaattcagacacttacaactcgagatctcatgcggaattcggccctttggccgaccgagatggctggtatatggccggtgggctgtggcgaaggcgcataattgacgaagggccgaagggaggggtgtggcagggataccccttttggggaatgcggggaaggttcgggcgctcttccgctcccgacgcgaggtggttgctcgccatgtgtgcttcgatgattcccgcctgttcaaaggtgtcgacacgccggccgacctcgctcgcatagaggagatggtggctcgtgactgacccgagaaagaccccgctcgaccggggctgctatcccatcttggaacggagagtggggcgggacggcacgcatccgctcgtctacctggacagcgctgccacctcgcttgtgtcagattaggtcgttagcgcctgtgcgacgtttttttgcgcacgagctgagcgaacatccatcggggtgcccataccctggccgaggaggcgaccgatgcttacgagggcacccgcgagcgtttggcccgcttcttcggcgtggaaggcgcggatcggttcgtcttcacccatgggtccacggagtcgctgaacctggccgccctcggctgggccgaccgccggctgcgccccggggatgtcgtggccgtggccgaggacaaccgtcacgcgaacatcgtgccgcggcagatgctcgcgcagcgtcgcggggtgcgcgtcgaatggattcccgtgaacagtgcggggccgctcgactacgacgcctggtgccgcatcgccgaggcgcgcccgcgccttgtggccctctgccagcagcctaacgaggtggtggtgctggatgtgcgcacgccggaggagtacgccgagcggcatatcgtgaatgcgcggctgctcaccctggacaccatcgacgagacgaccgccgcggaagccgccccagacaaggaagcgcccgtgttcgtctactgtcgcaccggcgtgcgctccgccgaggcggcgctcaagctcgaggccctgggatatcgtcagatatacgacttcggcggcatcatggactggccttatgccaccattgatggcgacgagccgaccgaaagcggtcttcccgaaggcgagctccccgtcggcgtgaaggtcgtctgcggcaagacgaaggccgccccatcctccagctagtgttcttcttgctagcattttcccgtcgttatctataatgtggagaaacgcgaaggaggagacgccaatggatatcggcttgctgcgcaattactacgacgggcttgcctgcgaaagtgggttcgagtcgcgctgccatatggagttgccggagcggtcgctggttggcgcgcgcatcgtgaacgtgggatgccggcgcggcaaaggcacctacaagctgagcgagcaggtgggcgcggacggcgtcgttgtcggcatcgactggaacgcggcttttgtggaggtggctcgcgcgggtgttctcaaggcgcttgagcgcagcgggctttcccggtgcaacatggcgttccgctgcggtttccccgaagatctggtcgcagcgggcattgaagaaggctgggcggatttcgtctacttgaacagttcgctgccgctgtttgcctcgccggcccgggcgctgcgcgagtgttatcgcgttctggcgcccggcggcgtgctgctggctgaggttcccgtgacggagccaaatggcgagggtcgcacgggtgataccgactgcgcagcggatgctaatcgtgcggacgtcatcaaggcggcccgcgcccttccgaacgccgtgcaggcggcgccgaccgtcgaggagcttctcggctggctggcggaggcggggttctccgagccgatcgtccgcagcgagcgcccgctgtcgcccgacgagggcagcacgcccgatcgccccgctgccacggtgcccggcgacgaggcgacctatcgccttctgtccatcgaagcttccaagtgagtccgctacgccgcttccacggtaacggcggtgccggaggcggtgaccatgagcatgttgccctggccgagcacctcgtagtccatgtcgaccccgacgatggcgtgggcgcccagggccgcggcgcgctgctgcagttcctccaaggcctgggtgcgggccaccatcagctcctcctcgtagccggcggaccttccgcccacgaggttgcggatgccggcgccgaagtctttcaaaaagttgatgcccgttatgacctcgccgaacacgatgccatagtagccggtgatgcggtagccctccacggtgggggtagtggtgacgatcatgggggagtcctttctcaaatgagttccacgctggcatatatgccacgcggacgctgcgaatcctgcgcgaccatgatacccgaagcggccgtgtctcagcgagaatgggccgccgattgtccaacctgtggggaggttcccgaaacagcgccgtgcgggcacgggtgctgtgctaccctgttgcccgtgcacattccccgggcgtcatccgacccggagagacgaacttatacgaaaggaagcaatccgtgagccaagcctgcgatattctggacatcaacctggccgacgaggggcagaagcgcattctgtgggccgaccgcgatatgccggtgctcgcccgcatccgcgagcgcttcgccgaggagcgcccgctcgagggcgtgcgcatcggcgcctgcatgcacgtgaccaccgagacggcgaacctcatgcgcacgctcgtggcttcgggcgcggaggtgacgctctgtgcctccaatccgct

SEQ ID NO: 10633 - DNA, 1091 bp, Unknown
  gut microbiota DNA sequence
tgaaggcgtagaccttgcggcccttgactgcggacgcgccgatgtacttgctggaaccattgaggtcctgcacatagacgggaacagcccactcgtcgatgaatgcaaaccagttggggtggccagcaatgtactccacgccctcgccgagggtggaatcctcaaagacggtgaagccagcgatgcggcccacagcgccggtctggacgacagcatcgccaaggtcagatgccttgatgaactcgggactcttcagcagcagaccatagatctcgggggagaccagcagccagcggccttcggtagggacatggacggtggagagcttggtgcgggcgtccacgatgttgccgtagatggtcttctcggtcagggcggtggtggtgccgaaggccgtgcctgcggtggtcagctccacagagccgtcggaatccacctgcagagccaacgaataaccggcactgtccagacggtcggccaccaggtcgtcggggacgctggcggcgtcgaagccgtcgatgatctcattgacggccttgtccttgtcgatgttgacggtaagataggtggtatcgccgccggtcagctctgcgccggtctgcttgtcgtagtcgttcacagcgacttcagtgtcacggacggggactttgaccgagccggccttggggctgccctcatagcggctgttgcagataacaccgaccttcttgaccagcgttgcccggagcttgaggtcaaccagcttggaataacgaacctgtgcttcgtgtgccataatgtttcctttctatcagtcgattttgatgccggggttcatcgctttgaaggcagcggtgacagcatcggtgtcgccggtgggcggagtgccgtgctctgcaccgctggaaacgcggacgccgccctctgcggcctcgccgaaggcccaagggtttacctttgcggcttcttccagcgccttgtcgatgtcggtggtgcggtctttggaggacttgagggcctccatgtccagcagggcgcggacggccttgacgctgcggcccttcttgcccatgatggcggtgttcagggccgagtcgaaggcgaagccgtcc

SEQ ID NO: 10634 - DNA, 1439 bp, Unknown
  gut microbiota DNA sequence
ttccccgttacaaccttgtttctaggcgaattgcggggcgaattgctcacatttcgcggtagcatggtcgcaaccgatttctgtcgttaggagcaccatgaccaagattcaaatgaccacgccgctcgtggagatggacggcgacgagatgacccgcatcatctggcagatgatcaaagacgagctgatctgtcccttcgtcgacttgaagaccgagtactacgacttgggcctcgagaaccgcaacgccaccgacgatatggtcaccttcgagtccgccgaggccaccaagcgcttgggcgtggccgtgaagtgtgccaccatcacgccgaacgcggcgcgcgtggaggagtacgacctgaagcagatgtggaagagccccaacggcaccatccgcgcgatgctcgacggcacggtgttccgcacgcccattatcgtgaagggcatcgagccctgcgtgcgcaactgggtgaaacccatcaccatcgcccgtcatgcctatggtgacgtgtacaagaacgccgagatccgcgtgcccggtcccggcaaggttgagctggtgtacacgggcgaggacggcaccgagatccgcgagctcgtgcacgagtacgacggcgccggcgtggctcagggcatgcacaacctggacgcctccatcgcgagtttcgccatgagctgcttcgagttcgccctggacaccaagcaggacctgtggttcgccaccaaggacaccatctccaagaagtacgaccaccgtttcaaggacatcttccaggagatctacgacgaccagtacgccgcccgcttcgaggaggccggcatcgagtacttctacacgctcatcgacgacgccgtggcccgcgttatgaaggccgagggcggcttcatctgggcctgcaagaactatgacggcgacgtgatgagcgacatggtgtcgagtgccttcgggtcgctcgctatgatgacctcggtgctcgtgagcccggcgggtgtgtacgagtacgaggcggcccatggcacggtgcagcgccactactacaagcacctggagggcaaggagacgtccacgaactccgtggccaccatcttcgcctggtccggtgccctgcgcaagcgcggcgagttggacgagctgcccgatctcgtggcctttgccgaccgcctggaagcggcgacgcttgccaccatcgaggccggcgagatgaccggcgacctcgcccgcatcacgacgctcccgaatccgacgaccctttccaccggcgagttcatccgggccatcgcccgtcgcctggctgcctaaggggttcccgcactgtcccaacccgaaaaggcccgaccgcatccagtcagcgatcgggcctctttcgttctccccaatttggaaaaggtgcttttctggaacacgggatttggacccgctgttaaaccaccattgacat

SEQ ID NO: 10635 - DNA, 182 bp, Unknown
  gut microbiota DNA sequence
tgttccagaagacctccacgcgcacccgctgcgccttcgaggtcggcgccatggacctcggcatgggcgtgacctaccttgatccgggcagctcccagatgggcaagaaggagtccatcgaggacaccgcccgcgtgctcggccgcttctacgacggcatcgagttccgcggcttcgcccag

SEQ ID NO: 10636 - DNA, 1826 bp, Unknown
  gut microbiota DNA sequence
ggctttcgtttgtcggggattgcgccgcgcctacagcgtgccgttgcgccagtcttccaaaccttcgataacgagcgcatgggtgcgctccacttccgggaggtgcttctcggcggcgtcgtactcgccggcgtacagcgcgtcggagacgagcgtcgcgcagtcgtaaagatccttgaacgacaggttgcccgccacgcccttcagcgcatgggcctggctgtagccctccgagtagtccttggcctccatggcggcctgaagcgccaccaaatggccgtcgtccagatacttcagggccaggcgctcgtacagctcggcgttgtcgccgaagcggtccatggcgtccacgtagtcgatgccgaaggggcgaagcttgtctgcgagctgagcggtcatgatcggtcctttcccgtgctattccggcgcccgcggccctctctcctcttctttggacggcagtcgcgttaagtaaaactgctgctcagtgtagtcgcacgtcacgaagctgtcagcgtaccaggctactcgtttacgtttcgtagccagctgtcagcaaactgtaatcttggtttcggtggattatcgccaaagcgcgaatgatgcgcgatattggcgcctgtcaatagcgattcccgacgtcaggtacgtgatgccctagtagtccgccgccgcgtcgctttccatccactgctcgaagaactcctcgtaggcgtcggcgagcacggcttcccgcgcgcggcgcatgagatccagcaggaagtgcaggttgtgcaccgacagcagaatggcgccgagcatctcgttctgcttcaccaagtgccggatgtaggcgcgcgtgtggtttttgcaggtggggcagtcgcaggtcgggtcgagcggcgtgaagtcgcgggcgtacttggcgttgcgcatgttcatgcggccggcgctggagaacgcggtgcccatgcgggccgtacgggtgggcagcacgcagtcgaacatgtcgacgccctcgcgcaccgcgcgcacgagcgtggtagggttgccgacgcccatgaggtagcgcggccggttctccgggcaggcgcgggccacttctcccaaggtctcgaacatcacctcgtgatcctcgcccacggagtagccgccgatgccgtagccgccgaagcgccggccgcccgcggccagcgactcctcttcgatctcgcgcagccgccgcacgctttccaaacgcaaatccaggtgcatgccgccctgcacgatgccgaagagcgtctgatcggggcgcgtatgggccgccaggcagcggcgcgcccaagcgctggagtaatccacggcccgcgccacgaactcgcgggtggcggggtagggagcgcactgatccagctgcatggcgatgtcggcgccgatgagctcctggatgcgcatgttctcctcgggcgtccagtgaatcttgctgccgtcgtagatggactggaacgtgaccccgtcgtcagagagcttcacggtgtcggcgaggctgaatacctgaaagccgccggagtcggtgagcatggggccgtcgtagttcatgaagcggtggatgccgccggcctcggccaccaggtcggcaccgggccgcatggccaggtgatacgtgttcgcgagcaccacttggctgccgaactcgcgcagctggctcgtcgtgatgcccttcaccgtggcggaggtgcccacgggcatgaacatcggggtgtggaaatcgccgtgggcggtggtgtaggtgagcgcgcgggcgtgcccgctggtagcgtcgcacgtgcaatcgaagagtgccaaagtcgctccttctgttcaagcgt

SEQ ID NO: 10637 - DNA, 9151 bp, Unknown
  gut microbiota DNA sequence
gtcgtaatggtggccccggcgatggcgtcgatatcggcactctgggccgcctcgatcatctcggcgtaccgcccgtcgcggatggcctcgtagccgccgcggctctggctctccccttcttgggtcgtttccaggcaggtgatgcgcccgtcatccagaagcagcgtcaccgtgatggcgccctccatgccgcgcccgtgcccgacatacaccccgtcggcgtagtcgccttgggcccgcgcccccgcatcggccgcaacctcggctgcccagggatcgtcggtgcgcagggccagctgctcggccgaggcggcgtccttcgacccggatccctcgaaggacgccccgcaaccggaaagccccagggcgagggcggccgcgctgcaggcgatggccgtcgttgttcgcttcatgttccctcctatcattcggctgtgcgttccaattatttcttcgtgaaagttttctttttctttcttcaatgaactttattttgggaatcttagcagtatttcccccgtttatcaatgctttattgactcatttaccaatttcgtcaattattaccaacttgaaaaattatggatattgactgaagagttctacacaggtatggtacttcccagcatcaatttgatgccccgcgcagccggtgcgagtgggtcagcgaggcctcttgtgctccacccgcggcgggcttcgcggcaaggaaggcaccgatccttaaaggagggatcaccatgttattcgacgtgtacggcccgaacgccggcttccaatggctcggcctggcgatggtgctcatcgcgctcatcctgctgaacgagttcgcccgccgcaccaaggccggcggcatcttcatgttcttcggcgtctgcggcgccatgaccgtctactgcctggccgtagagatcggtgcggcgtccggtgccgagtgggccgtgaacaaccccacccacaccgacatgaacagctggttccactacgccaaggtgtacgccgccaccgccggctgcatcggcttcatgatgctgaagtactcctggggcaagatcggccgctcgcattggttcaaggccttccccttcgtcatcgtggccatcaacatcctcatcgccgtggtgagcgacttcgagagcgccttccgcgccttcggcaccacgtgggtttccaccgagggcgtcacgctctacggcggctggcacaacgtgttcaacggcatcgcgggcctgctcaacatcgcctgcatgaccggctggttcggcatttatatctccaagaagcgtcaggacatgctgtggcccgacatgacctgggtgttcatcatcgcctacgatctgtggaacttctgctacacctacaactgcctgcccacccattcctggtactgcggcatcgcccttctgctcgcgccgaccatcgccggtctcatctggaacaagggcggctggattcagaaccgcgccttcacgctttctatctggtgcatgttctgccagatggtgccgatgttcgtgaacgactccgtcttcgccgtgcagtcggtgaacaacccggacgtgaacctgggcgtgtccatcgtcgcgctggtggccaacatcgccgcgctggcctacatcgtctaccgcgccaagaagctcggcgtgaacccgtacaagcaggaagcgttcgtgggaaccaaggacttccagaaggccatggagcgccgcgccgacaccgcctacctgcttgagaccgagcccgcgagcgccacggccgccgagatcgccgagatggtggcctacaacgagctgcccgccgagggcgagtcgggctacgtctacgtcgccgtcgagaaggacgagcagtagtcatttggttggctaagctggcattcgactaagtggctggccggggaaaccaacctggccgcgaaggctcgcgcaagcccatttcccaaaacaagctcatcccgcagaggggggatccgcaatggcgcggatcccccctcttctttttcgcatgaatccccctccttttcattttcgcgaagtgaatgccagttgggagcagaaatggtcaatgcccgattcggaaaatgccagttgagggtagaaatggccggataaccgcgatttctcgcgccgcctttcgaccatttcggcccccaactggcatctacggcgcccttttcgcgaatcacccacgtcaggacctcttcgcgaaccgcctacaaatgccgcaagttgacacggtagcggcgcaggcgctcctcaccaatgtcggagatgacggcgccgagagccgcaaggagcccctcgcgctgctcgggcaaccgaccgtgcaacatcaccgggttggacgcccccagcatggcgaactccacaggaatatccagctgggcgaccagctccttcacctcctcatatttctccacctcggccgcctcgcgccaccgcccggcctcgatctcccggtacagcgccgagctacggtagatggtgagcatgttcgcgccgatgagccaggggctcgtccggttgcagacatccgccgtcgctcgcgctcccaccaggccgcgtccggcgcccgagatgccaaccaggtagaagaacgcgtaagaaatccccacagcatcgagccgtgcgcactgctcaacaatctcctcggccccgtagcctttgtccatgaacgcaagggcctcctcgtcaccggtctcgatgccgatggtgagaccgtcgaacccagccgccgcgagctcggcgagctcctcgtcggtctttgccgccacatcggtcacacgggagaagcacccgatgctcttgcattgcgggaagtaggtacgaacgagcgacgcgatcttccgcaaatgcagcgccttcagcccgaaggggttcgctcccgcaagaaatatccgactcgcgcgggcgccgggcagctcgaacaggtgctcttcggctttccgaagcggatcgtgataccacgtctgcgcttccagaagatccgcctcgatgtcctccaagggcgacgggcgaaacttgaacggcaggtcctcgtacaacgtgcagaacttgcaccggtgatgcgtgcaacccgccgtcgcctcgatgatgagcgagtccgcctcgtagggcggccgccagatcgttcccgtgtaatgcatggcactcctttctctcatgcttggtgcgattgggaaaatcgttgtcgacattaaatccttcactgacacgccttcaaggcgctcatcgtcgatttcgctccccaccccatgcgccatcgatttcgctccctgtcatcatgctaggattggtattcgatttgaagtactgtctttttctgaagtagaagagaggaagatctatggcgcgaaggcaaggcgaagaggtggagcgctgcaagtccgtctccaccatccagcgcatgatcggaggaaaatggaagatcgagatcctcttctatatcgcccttaaagacgtgcggcatttcgggcagctcaggcgctgcatcgggaacatatccgagtccaccctctccaagcagctcagggagctggtggacgacggcttccttgtgcgcaccgatttcggcgaggtgcccccgcgcgtggaatacaccctcacccctcaaggtgagagcttcgtgcccatcctcctctccatgaagcagtggggcgaaaaagagctgcggctttaaggcagcgattcgaatggccgcactcgctttttcgggactagtcctgcttgcaacttctcaaaattttcgagaagttgcagcgctatcttctcgaaaatcttgagaagtcgcttaactgggttttcaccgagatgccgaggacgaggcgctcgaacttcggaatccaacgtcctggaactagggcaagtacggtcggcatcaaatccgctgcccctattcgacaacaatagagccgatgatgaggaactcgcgatccgacttcaccttgagacggctgctgccgcaatcggggcacgcaacctgcttccatccccatatatcggtgccaaaaaccagcaggcaatcctcgcattgcagcttcagaggcaccttagccatgataaggcgagcccttcggcgatagtcccccgcgagaggaattgaaagcagctctccatgagctcgtccactacatcgcgcagatcccccacgaccagcgaaacctcgatcacccaacttgcgttgttttccgcagcatagacgagcacagtatctacctcattggtgagaatggacatctcgtgcatggcgatctcctcctcaaagaccccgaccgcctttatgaacggagctttttacagcctcatttatctgtgctcaaggcgatcctggcgaaacaagaaacaagcagcacggcgagcaatctgcgaccctctcccgaatttatctcgctcgcacagccagcttatcggccaatctcttccagcttgtccagaagctcctggcgactgtgcacgttagcctttccgtatatcctacgcatatgagtctttactgtgttgggcgacaaaatgaacttctcggcaatatagggaacactgcgtccctcggcgaagagtgcgagaatctctttctctcgttcagtgagcccgcagtcatccgctagacgccttacgttatcgggaaccaccgtcgaaagcccgtccggcacgccactcggaaccggaaagtccagcaccccctccgccttcacaccctcacgagaagaagccgatcgcacagatcggccctcctcacccccgtcgagacgaaacatccgcattaggccgatgactgccacaagctgcagataattaagaccgagcatcaccggattgcccgctaaacttccgtagtcccccactagcaccccggcggcctctcctgccgtaatgcctacctgctcggcgaacatggcaacggcgatcaagagggcagggcatacctgacccctctgaatttgctgcgccataatagtccataccagaatatcgaaagccgcgtatccaacgggaatgcagatgcgggcaaaaagccggatgtcctcagagtacgcacctaccgtcattgcgagaagtcccaccgcaataagggacacgcatatactgaacaaatgctctatcttctgcccatgactggtgaaacttacgaagaagaagagcaacgccgttacgtcccgcattcctataacgtctgccatacccggaacgccactggaagggatctgcggggagaactcgaagccgtacatgaggccgaaaacagagcagaacacaaggataaacacaataaaggagggccgtatgcccaaaagcctctctttcgcgctcttccgcccacaagaggagtcgacctcggcggttgcctcgacaggaatgcggaacgtcgccttgccttgcaggcgaaacaagacatagtagcccgcaaaggagagcaggggcataagacccaccgacaaggccgccgccacaggaagaagcccctctagaagaagattgcccgcaaggcccaaagcccatgctcccgaaatatgagtgagcgtcttctgagttccctgagctgtggccacgcgtccccatagaataatgaggggagccatagcgccccccaccaagcaacagcccgcgagacacaccggtgtcgccgagcccagatagcctccggtcacagccacgccgcccacgacgcctattgcagcgcagacggcaaacatcctccaacgccaaagttcatcgtcgttcccgcgaaccagggcaacgacgatgaggagaagggcaacgcagcttgagacaagaatgacgagcggcgccagccaagccagcgcctcatgctccgcagagcttgccgcatccggcaacagcgtgtcgccgaacatcgcgcgatccatccatatccagaaaaatgcagcgccgacaatgctcggccacgacgccgaacccgttaacgctttgatgcgccttggctttttcttcgactgccccatgattccccttcggaaacgaccgcgaatgctcaagtgatcagactgcggcataccaaggcgaattctaacatagtcatccaacgcatcttggcgattcaatgctcccaactggcctttttcctcgtaatccttttcgggtgacattttccgaacggcggccaattcactattttgggaggtcgcctctctcgtcagcacaggccaatatgcttacaggccgtacgaaggcacgaaaaagaagcggccacagacccaaaggaggaacctatggaacagaggaagcggacaatgaaaaagggagcaacgaaggtaaccgcgatcgccctggcgatcgccgccgtcatggcacttgccctttgcggctgcgctagccaaggagacacatcgaaaagcgacattcccgcagaggatcgaaccaatgccaagcaggtgatcatggccgccggcgacttgttcaccatgatggacctgggcctcaccgacgccgacagccccgctaccatctcccagaacgatcccgccttcgcggaattttggagcgagcttctccaatacaaaaaggttgccgacctcgatgtgcagaatgccgagatcgtcaccgacatcaccgctgtcgaggctgccacagcacgcgaggacagcactcagacgaactaccgctacgccataaagagcgccaccatgaccgtcaacggcaagacgattacctacgatgcctccaagggcttctcggcataacagtcacacagtatcccgaaacatatagaggagaacactatggaaaacctgtctcgtagaagctttctcgccttgggcaccctcggcgccgccagcgccgccgcggccggtcttgccggctgcgctccgcagaccaagggctccgcatcgaccgatttggccactaccggcaaccgctcgtcggagcccatcaacagctcgggcatcgaggtgaaccccgatgaggtcgtcgaggtcatcgagaccaacatcgtcattgtaggcggcggtctttccggacttgctgccgccgtgcaggccgccgagaacggtgacgatttcattcttcttgaggcccaagccacgctcggcggtaacggccaaggcgttgagggcaccttcgccgtggactcccgtttccagaaagagcagaacatccaagtcgatcgctccatcatcatgcaggaggagctcggaaaaactcaatgggtggccgatggcctgctgtacaaggatctttgcgacaactcggcggcaaacatcgaatggctcgtcgatcaatgcggttgcgagctggaaggcaccatcgacaactaccccttcggcgtcagcgtcggctccgttgacaccttccactggtggaaggacggcgcggcctacgtgggctacgtgatgcccatgcagcagaagctgcgcgatgcggcggcggacatccgtctcaacaaccgcgccctggaattcagctatgacgagaacggcgccatcaacggcgtgtacgccatcgacgccttcggcgacttggtgcagtaccaggccaaagccgtcatcgtggccacgggcggcttcgccgacgacgaccgccgcatgaccaaatggggcttcgatctgaccaccctcgagcgcatcggcacgccgggccacttcggcgacggcatcaacatgactatcgccgccggcgccgaggagttcaacggcgtatgctacttgaaatacaaccgcatcagccatcaggtggagaagttcggcgcctattggggagctttcgctttcggcggccccatgctttgggttaaccaggactgcgagaggttcgtcgacgaaggctacgttttccgtgtcggcaacgccatcacccagtcggcagccgtccacggccagaatggcgtggcctacagcattttcgatcaggctatttacgagaagcagctggccgacaatgccgatgccgccgcggagtggaaggtggacctcgccgagcagatggaggccatcatcgccgccggcgacgacgtctggcgggccgacacacttgccgaggcggctgaagcggcagggttagatgccgctgcgctgcaggcggccgtcgacgagtacaacgcgaagtgcgccgccggcaaggacgacctctacggcaaggacgcccagtacctcatcgccatccaacagggccccttctacatcgcgaaaatccacgaggccatcgagggcccgctcggcggcgtgaagacgaatcgcaagttccagcccgtgctgaccgatggcggcgtgctcgataacgtctgggtcatcggcctcgacggcatcatgctctaccgcgacgtctatcccatcgatgtgcccggcagcgccagcgctgaatgcatcaacggcggtcgctcggcagccaaccaggcccacgaactcgtgcaggcctaagcacccttaagagacaatccccatctccctcccatccggcccgagcgactcccctcccctcgctcgggccggatattcctgaccaaaggaaacctgtgcgcacttgcgaaatgacttagcgaatgaaactccattgcgatcaaattcctcaccaccatagtcccttttttcgttttcgcgaagtagatgccagttgagggcagaaatggtcaatgccagagtcgaaaaatgccagttgaggacagaaatggccggataaccgcgatttttcgccctgcctttcgaccgtttcagccctcaactggcatcttcagcgcccttttcgcaaatcacccacgtcggcaccttttcgcgaacctcccacagatgccgcaagttgacacggtagcggcgcaggcgctcctcgccgaagtcggagatgacggcatcaagggccgcgaggatttgctcgcgctgcccgggcgggtccgacactgcattgggaacatatccgagtccacgctttccaagcagctcagagagctcgtcgacgacggctttctcacgcgcaccgacttcggcgaggtgcctccgcgcgtggaatacgccctcaccccacaaggcaagagcttcgtgcccattctcctcgccatgaagcagtggggcgaaaaggagctggggctttaaagcacctattggctttctcaaaccatctaccgtgtttttctcggagccgttaccatcaagcagcctctcaaaaatcttgagaagctggcaccatagcctctcaagatttttgagagg

SEQ ID NO: 10638 - DNA, 6074 bp, Unknown
  gut microbiota DNA sequence
actcttgcaagaacggctgaaaaatttcacctcgcgctgcgagacggaacggagcgcaaaagacggccgacccgaggggcgaccgtcttgcgtgagatctcggttgccgctggaaggagggagggaggaagggcggctccgaggaaggtttcgagctttgctctgccatcataatacggaaaagcccgtctaggcgtatcacctaaacgggctatattgcggaacacagcagcggccaatcgccacttggaatccgaccgcgcgcagcagatgcggcacgggtcgcgaatcgctactcgtccttcgccgcgcgggccttcgcctgctgatcggccacggcctcctctagaagcgtgagctgcgcggtcgccttcttggtaccgcgaaacaccataagcacgtacacgagcagggccacccacagaagcgcgtaggccgcgatgatgtagggggcggagggcaggatggtggaatagatatcggcaagaatgggattcatggctctctcctatcgttcgtcgtcgagggtttccttgagcgcttcgacgcgctgggtgaggcgtacctggttgaaacgcgtgcggtacagtacgaagcccacgagcagcatgccgagcgcgcacaggcccacgcacatgcccatctcggggctcataccgccctcgcgcagcaccacggggtgaatggacgacggaatgaggcgcgtgatcatgaagcagatgggtacgtcaatggtggcaatgatggctaccaccgcagcaaatgtcgcgcggcgctcgggctcgtccacggagcttcgcagcacgaagtaggcgatcacgatgagcatgagaatcaggtaggtcgtgagccgcggctcccagctccaccacacgccccattcgaagcgcgtccacatctcgccggtgatcatggtgagcaccacgaacagaagcgcgatctccaggcaaatgcgcgagcaagtgtcgaagcgctggttcttcgtcatgaggaaccgcacggcgtagtagcacccgaagccgagcgcgatgaacgacgtgatggccacgggcatgtggaagtagaagatcttctgggacaggagcatcttctgggacaccatcacgtccccgatgagctcggcgccgttcaccgcggcgcccccgacaggggccacgtagaagaacgccatgaggaacccgacggtggaaagcaccgcgcccgcgatgagcgccggcaccaccagcttgtcgggccactgccccgcctcgggcagcttcaacttcttatcagtcactcagtcctcctttagttgacgacgaaatcgtagagaacccacgaagccaggatcatgatcacatcgtagccagcgccaagggccagcgacgtaagaaacccgtcggcgaacacatctccgcccacgagcgcgcaggtggtggccgacacgcaggcgtacagaagcgggaagatcacgggcacgaacagaagcgccagtatgacgtccttgccgcgggtggccgccgtgatggtggagagcatggtgccgatgccggcgataccgatgctgcccacgacaagcggcaccacgagcagccagcccgtatcggccggcgccgcgaagctggagaagaacacccagtacagcggcacggcgatcacttccaccaatgccaaaaacaccaaattcgacgtcgccttggccagaaagatcacgccgcggtcgagcggagccagaagcaggccttccaagcagccgttctccgtctccttggaaaacgagcggttgagccccagaagcgacgtgaacaccacgagcgcccacagaaggccgccggacacctcgaggaactcggatcccggacgggcgaaggagagcgccacgccgaacaccacgatgacgaggaaggcgtagatgcccatggacacgatcatgtccttggtgcgaaactccgccttcaagtccttcgacagcagcgttttgtactgggtgaatgtggagggagctttgcagagagcgctgcgcgtccctccgcgatcagccgcgcggtactctgattcgctcagacagtcctcgcttggcgaaacagcccactgggctgcttcagtcgctgcggaacttgctcggtcagagcaccccacgtctaatcgctgctcttcctcagccatctagctcacccccatccctaccgtcgtgcggtacaaatcggcgaactcgtcggggctcatctgatccttctcgccgaagtgaaccacgcggccgcgagcgagcacgagcacgtggctcgcgagcgccaggcccttgtccaagtcgtggctcaccatgacgaacgtgcgaccctcgcgcaccgaggcgatcagctcgtcgaaaatgtgcatggcatgggggtcgagccccgagtagggctcgtcgagcagcaccaccgacgggtcgttcacgagcgcccgggcgatggagacgcgctgggtcatgccgcgcgagaacgtgcgcacccgatcgagccggcgatgtttgagccccacggcatcgagaagctctatcacgcggtgctcagggtcggccacgccgtagagcttcgcatatagaagcaagttctcctcggcggtgaggtcggggtagagcatcgggttgtgcgagatgagcccgatggcctcgcgcacgcgctcgggctcctccttcacgtcgatgcccgcgagcgtcaccgttccctccgtgggccgcgacagtgtggcgagcatgcgcagaagcgtggtcttgcccgccccgttgggcccgaacaccgagaggaacgcaccctcaggcagcgcgaacgacacgtcgtcgacggccttgcggccgccgaacgatttcgtcaggtgatcgacggtaagcgccgtttccacgggactactcccccgccttcgagccggcgtcggcgtcggcggcatcggcggcgtccgcggcatccgcgggcgcttcggccactgccgccgcgtccgcatcggccgccgcgtcgccctcggcatcttccacgagcgccacttccacagccgccgtctcctcgacgacgctcttgcggggcgccgcgtcgcgcgaggccttcccgcgctccttcggctcggcctccgccagctcggcagcgggcacatcgcccacggccgggccgccgcgacggcgctcggcgcgcttggcgaacagcgggatcaggcagcccaccatgagcagggcgaagcccacccacacgaacgagatgagcgggttcacgcgcacgtccatcgagaagtcgccctcgtcgttcacgccgcggtacaccacgaacaagtcctccagcgggaacccgatgacgctcgcctccagcttctgctgctgggtggcgctcaccagctgcacggccggattcaccgtgcccacgaactgaccgtccttcgtcacatcgaaggtgagcgcgtagcgcacgttgccgttgccgagctcatcgatggagttgcccgtataggtgagctggaagtcctggatgtcgaaggtctcggaaaccgaatcgctctcctcgtcgtagggcagataccccgtgatctcggtcacgtacatggacgagccgatgaggcccaccagaatgatggccatggcggcatgggccaccgagccgccgaacagggccaggcggcggcgcagcttggcgccatcgacccgcttgagcgagcggacggccatgaacagcgcgctgaagaacagaaggctcgccacggcgaagcccaccacggccaggccgttgtagtagatggggttaccctgctccagcaggcccgaggcctgggtgccgcccatgtcgatcatggcctggtagctgggcagaaggtatgtggcgaaatagatcatgagcacgatgaacagcacgagcgcgcacagcgccggcacgcgggcatttcgccagaacgccttcttgtcggtgcggcgccagcccagaagcgggcagatggcgagcacggccagataggcgatgcccaagggccgggcgatggcgttgtaggtgccggccgacagggactggccgccgaagggcagccagctcggcagggccgaggacaccgtcatgtaggccagaagcacggcgaacacgatcatgatgaggttgttcacgtagtaggccgcttccttcgacatcatcgactcgatgtcgtcatcggccgcatccgtcgcaccgaagttcttgcggcgcacgataaggcccacgatgccggccagaagcgagcagatgatgagcgcgccgaacatgacgagcgaaaccgggtcgccctcgaaggcgtgcaccgactgcacgaggcccgaacgggtgatgaaggtgcccagcaccacgaagcagaaggtgaggcaggcgcagaacacgctccagcgcttgaaagcgccgcgctggcggtacactgtgaacgagtggatgagcgccacgcccacgagccacgggagcagactggcgttctccaccggatcccagccccagtagccgccccagccgagcaccacgtaggcccacacggcgcccagcccgatgccgatgccgagcagaagccacgagaacatgaggtagggcgtcgagcggttcacccattccgtggaatcgtcgttgacgatgagcgcggagatggcgtaagcgaacggaatggtgaggcccgcgtagccgatgaacagcgtcggcgggtgaatcgccatggcccagtgctccagaagcgcgttcatggaacgggccgaggccatgaccgacagcgtgccatcgtcgccgaagtagcgcgagtcggtcacgatgaagggcatgttgccctcggagaacagcagtaccgacacgaaggccgtcagcacgagcgaggaaatggcgagcgcgccgttatcgagcgggcgcgcattcttgcgcgtggcgaacacgagcaccgcgttgaacacggcaatgagccacgcccagaacagcagcgagccctgacgccccgcccaaagaccggcgagcttgtagagccacgcctcgggggccgtggaggtggagcggttgtccagcacgtactggatggtgttgtcgcccgagaagaagcaccacacgagcacggcgcagcacaccgtgagcgccaccgccgtgagcaccgcggccacccgtccgccccaggcgaaggtgtcggagcgctcgaaggagcgcttcttgtaaaggatatgggccacgcccaggcacagcaccgagatgacgcagccggcaaaggccacgagcaggccgagaagtccgatcatcgacatgggctagccctccagtgcgacatcggtggcggcgaacttgccgtcggcgccgagggagcccgtgagcaccacagcggaaccgtcggcgatcccgtcggaaagcgcgccctcgaagacaaccggcatcgagtcgccggtctccgcgtcgacgaggatgaagcggtcgccctggcctgcggccttaagcgacccggcgccgaccgagccggccaccttcacgacgttgccgtagacgctctcgccgtaaccgagcagctgttccaccgtaagggcgctgtcggcgttctcgtacttcgaggggcacttcgtcaccagctcggagcactccagcacgcccgcatcgttgatcttgcccgtgcaaatggcggttacgtcgttgccgaacgtggacgaggcggcgccgtcgtagcgcacctcaagctgcgtggcggggtcgccctcagggtcgtaaatcttgaaagtgagcacgtcattgctcgtggagaaggaatcctgcaccacgttgcccgacacttgcaccttctggcccgcctggggattctcggcggcctccgcgatgctcatggtcgtggcggcggtgttgcctcccacgaatgcgagcaccaagataagcacgatgacgatgacgccggagacggcgatcatcctcttcttcatcttcgcgttcatagtcctcctgtttctaaggtaccaaagcggtgtggacctgcctccccgaaggcccgaaaaattaccaacggccagtatcgcccaagccatgcagaaccgcgctttagattccaccgaaaccagcagatcagcgcaatcgccatactttcgcaataagggggtgtttcggtcaggattg

SEQ ID NO: 10639 - DNA, 3572 bp, Unknown
  gut microbiota DNA sequence
ctgctttgaaaattgtcctatgataatccttgcattgtcataggacaatttgctatagtgcttcccgtggaatttggccaattctcaaggattaccagaagaggggatagcgacctgcgcagttgaggagacgcaggcgcaaagagtccaagacccaccggcgcagcggcattgtcgcaatccattcgcggcgtatgcgttcgccgcaggtgcgcgtggcgtctcgcggctcgatccctgggaattcaaaggaggagagatgtccgaagcaacccatcccacgggcggactcactcgacgcggtttcttgaagaccaccggcgccgcagccgcgggcctcgcctgcgcgggcgctgtgggcgtggccattggcggcggcgcgctggcaccgacgaaagccacagctgacgccggcgagaaaacgatttacaccctgcaccagttcatgtgccagggaaattgttccatcaagtgcacggtgcgcgacggccatctggcgaagatcgaaccgagcgatgccgttgatccgaaatatcggcgctgctgcatgaagggtctttccgagatagagcatgtgtatagtccgctgcgtctgcaaacgcccctgaagcgcgttggcgaacgtggagaaggtaagttcgagaagatcagctgggacgaggctatggagatcgtcggcaccgagctcaagcgcgcctgggacgcttacggcaaggagtcggtctacatttccgcctctaacgaaccgcgctttggcatgcttgcctcgattctgggtgccggcacgggtgtggagccgggtatcgatcgaggtatcggcaacggtgtggatcctgccattggcggcggtggctttgcgtcgtgctccaacgagacgcgggactgggtgaacgcgaagactattatcttgagcggtatcaacttcttggagacgtcactcatgcgttccgatgatttcttcgacgcaaaacgagccggcgctgaaatcattgtcgtggatccgcatttctcgactacggcatcgaaggcaaatcagtggattcctctcaaacccggaactgatggcgcgctgtacttgtcgatgatctcgcatatcatcgacaacaaatggtacaacgaggactatatgcgcgcccatacttctatgccgttcctcttggatccggctaccggcgaattgctgcgtagcggaaagacgcccgagatcgatcctgccaccggcgaggccgccgatcccgccgactatctcgtatgggacacggcgactaatgcgactgttccctatgacgctcccggtgtttctgccgcgcttgaaggtatctatgaggtcgcaggccagaaagtcgttccggtgttcgagcagcttaaggccagtcagaaagactacaccaccgcctgggccgcggagaaatgcgatatcgatcaggaggtcatcgaggcgctggcggaaaagtacgctaccggcggtcctgcctatctgtgcttcggctacggtggttcggacaagttctcgaaccccgatatccagggtcacgccatggtaattctcacggcgctcacggggcagattggtaagcctggtgcggctttggggcaccccggcggcggtcagggctatggggcggcactggcggcgtggcccttgccggaagatatggtgctggcagacattcccgtgcgtgccgatcgtttcgccgatacggacgcgggtgtgcatgtcatcatatcgctcggcaacaccttgcagcagtactacgcgaacatgaacaagacgcgcgaatggctgccgaagctcgacttcattttgcatgtgggcatgtacgacgaggattccgcggcttttgccgatgtggtgctgccggtatgctcgaagttcgaggacacggtggagcacagcattgtgcgaggcggctacaaccatattcagctgtcgcagaaatgcattgatccgcttttcgagtcgaagcccgattacgatgtcatgtaccttatcgccaaatcggtgggtctcgaatcggtgcttcccgaagacgccgagcaactggcccgcttccagatcgatgaggcgaccgatccgctggtggccggcatcaccttcgacgctctcgtgcagaaccacaatacgatgtccctggcgggaatcgaggagccgcgcatcgggtacgccgatctccaattccccacgccaacggggcgtatggagatctactacgagccccagcaccattcgggtcaggcgcttccccagtgggaggagaacaacgaggtcttcgacggcaatccgcttatggaaaagtatccgctgcagcttgcccaaacccgcacgcgattcttcgtgcactcccatttccgcggtgcggcgtggctcgcgcagttctacacgccgcgtatcgagctgaatccgcaggcgatggccgagcgcggacttgaggatggcgatgccgtggaagtcttcaatgatcgcggatcgttcagttgccaggctttcgggaacaacgccattcgtcccacctccgcgcgcatttacgaagccgcgtggtcgaaggattgcatctcggggaatccgcaaaacgtgacgaacgatcatgtgaacgaacgcgacgccgaccttcttaccggcgcccccattcccttcaacgacacgctagtggaagtgcgaaaggcttaaggtgactaccatgacgaaactgggaattgccatcgatctcgagcgttgtgttggctgccatacctgtgcgaacgcttgcaaaatgcagaacaacgtgcccacgggaatgctttggaaccgcgttaccaccgaggggtgcgacgtgatcgacggagccgtcggcacctatccgaacctgacgcgcacgttcctccccgttgcctgccagcattgcgagaatcctgcctgtcagcgcgtgtgcccgacgggtgccacttacaaggacgagatgggccgcgtggagatcgactatgacaagtgcatcggctgccgcatgtgcatggccgcctgtccctacaatgcgcgctctttcaactgggaagagccggtgcgcgacgtggacttcaactacggcgatgcagaagtgccggtgcgcccgcgcggtgtggccgagaaatgcacgctgtgccgcgagcgaaccgatcgcggcgaggagcccatgtgcgtcgtgtgctgtccgacccatgcccgcatctttggcgacctggacgatccggcctccgaggtgtcgaaggccgtcgtcgagcgcaaggctcacgcgcttctcgaagagcagggcacgcgtccgcaggtctactacttcgattaatgcgatcaatgcgcggcggggcggttgcgccgacggcctgataagccggtccggcagctcttttcgggggtttgacgagatcccctggggaaatgtggccccttgtggctggcgccccgccttctctccctcattctgaaaggttcgagaaatggaacttctaaccaagaacaagctgctcacggcggtacttgcggtgctgtcggtggcgggtatcggagcctacatcttccagctggccggcggtctggcggtgacgggcatgtccaacggcgt

SEQ ID NO: 10640 - DNA, 41950 bp, Unknown
  gut microbiota DNA sequence
gtcctcatcgacctgggcggcatccagcgcatctggcgcattgtgaccggcccgaaccccacttcgcctttggtgtgggacatctgcgtcatcacgctgtatctggtcatcaacgtgctgtacttggtgaacatgcgccgtggcaacgaccacgcggtgtccattatctcgcggttcgccctgccctgcgccattctggtgcactcggtgaccgcctggatcttcggcctgcagatcgccaaggagggctggtactcggccatcatggcgcccatcttcgtggcctcggccatggactcgggtctggcgctgttgctgtgcgtgcttgcggcgcttaagaaggcgcgtctgttcgacacctcccgcgagcttatggcgtcgctggctgggcttctggccacctgcatcgctgtagacgcgttcttcatcttctgcgaggtactgaccatggcttatcccggggcggccggcgctgaaacgctggcgctcatgacgagcgggcctacgtcgccgttcttctggttcgagatcgtcggcggcctggttgtcccgttcctcgtgctggtgttcgcgaagaaccgcgagcgcacggggctcgtggtaggggcgagcgtgctcgtcatcgccggcgtgctctgcaagcgtttgtggcttctattcacctcgttcatcgtgccgaacgtggagggcgccccgggcatcatgtccgacggcggctgggcgcttctcggctcctacgcaccgacggtgcccgaagtgctgatcgtgctgggcgtcgtgtcggtgggcacgctgggatttatggccctgggctcgaagccgctcgtgcccgcgaccgagaccgagcgcgtctcctctcgcgccgctgcagcggccgagcccgatagcgacttcgagccgctgaccgcataagccacaagtagatagcagcattagtcttgggcgacccgtcaatagctggcgggtctccttgtgctatactcgcttggaagcttggtaccaagcgcttggtgaggaggaaagcatggcggaggcggctcgcatggcgccgcagcggatcaaggtgtccagcaagcggcagatcactattccggcaaaagcttacaaggatatgggcttcaccgagtacgctctcatcgagcagaccgacgaggggttgctcatcaagccgctgaacgtggaggacgagggaatgtcccttgacgtgctgcgccggcttatcgccgaaggctacgagggcgaggcgctggttgagcgctacgctgccgtgtgcccccatgtgattaagttcgaagacgcacgggcacgcacggccgtggacgggggcgacgcgagcgaggctaagcggttgaacgaggccgcgaataaggactgcgtgtccgattttggcatggcgcgcgaggcccgcgagaccgaaagggcgcatgtgcttgaagccgtcgcctccgagtgtgcccgtttcgccgccatcacgaagggctacgtgtttggctcgttcgcccgcggggatttcgccgccgaaagcgacgtggatgttcgcctcgagtacgatggggtggcccccttcaccctgttcgaggtgtcccagttccaaaagcacctcgaacgcgcctgcgggcgcgccgtcgacgtggtgacggccaagcagataaagaatcccaacctcgccgcggccatagagcgggagaaggtgctggtctatgagcgctaaggccactgatctcgcccgcattcaggaaatgttcgatctcatcacggagacccaagggcaaattgagcgtttgggcatcaccgaggagcgcttcaaaaggcccgctactgatgcggatcggcttttctcggaggccatcatgaatcgggtgctccgggtgactgaggaagccggttcgctcagcgatgaagcccttgcgcactacgaattcgagcgccgggctatcaagggcgttcgcaatcggcttgcccacgcctatggtgatgtagacaccgatattgtctgggatgtggtgcaaggggactttcccaagttgctagaaggttgtcaggcgtactgcgatgacttgggtctggagctggagtctgctcgacgctagagctatcaccgttattaacaggaaggcaacagcattatttcgcgcgggtgctcttgttgacagaatggtggcaagcttcatctctgttcaaccgattgttttcaaggagcccccgacaggcttggttttgtgcgctcgctttaccatgacgcccataggagatagcttcgatgtcgagtgcgccatgggaggggccggcgcccgtcggcatcgggtcgaggcgagaacgccgtacgggtcgggcgataggagcagcgtcatggagaagtttctgaacttggtgcgatcgaataacatggtgcaggcggtgctttgcatcgcattcggtctgtttctgatgatctatccgtccattaccgtgcagggtgtcatcttgctgttcggcgtggcgctcgcggtcatgggcgcggcggggcttgtgtcgtacttccgtcagcgcagtgtgcgctaccgcgattcgggcacccttatgtcggcggtgttctacgtcatcatcgcgctcattgcgtttatctttccgaaagtgatcgccgggttcttttcggtggtgctcggcgtggtgctcattttgctcgctatcgtgaacgtggtgcgcgccttcgggctgcgtgctttcggcagcggcatctggattgccgtgctggcgacggcggtgctggtgggtatcggcggtgtgcttatcgtggtgaacccgtggggcgcctccatgaccttcgtgctcgtgctgggcgcgacgttcatcgtcaacggcgcggtggatctgttcatcgagtggtacacccgcgattctgagaagaaggccggcgggatttcgcgccggtagacgtctctgctgcggggcgagcacctcgcgggacagcgcgcccctgggccgccccggcgccgtgcggcgtggcaaatcgcgcaggtcgggatcgtctacaccctcggcgccgacgcgttggacacgcccttcgtttttgccgatgcctgcccattaagggcttctatatccgttttcccttgcgacccccgtgcggacgggggtctttgctatcatgaacgccacgcgagggcggcggcgctttagggcggtgcggccaggctcgttcaagtttttggtacacgaaaggaaaagcgatgtctgaagagaacagcaatcttgccgagattcagaagcatcgtgagcagatcgacgaaatcgaccgcgagatcgtcgcgcttctgaacaagcgcgccggtcattcgctggtcattcgcggtctgaaacccggtgcgcatctgggtctgtacgacgcgcgccgcgaggaggaaatcttcgcgcgggtggatagctacaacgaggggccgctctataacgagaacctccgggagatttacgctaccatcttgaagatcatgaaggagacgccgtccgtatgagcgaagtgaagattgcccccattcccgatctcggccagcgcacggacgagatcaccatttatgccgggccctgctcggtggaatctgccgagcagttcgaggaagtggccgagtgcgtggccgatttgggcttgcactggattcgcggcggcgcgtttaagccgcgcactaacccgcattctttccaaggtctcggcgaagaggccctgaagatcatgaaggccgccggcgataagtacaacctgaagacgctcaccgaggtgatggactcggcccattgccagctcgtgagcgattatgtggacggcctgcaggtgggcgcccgcaacttccagaacttcagcctgctgaagaaaatcggccaggtgaccgccgatacgcatcagatggtgctgtacaagcgcggtttcgccggcaccattgccgagtggctcgccgccaccgactacatcaccgattgcggcaacgacaacgtggtgctctgcgagcgcggtatccgcaccttcgagacggccacgcgcttcacgctggacatcgccgccgtgccggtcatccacaagcagtcgctgtacccggtgtgcatcgacgtgtcgcatccggccggccagcgcgatttggtgccgtcgctggcgaaggccgccgtggctgccggggccgactcgctcatgatcgaggtgcaccccaacccgccggtggcgctgtccgacggtccccagcagctgacgccggcccagttccgcgagcttatcgccgagctgcgcgagttggcggcttgcctgggcaagaagatcgtctaaggcgcttcgaccgccttctggaatggaagcggccgcccttccgagtggagggcggccgctttgtgcttaggggtttgacgcgggctcgcgcgcagggtgcgggcttggcgcgctacttgtctttgcgagcttcgcgacgggccttccgagcttccttacgggcctcgcggagttgcttgcgagtctcggcggctaacgagtcgcgcagagcctccccgcgttccacttcggcgttcacctcgtcggcgtcccagcggtagatgatgcaggtctcgtcgaactgggcgtccagggcgtcctcgttgtcctccttggcgagcatcacgagcgccgtcgcgcccggcgtaagctcgctggcgcagtattccatgagggagtcgtcatcatcgatgtccttgtcgtccatggccataccggccacaaggccgatgccggcgcccagcagcacgccgactgggccgccgagcaagccgacgacagcgccgatgaccccgccgaaagcggtgttgtcggtctcgtcgtagccgtcctggtatccgtcgggcaccatgatggctccgtctacgttcttcactaccgccatttccaaaatagtgaagtcggccgtcgcctcgttgtccttcaggcggttgaactcctcgtaggccttcccctcgtcttcgaaggtgaccagaaccacgttatccatgagcgctcctttgtctcgctgcgaatgggccgccgggctgcgcgcgtcgcatgggcggcacggccggcgggcaatgcgacggcgccgcagagcgccgcgcatcttcgagtataggggagcgaggaggtcgaaagagtcgctgccctcgtctgtcacgagagcgttgcggggacgggcgagaggttctgcgcgcatttttttgcgagggcctgcgccaagcccctcggtgcttcgtgtgcgaaatgggcaaaacggggcacttatcgtagttttcgaggaagcaagggtgctctccttcgacggactgaacgagaaatccctgttcagtgtcatcgcgaggataaagcgtccacttttgggctacgagaagtgccccattttgcacatttggagccgacagcgcatagggcggttgcagacgcgggcgagccgactgcggaggtgcaaccccagaggccgcaaccatgagtgaaacggttggcacagcggagagttggtgaatctgccgttcgtgcgtcctcgatacgcctgggccgttaaactgccctgcatgcgattcgttctctacggcacatcctcattctcgtattggctgtcggccccttgccggccgtcgtcaaagagcgctgtgggaacaaatgcattgaagcggtgtgtcccgacggcgcggacggttgcttatctggagaagattttccctcagattccgcagccctatcacgcgctcgtacccgatcatcgcaaaagcaccgttccccaggcagtaactcatgtgtcgatttatccctatcgggagaagccgttcgttcgcatcgctgacggcgtgtatgcaagttgccccgagttgtgcttcgtgcagctcgcacttgttcttcctttgcacgagcttttaaaagcgggcgatgccctatgcgggatgttcttcatcgacccgtcatcgcgcaacggactgggcagtagagcgcctttgacctcgaaacgtcgcatcgagtcgtttatccgccgcaacgctgggctacgtggatcggcggcagcgaagtcggcgctgcgattcgtggtggataatgccgcttcaccgccagaggcgtttctttggtccgtgctgagcattccccatcgttatggcggctatgccctccccggattggaaatgaatcgacgcgtgaggccgagcaaaaaagcgcgcaagatcgccaaaagggaaacactcgtccccgacctctgtcacagcgagtcgcgcctggcgatcgagtacgattcgaatgccgagcatcttacttcgcgacagatcgcgaaggattcctcgaagcggttggcattggaggccgatggctacaaggtgatatcggtgacgacacggcagctgtacgatcgcagtgagatgcgcagcgtggcccatgaggcgggggctcgcatgagcaggcgcattcaaattcgcgccaagagtttcgggaacgctcagaggaaactgtatgcgacgggatggtctctgaaggcctaccatcgtcgcgaatggctgaagggggaggtttccgaaggcgggttgaaggagtgcgtccagaactccgaaagcggattggaagattgtatctgggacggatctgcctgggattgagcggcggctgtctcggggtgttcttgtcgagcgcgaccgaggcgatctgttggctgcgcaccgcgatggcttgtcggtttcgggcggcgacgatctgcgaagtggtactcgcattgcgaggaggtgcctcgttttgtgcaaaatgccccacttctcgtagccatttggactagatggggcgacgcggacaatttcgacctgggaaaatggttccgttttgaagttgagctgatcctggagcctggtaaaactacgagaagtaccccgttttgcacatttttcgctctactgcttgggcaaagttctttgtcggcgcaacgggtgaaaactagagcccgatgtgctggctcgttggcaggttgccgaattgaggggttgcgcgatcgggattctgtgctaaagtacgcaaccagcaattgaatataccttaaaccgatgaggcgaaagtcaagccatccgggcactcacagagagcgggcgcagctgagattcccgcagaacgccagagggtaaatggatcgccgagggaaaggggaaaggcccgccgtcgtttgttccgacgaggccgagtatctggaccgtgagcctgcgttaaaggcagaatgggtgatggcccgtttatgagagggttcgcattgtgcgaatcaattaaaggtggcaccgcagatcaagggatctgtcctttaagcgaaggacagatcccctttttgttggggtcggctgggaacctctcgaaaggcgtcggcgaaggagcaattgctacggaaaaggacgcccgcaggtgcgggcacgaggggcggtgaagaaccgcccgagaaaggactgatcgacatggcagaactccgtatgaccgccgacgctgaaaccgcgacccccgccgccggcgctaagcgcaccgtggccgcagccgaaaagaaggggctggctattcaggatctcattctggcagcggtgcttttggccgccggtgccgtgctaaagctcacggtgggcagccttctcgcctccttcggcatgaagccgaacttcatcatcgccgcctactgcttggctatcattctcattcgcccgacgatcgcccagtcgctcgtcatcggccttatcgccgggctcgtgtgccagattccgatgctgaacgccacgccgctgctcaacatcccctcggaactgctgggtgctctggtgtgtggcctgctcatccgcgtgcccatgaagatcggcaagctggatgtgaacccgcttgtgaacaccttcgtctccacctgcgtgtccggcttcaccttcgcggcgctgtccgcctacatcaacgtcgtgtccgtgggcggcgacttcgccgtggccatggcggcctacgtggccatcgtgctgggcaccgccaccttcaactgcatcttcgtcgaggtgctggcgacgcccctgaagaaggtactgaagcgctaaactgctggttcggcgcgagcaagaaaggtcatcatgatcgagttcaatgagttcagttttcggtatcgggaaggggtcgagcccgtggtgcgtgacatcacgctcgccattcccgatggctgcttcgtcggcatcaccggggcggcgggcagcgggaagtccacgctcacctacgccatcaatggcatcattccgcactgctatccgggcgatttctacggctcggtcacggtggagggcctcgacacggtggacgcctcgctcaccgacctgtcgcggctggtgggcagtgtgtgccaggacatcgactcgcagatggtgtccacggtggtggaggacgagatcctctacggcctggagaacttcgcggtgccacgtgaggagattcccgcgcgcgtggacgaggcgcttgacgccatgggcatcgctgatttgcgcgaccgcaccatcgacagcctgtccggcggccagaagcagaaggtggccgtggcctcggtgctggcgctgcaccccaaggtgctcgtgctggacgagcctaccgccgagctggacccggcctcgtcggtgacggtgttcgatctgctttcccgctacgcccgggagcacggcaccacggtcgtcgtggtggagcagaagatcgcgcttctgtccgattatgccgatatgctcgtcatcgttgacgagggccgcatccgcttcgccgatacgccggatgcggtgctggcccactccgaggagctgctggcgctcggtgtgaacgtgccgcgctcgacgacgcttatgaacgcgctttccgcccagggtctgtacgcctgtcccacggtgcgcaacgtggccggggcggccgcagcgctgaaggaggtgctcgcatgatcgagttcaagaacgtatcggcgtcctacgacggcgagctggcggtgctcgccgacgtgagcttcacggtgaacgatggcgacttcgtggcctttgtcggcaccaacggggcggggaagtccaccacgatgcgcctggccaacgggcttctgaagcccacctccggggaagtgctcatcgatggcgtgcccacgacctctctgaagacgagcgagctggcccggcgcatcggcttcctctttcagaaccccgatcggcagatctgttgcaacaccgtgcgcgaggagctcatgttcggcttcaaggccctcggcgaggaagggcccgaagctgaggcgcgggtggacgccatgattgagcgctttggcttcgacgcggatgccgagccctacctgctgaaccgcggcacgcggcagctgctcgccctggcctccatcatcgtgctggcgccgcccaccatcattctggacgagccgaccacgggcctcgacttccgcgagtgcgtgaaggtgatggacgtggttcgcgagctgaacgagaacggcaccacggtcattatggtctgccacgacatggaagtggtgggagacttcgctcgccgcgtcattgccatgacggccgggcgcgtggtggccgacggccccaccttcgaggtgctgcgcgacgggcgcgtgctgaaggaggcgcacatcctgccgccccaggtgaccgaggtgtcgctcattctcgggcgcgaggcggcctgtcccgcggctgtggccgaggcgaacaccgtggcccaaatggtggcggcggtggcccaggcatgcgatagggaggtcgaagacgtggaagtggaggcgatcgactaatggccaagtttctggaatatgtgccgggggagagctttctgcaccgtatgaacccctgtgtgaagctcatcggcgcggtgctcatcgccatcgcctgcttcgtgacgagcaacctggtgtttctgctgatccttctggccgccgcgctcgtcatggccgcctcgtgcgggctgggccgcgagacggcggggctgtgcaaggcggtgttcgcgttctcgctcattctggctgtggtcatcctgcttacgacgccccacggcgcactgctcgtgccgctgccctggggttatatcggcgccggcagcctgctggcggccctcacggttgtcgtgcgtctcatggcggcggccattcccttgttactcgtgttctacgtcacgaagatgaacgacctgacgaacgcggccgtcaaacagctgcacgtgccctacaagtacgcgttcacgttcacgagcacggtgcacttcatccccgtgttcatgaacgacatggccggcatcatggaggcccagacagcccgcggcgtggaattcgacggctccttcgcgaagaaggtgcggctcatgattcccttgtgcgtgccgcttctggtgagctcggtgcgcaaaacgaactccgccgccatcgccgccgaggtgcgcggcttcaacctgcgtacgcgcacgagcggctataaggactacccgctgcatgccgaggacttcgtggccctggccgtgtgcgtggcggtgctggccgccgccatcgtgctggcagtggtggggtagggactggaggcgggtggcctaccgcagcgagaacagcttgcgggcttcggcggccagttgcttgcggccgaccaggagcaggatggccagcagggccgcggcggcggtgccggcggctatggccaagggcggccaggtgataaggcccgtggctagaagcgccaaaggaacgaggccgagcagcatctcgtagatgaggtacttcgcgtagccggtgacgaacgatcctctgaaggcgatgaggagcaccgcgttgaacgcgagggccaaaagacacagccctggtatcacgtaggtggtaacgatgagattgcccgtggagagaaaccacagccccgccacggccaaaagcacgaggaagtagcgctcaaccacgcggatgaagtcgggggcgtgcacgatcatgttccgcacgaacagccagttcagggccacggccacacacggcgcccccacggccagcgcgctgccgcccgcagtgccgcccaaaagcgcgataagtgcgatgcagataagggtgagcaccgccagaaccgtgcggacgcgggtgctcttgcgctcgaaggtgttcggcgggaacaccgagggcacgggggccgctttgcgggcatccgccagcgggccggggcggtggaacgccggcgcgtcgcggttcgcgttcaggtagccgggcagcccctcgccttccaaaacctctgccagggcgcgggtcaccttctggccgagaaagcggctggagatgccgatggacaaatcgtctccataggtgcacacgatgaagttgaggccggaagtggacgtgagcgcgctgatgccttccacgtagggggccgtgcattcgtccagcgccacgcggccgaggctcgagacggtagtggtgacctcgcgggcggcgcgcgcgtcggcgacggccagcgccgcatccttcacgatgaggggcgccgcgcgcagaagtgggttcttctccagcttgatcatggccatcatgcggcgcttcagggaggcgggctcgcatccggcggtcagctggcgctgcacctcggcggccacttcaaccaggggcgcattggcatcgccgggggtgtaggtgataaaggcgagcccgaagaagttgcgcagggtggccgagccgaagaggctgcgcaggtcgacggggacgtccaggtggatggcccggcgccggtcgcgggcggtcatcgtggcgcgcacggcgcagatgaccgccgcgatgaggtaggaggtgacgctgactccggcgtctttggcggcggcatgcacggcgctggccgataggtggtattccaggtaaagcgggtcggcgtcggtcttcaggcccgtcagatggaagacgcgcggctttttcgcctttcccgccgcggcgcgatcgtagttggccgtgaagctgtcctcggtcttctgcgcctcggtgcccgcataggcgcaggtggcggcttcgggcagcccgtagcgctcggccacgtaggcaccgagcagcgccttcaggaactccagggcgccgcgcccgtcggagatcatgtgggacacttccacgttgatgcggcgacggtagtagctcacgcggaagagcacgctttggggcccggcgtgcaggccgtagcagatgggcaggttctcgggggtcacgcgcggcgcggtgccggaaggttccaggtaatgccagaacatgccgcttcgcagcgacacgttgaagccggggaactgcgccacggcggcgtccagcgcgcgctgcagcgcttgctcgtcaacctcgtcgaccatggtggccgccaggcggaagatggtctggttcgggcttcccgcctgggcggcgtagaacttgccgacgttgtctagtcggtaccaagaagcgtcagccatggccggtcaccgggtttcgggagcgggtcgccatcgaggaagtgcgcgatgaggcggtaggtgtcgcgcacgagcgagagcacggaggggtacaaaaagtagccgtggacgccgtcgttcatgcggaagcaggccacttcgttgccctccgcatccaggcgcgcagcgaaagcctcgccctcgtcgcgcaaagggtcgtactcggcggtgatgacgagcgtgcggggcaggtcggccagcgacgtcgcgatgagcggcgcgaagcgggagtcgtggaaatcggcgggcgtgcgcaggtacagttcgatgtagtcgacgatggcctggcgggtgagaatgtagtcctcgccgttgtcgcgcacggaatcgaacagcgtcgtttcggagtggtcgttgtacacgagcgggtacaagaggatctgggtgcgcgggcggaagtcgccgcgctcgcgggcgagaaggcttacggccgccgtgaggttgccgccggccgagtcgcccatgagcacgatgcgctcgggatcggcgtcgcggataagcgtgccggcgaacagctgccgcgccacggcgtagcagtcctcaagcgcggtggggaagcggtgctcggggctgcgtcggtagtcgacggcgatgacgcggcgctcgagcttcagcgccgtgcgcatgcaggcgtcgctgtagaattccacgtcgccgttggcccagccgccgccgtgcaagtacagaatggtgccgcggtgatcctcgttcacgtgcaggccccgcttcagggagaagtcgatgtcgaggggcgtgaacacgcgcaagggaatctcgtagccgtcgtcggctgtggcggtgatctcgtcgatgcggcagcgcgggtcggcaatggtgagtttgccggcggcgtcctccaccttgcgctgggagttccaggaattggccacgtcgggctgcaggcgcgtgatggccttgatgaccgcttggacggcggggttcatgggcatgagcgctccttgtctcggggtcggcggcgtagggtgtcgtggtcggcgacgtcgagcgccgcagtcggcgacgcttttgacgccacgtaaacgctgagttccatgctaagggaagttgtcgccgctgacagtttcccatcgccccttggcatcaaacggtaaacgactcgctacagccataccgtcttagcatgggaagcgaagttgcgcgaattttgtggaggtcggtgcggtggtgactggtgctcaggcacggggccgctagcataacgtttccccttgacgtcggcgcatctcacggcttcgacctctcaggtttcccggacggggcccagcgagggccgagccgtccgcgtttcgtgaaacttggatgaggaaggagaaggccgtggatgcggaacgtgacgaggcactgcttcggtctgcaggcgcagatgccgatgcgggtgccgatggaggatcccctagcatagaagcggaagaacaagcccatcttgacgaagtgctgggcgcggtgcgggcggccgtcgatcgtgcgcgcgggttggccgagcgcacggaggggagccatcgcgaggcgggggcgcagctggcggcctcgcgcggcgaattggcgccggaggaggcgcacctttctgcctatgagctgaaccgcatggacgcccaggccgctttggcccatcgctcccggggccggttggagaagctgctcgattcgccctacttcgcccgggtcgatttcgttgaaggcgaggagggggcgtcctcatctgccggttcggccgaaggcgagacggcggccgcacgccagatcacctacctcgggcgcttcgccctcacctgggagaaccaggcgctcatctccgattggcgaagcccggtggccgcgctgttctacgacttcgagccggggccggccgccttcgaggcaccggccgggcgccgggagggaacgctcgcgctcaagcggcagatctccatcgaggaggggcagctgcgctacgcggtggactccagctccagcgtgcgcgacgaggtactcgcgacggttctcgggcgcacgtctgacgcgaagatgcatgatatcgtctcctccatccagcgcgagcagaacgccgtcattcgcgatgaggcgcccggcacgcttatcattcagggcgtggccggctcgggcaagacttccatcgcgctgcaccgggttgcctacctgttgtatcgccagaaagagcggctgacctcgcagtcggtggccatcctatcgccgagccgggtgttctccgactacatttccggggtgctgccggagctgggtgaggagccagtgcggcagtggagcctgcacgacttggcggtcctccttttggaagggatcacgaaagtggcgcccccggtgtcggctgccgatgaggccgacccggttcgggcggcccgtgctgccgccaagggcaccgaggcgttcgctgcctcgttgacggcgtggctcggcgctcagctgggggagaagggctccggcgatgggaaggtggcggcatcggagctcttcgagccgcgcgacttggccgtcgggggcgacgtggccgaggcgtcctggctcgccgagcgctttgcggcttacgcgccggtgcccttcgatgagcgcctcgaccttatcgccggcgacgcgttggagttggcccatggcaagaccttcggccgctacgcccacaccatgccgacgcgccgcgagctgcgcgggcggctcctgcgcatgatgcgggccaagaacccgctggcgctgtacaagcgctttttagccgacacgggccagagcgccctgtttaaggcgccggccaagggcgtggtggaatgggaggacgccttccccgtcgtgctgtgcgccctggccttcgcgggccccgacggattcgcccccacttctgccgtgcgccatctggtcatcgacgagatgcaggatctgacgccggtgcagcacgaggccatctcctgcctgttccgctgcgatcgcactatcctgggggatgtgaaccagctcgtggacggccgtgcggtgtcggcgcccgaggcggtggcggcccattatccgggcgcgcgggtggtgcggctcatgacgagttaccgttcgaccagcgagatcgccgagctggccgcccgggtgatgcccgttgcgggtctcgtcgccgtccagcgccatggggaggcggtgcgctttgcgcgctgcggcgacaccgtgggggtgctcgcggcggtgaacgaggccatcgagcggtggcgtgcctctgggcggcgcaccttgggagtcatcgcgaaatcggacttcctcgccgcccgctacgctgagctcattgcgcgcgatcacgaccttacgctgctcaccgatgagacggacgcctacccgggcggtatcgtcgtcagctcggtgcgcctggccaagggcctcgagttcgatgaggcggtgctgctggacgccgacggccgccggtacgccaccgaggccgatcgcaacctgctctacgtggccgtcacccgcgccatgcacgccctgaccgtcctctaccgcgacgaaccgagcccgtttctgggggagaagcggccgcgttaggccaagcgcgggcggccaagcggatcggttctattgccccagccccatatccgcaagcgtcacaaggcagcagccgcaggaggcggcctcagctcgacaggcgtcggtgaagccgcttttcgagaagaggaacagccgctgctcgttggcgctcccgataagggaagcgcggtgctgcaacgtgcggaggacttcgatatcggtctgcttggcctgccacttgcattccccgcatatcatcgagttttcgtcgcagagagccacgatgtcgatctccgcctgctctctgcgcgcgttgtcggtgccccaccaccgtccgacatcaaggacgaggggaatctcgccgcgccccgaggacgcgacgagccattggcgacacacttcctcgaacaccgggcccgtgaacgtggagaggtgatctgcggcaatcagatgcgccacttcctcggcgcgccctgcttgaataggcgtgaggtagcgggggacgaagcggtaccaaaaacgaaacaggttgtcgttcagaacgtagcgggtcttcttgcggttcgcgtcgacgaccggcttctccaggcgcacgatgcccagctcctcgagtcccttcaggtagcccgccgccgccgtgcgctcgatgccggctgcgtcggcgatgtccgtgaggcgcccctcgccgttggcaatggcccggatgacggcgttgtagcgcgccggctcgcgtacttcctgctgcaggaaggaatcgggctcgccaaagaggaagcagtcgggctgcagcacgttggtcgccaggttctcagcgagagacagggctgcgtcgaattgctcgagatacaaggggatgccgcccgcgatgccgtaccaggtgacgatatcttccgagctgctgccgctcagcaacagcgacgcctgcatgatatcgaagggctgcaccttgatctgggccgtgcgccttccgtagagggggcttttgtagcccagcacctggtgttccatgaagctcatggacgagccgcacaggatgaggaaaagacggctgttctccttgcgacgatcgatgaggtgctgcaaaaccgagctgaccgagcggtcgctttggacgagataggggaactcatcgatgacgaggacgatgcgctgttgttgcgctagcgtgaacacgtgggtaaaagcttcttcgaagtttgcgaatacgggagcggccgtgtcgctggcgacgggcgtgccgtcaagccgcaagtccgcgatggcttgactgagcgcaacgaggttctctttcgccgtcgattcgcgagcggagaagaatatcgctggcttgccctttacgaactcgacaatgagcgaggtcttccccacgcgtcgacgcccgtacactacaggcatttggaaggcgtcacttcggtaaagccgctccagcgtcgccaactcccgctctcgtcctacgaacattgctgccccttttctcattttgtatagttacgattataataaacgtaactatacaaagcaagtgcaagggcaacaccctttgttttgttgcagtgcgagattggagcgagtaggggctaaagtgcagcacatatccgcggaagagattgctccaggagcataagaaaactagatgaggcccacaggaaagcgcagacctatggcgagtatgaggaatcgcagcgcgcaggcgccgatgagggtgcagatcgcggaaaggatgaccagccatttggggtctttgtgccggagaaggccgatgagcgcaattgcccaaggaatgacaagaccggcgccaacgacgaagagccagaatggcaggcttaaaacgccatcgataaggagctgagcagcaggaagcgtggcgggggaggatgttgcaagccagcttaagtacaatcccgtcacgacgctctcggcagtggttaggaacacagtgagcccgttccatgcagtcatgcgccgtgctcgtttagccttttccttaagccggtagatgcacgagacaaaggccgtcccggaattgagggaagagagaacgaagagtgcgggaacgagaaccgtgttccagctgacgatggcgcttgatgtcatgaggaggacgccggtgtagatgcatgtggccgcacctacgatgatgtaagcgactccgaggatgcttcgaaggatagatcgtcggggtgcacagcaactcgcgaccagagaaagcgccaagttaccgcagagggcggcagctagcgtccatgcgccgatggtgagccacgacgtgggattggagaaactgttccagagaagcagtgctctgaacggagttcctgtgtcggctagcaggattatcactccaaggatcagaaacagcagggcggaccatgcgcaaggtctgacagttctgcggtaccttttcggcgcaagtacatcgagccatgcggccaaggcgagcgtgctgccaccgaggccgccgagaaagagatagagggggagcaggccctgccatgccgtctgcacttccacgactgcccccaatcccagatttcatcgtttgccttggctgcttattgtagtctcaattagcggaggacgcgggcctctcttcgagaacctccgttgtcagttgcagaaggccatcggtcacttcaaccaatccccgatagagcccgtcccgatcctctgtgcgcaccgactccgcgaaaagaggaaaccaggggataacgaattggtccaggaattgcctggcttctgcggtcgcgtctctttgcgcgatagcgtcatcggtgctttcagcaagagcgagaagttcggctaagaaagatagctcgtaggcaatatggtcgctcggttcgctcttgccttccggtatggcgaaaccgtggcgagcgtaaagacgtgccacctctagggatgtggggccgaagagtcgtccttcgtccaggtagatcgacccccacggcgggcaaggaacgtggtgcgggccgacgaacaggcgatgaaactcaacgctggtctgtgttaatgcttcgggatctgcgcatcgatcgctcaaggtggtgagaccttggcggcaggaagaaacctgacagaggtagtcgtcttcttccagctccaaagctgccagataggcacaggcgtcggcggtaagtggccgacggaagagggatgccgtgaagcgaagcatgacctgaagcgcctggagactcgcttcctgttgatcgcaaacgttcatggttggcctttcttggaaatacggtcgggccgacctggggaggggtcggtcggcccgacatgcagtgccgcgctatttggaagagcgacttttcgatggttgcgcgctattcgacgatgatgaccgagacttcggtgctctcgtcgagctttctctcagagcggccggcggcttcctgccgcagtgactccagggggcccactttgagggcgttgttgaagcacgtctgcacgcaagcgggatccagacccatttggcgacggtcgccgcacaggtcgcacttcgccatcgtgccctcctcttcgcggtactggggcacgtcgaaggggcacacctggctgcaagtcttgcagccgatgcagcggttgacgtccactttaaccgagccatcgttttcgtctttggacagagcgccggcggggcaattggccacacaggccggatcggcgcagtgcatgcatgaaagggagagattgattactttggtgtcggggaaggtgccctcttcggtcgtgcggacgcggcgcgggcgtgggccaggcgcaacgagatgctgtcgattcttgcaagcgatctcacaggccttgcatcctatgcatttgctgaggtcgacgagaaatccaatttgttccataatgcatccccttaagccttgtataccttgcagagcacgcctgtttgattattgatgccgccggatccgcgttgcttatcggttccgtattctcctacgaaaggaggaaggagttgagtgcgcttgtcgggtgcgacggtggtgaaagaacgagatgttgggtagatattgttttggatctttccccaatgatagggtggaacgatggttcccggctgaactacttcgctcactattgcctggacgctttccatggccccataacgcgattcaacggtaaccgggtctccgttttcgattccgaagcgtgtagcatctacggggttgatttcaacgcagggagtgctggctgtatcgaaagcttcttgaatcaaacttgaaatggggccaccgtttttgtcttggttgaacgagaggaattgccacggcttgtgggcgcgtccgacggcaactagttcaaacccactagataccgcttcggagggctgccaatctcccgattcgatggggttcccagatagatagtaactgtcctctggttcttcgggtatgggaagtgcgggaagtacgccatcggaatactcggccaagaaatcggccttaaagagcagcttgccggttcccccatcagtggggaaccatatctcctcgtcgtcaactgatgccgggacttgactgttgaacttatagagctttgctttatagggcacgaagtcactttgtcccgcaaagaaggggtttctgactccgtcgggatgctcgataattgtgtcgatgctgatatcccgatactcgctgtactcctcttggccgttttcgatgcatttattaaaggcttcgcgcacaccatcattcgcaatcgttgcagcaatgagatccttttcgcctttccagggccatacgtcttcatcggcgaggccgagctccagcttattagcgagtgcgatagagagttctcggtaggtgtccgtgtcggatttgcattcgaacattggctcgatggcgggttctgtgacggcgatgtgctcccaatcggggcgccacacgtattgttcggcccatgaagttaccggtaaaacgatatcagcgtaggccgaagcggtccaatgcatgaagcgattgtgcaccaccaccatgtctattgccttgaaggcggcgtctgcatctttagtgtttccgctagagctggcgaaatttccgttcgtaatgtaaacgcggtaaccatagggcttccgattataaagaatctctttctgtccccagataccggccggtgcgctttctttcctctcgacaagaggggacaaggatgcggctaccgacgccatggtcttagcggcaggccaatggtatatggtattgctcgggcatgcggaggaggtttcaatgctgatgccggagcccttgacaccaaattgaccgcaaaggccaggcaggcagcagatagcacgcgacatgagccagccggcattgctcttctctccgccggctgagtttcctccgcggcctatggctataagcgagggctttgacgtggcgtaaagacgagctacctcacgaatcttgtctgcgggagcccagctgaccttctcgacctcttctggagtgtatttcttcgccagttcggcaaactcctcatagccgaaagtgtgcttaccgatgaagtcttggtcggtaagtccctcatcgatgatgacgttggccattgccattgcgacataggcatcggtacctggtctcactgggatgaaaatgtccgccttgagtgctgtttcagttaggcgcgaatcgatgacgaccaatttcgctccgaattcgttttttgcctttccataggagtcggaccactcttggggctttgtgacgctggtgttttcgccccagagaacgatcaccttagattcgtaagggtcttcttcgagagcgtgatacatgtcgccaacagtgggaacagggccgaactgaaggtcgaaccaacaatcgggaagcaaaggctgatcggatccgaagagcttgttgaaaatcgaggtgcagggtaagagtgcgaagcttcccggatgggcccaaccggaagcaatagtgtgaggcccttcctcccgtattgccgttgctgctgcggaagcgatctcgtccaaggcctcctcccagctgatgcgctcgaattcgcccacaacgcctttttcgttcgttcggcgcatggggtactttatacgatccggatggttaatgatgtcgaagcccgacatgccgcgagcgcacatggcgcctttgttgaaggcgtcgcagcttccctcgtaatggatgatagcgccgtccttcacataagctgctccgcagtgcagctggccgcaggcgtcgccgttagtgcacatgacggggcagatcttgtcggctccgtaggggagtccgtcgctgacggcgtccatgatgtagcccgatgtgtcgggcgcatcgctggtttgggaaagcggctcctgttggggggagcatcctaccagcagggacggcgccagcattgctgctccaccggcgatacccgaccatttcagaaaatcgcggcgcttgatgctttgatgttgcatatgaatctcctctcggcaaaccttgctgcacgcaggtgcggcaagggccttgatcgttgtcggactcttggcaactcggcgcgggtaccggcgcgtctcgtcccctcattgaatcccctcgcgcttcggaagacaattgcgcccttgctttccgaagtgtatattgtaatagtatactaatacagttgatacttgcaagtgactgctttatctatttcgagaatagtagaggtgactatatgagaacgtaaggttcatcaggtattttgcaaagagtgtacgataaaactgttacattttcagcaaagacggatgccgctataataggggaaactgttttctagtaagagagtgccatggccgacattatcatcgacggaaccgcagatgtccctatatggatacaaatccgcaatcgcatcatctacctcattcggtcgggacagctggctgaaggtgatcggttaccgtcggtgcgcgaagttgcggtgaagcagaatgtcaacttcaataccgtggccaaggcgtacaaagatctcgagcgggacgggctcatccagactaagcgaggctcgggaacctttgtagcctcaacggctcagcaggtgggggctttgagcgattcgcctctcgatgttctcatcgatgagctcttggaatctgccgattcgcgagggattggcgatgacgagctgcttttccagattcagcggcgccttgagacgaggagggcaaatcatggataagcgcaaaaagaagaaagcggcagtgggggaaacggcgctgccaaaaggcgtgccttttgaccggcaacgggagcgcccgctcaaatggggcattgccatttttaagggggctctgctggtcgcgccgatcgctgtgggcgccgtctgcgctgtcgcttctgctaatgcgtggcctcttgtcatcggcattctcgtcgggtttgtgctgttcgccaatacctatgtagtgcttgaatgggaggcggcggtggtgctgagactgggccggctggagcgcattcagggcccggggctgttcttcaccgtccccttcatcgaattcgttgcctcctacgtagatcagcgcctgaacgcgacgacgttcaacgcggagagagccctcacggccgattgcgttcccgtggatgtcgatgccgtgctgttctggatggtgtgggaccccaagagcgcttgcaccgaggtgaagaactactacgatgctgttttctgggccgctcagacgaccttgcgcgatgcgatcggcagcatcgatatcgccgagttgagcacacgacgcaaggctctcgacgaggagatcaaagccgagctcgtgcagaagaccgaaacgtggggagtgacggtggtgtcggtggagatccgcgacattgtcatcccgactgagctgcaggacgcgctatctaaggaggcacaggccgagcgtgagcgcaatgcccgcgtgacgttggccgaggctgaggaagatgtgtccgagatgttcgtgcgtgcgacgcgcaactacaaggccgaggacggtgcggtgcagttgcgcgcgatgaacatgctctacgatggcgtgaaggagaaggggggtctcgtgctcgtgcccacgtctttggcggacgcattcggagagatcgggtcttccgggaagcaggctgctgacgagcaggggcctcaaatatagtcaaaacactatttgagtttgcttacgggcgtctcatagaatgaacctaaagttcccgcaggaacgaggagcaagggaaggagaatgctatgagacgatggaagaagcccgcaatgctcgcgacggcggctgtgctggtgatggcgtgcgctgcctgcgcgccccagggggcgccgatggcggagacgggtgcgctggcgacttcggatgcggctgctgaggtcgccgccgagggcgctgtgatcgagacgggtaaccacagttgggagcagtggcagagccaatatcccgatcagtacgccaccttcattcggggcatcgacgatacggaggcgtgggacgggaaggttcatggccatgcggccttgtacttcaatacgcctgtcaccaactacggcggtccaatgatggtcgatgagtttggcacctcgtgcatcgcctgcaagtccaccacgggcacgaagctctacgaggagatgggcacggatgccttcctgaatgattgggaaacctatgcggccggcgagaagaccgactggtacgattgcgggttgtgccacaaggacgggacgcccggcggtgagctggcccccggcggtatggccgctgctgcgttcggcgcgcccctcttcgagcaggtgaccagcgaggaggcggtctgtggccagtgccacaactacatcggcgcggtgtacacccgcggtggcctaatggagaagatcaagtctggcgaggcggacatcgcgtctatgaacccgtggcgctacgggcttgaccccgagagccttatgaaggcggcgctcgaggatggctacgagatggccgtgaacccggagacgggtatcgcgaacttccaggcgaaccacccggaggtggagatcttccagggcagcgtgcaccaggagctcggcatgacctgcgtcgattgccatggcgtgaagatgcagggtgagaacggggaattcacctcccacgggttctccgagtcgccgctggagaaccccgaggcgctggagtactgcctgacctgccatagctctcagggcgtcaaggatgccgaggccatgaaggagttcgtcgcggccgcccagaagaagatggccgacgcagaggaagccttcggtgcgaagcgcgaccagttgcaggggctcatcatggcggccaaggacgctgagggcgtcgatgccgatgccctcgccaaggcgaaggagaacttcaccaagggcgtctggttcgtgcgctatgccgacggcggcggcgacttccccggcatgaagatcgcccacaatccgaaaggcgagatcgattacgtcgagcgagccacggtgctgatggacgagggcatcgcgctcctctcctaaggcgaaggcaagcgggcggcgcctctccctgtggcggctcgcttccctggggccgaccgttcgttggtgcgcggtcggccttcttgtgggttatactgaccgtaaattgacgatgcgtcaccaacgttgagggggctatcatgaccgcaagtggcactcaccgaggtctttggctgcggttcgtcctcctcgtgggcatggcagccgtgctcgtgttcgccgtctacttcgcgtggaccgcccaggccgagtcgtcggaaaacgagcggcgggctcttgccgaggcgcgcacgctgagtgcccagatggacgcctcctgggactacatcgattcgattcaggagcgcatcaactacacccatggcgtcttcgacttcaaggacgtgtactgctcggtggccggcaaggccatagcggtccgtttcaccgacagaacggactattcgatccgctacgtgcgcgagaacccgcgcagcggcacggatgttcctgacgatttcgaacgcgccgcgcttgcgtccttcgagcggggcgccgacgagtacttcgccatgacggactacgagggctccccggccttccgctacgtttcggtgctccgcgccgagcccggctgtctgtcctgccacggcgctccggcgggggagaaggacgtcacggggttcatcaaggagggcatggccgcccaagatgtggccggcgcggtgagcatcgtgcttcccatggggactatccaggccgagtcccatgccgatttggcggcggccgttgtgttcttctgcgtgctcatggcggtggtgacggtcattctggggtggggtctcagccgttgggtcgccttccccatcgtgagcgagaacgacaagctgcgccgggaggcggagagccaatcgaacttcctttccatcgtcacccacgagctgaagacgccgctggcggccatcatcgcgctgaccgaactgtggcgtcgccgctgctcctcggccacggaagaagaggcacggattatggacgacatcgagatgaacagccatctgctgttggggcagatcaacaacgtactggatacggtgaggcttgacgagggctgtttgggtgcgaacgtggaagacgtcgacgtctacgacgtggtcgcccttgtgcgccgggtggccgagccgctgtccctgcgccagggcatttcgtttacggctacggtggagccgggcattcctatcgtgcgcgccgaccgggagatgctgcggcgaatatccatgaacctggtagggaacgccgtgcgctacaccgatgcgggagggtcggtcgccctgtgcctctcgtggcgtgcgggcgtgctggtgatcgacgtgcgggacacgggggcgggcattgctcctgaggagattccgtttgtgttcgaccgatttgtgagcaagccgggctcgcagcacacgggagagggcggcacggggctcggcctgtccatcgtgaagcgctacgccgaggcggtcggcgggtcggttgaagtgaggagcgaactgggttgcgggagccaatttgtggtggagctgccgctggagaccgctgcccatcccgaggaggaggatcgatgagcgaaggtaggccggttgttatcgtggccgacgatgatgtgacgcttcggcgcacgacggcggagcttttggaggatgcggggtacgaaactcgtgaggccgcaaacggcctcgaggtgctggcgctctgcgagaaggcgcggcccgacctgatcgccttggacatcatgatgcccaagatggacggtttcgagacgttggcgcacttgagggagacagatcgcgtgacgccggttctcttcctgtcggcacgaggcgacatcgtggacaagcgaaccgggtttcgcctcggtgccgacgactacctcgttaagcccttcctggccgaggagctgctgttgcgcgtggaggccatgcttcggcgcgtcgatgcgttgggagaggcgctggcgcccgcggcaccgacttcggtgacgctgggaagcctgacggtggacctgcgccacggggaggtgacggcgggcgatcgcagggtcgatctcacccccaaggagcggcgcatcatgtgtgtgctcgcggagtcgccgggccgcgccttcacgcgcgacgagctcatcggcgcggtatggggagaggagtacgtagactcctccatcagcattccggtgtacgtgcgcaacctgcgcgagaagatcgaggccgatccgacgaatcccgtctacctgcagacggtgtggggccatggctaccggttgggtggggaggatggacggtcggccgcgcgttagcccttcctgctttcgcggtagcgggccagggcggcatcgaggctgccgacggtgcggcggtagtacagggcgtagccgatggtgagcagcgccgtggccaccaggtagatgacgacaaagctggcccatgccccggcgttgtccagcgggaaccaactgcccaccgccgcgcacagggcgagcgccggcaggccggtgaggcagaagccggcgatgcgcaccggatagtgcatgcgtctggccaccaggggggtgaaccacagcgtctgcaggagggtgagaaggcccatggcgagcaggagcgagagcgtgatgacgacgccctccacggggccggcgaacatgaggccggccacgcaccagaagagcatggcgatggtgaagtagacgcatgcgcggatgccggcttttttcaggtactctctcatagctgaccctttctcggaaaggcggccttacaggccgatcttccgcttgatggccggggcgtactggcgcgaggcgatgacggactcgccgttgctgagcaccaattccagccgggcgttcaggtaggggcgcagggcgcgtacgtggtcgaagttcacgatgagggatttcgaagcccgtacgaactcggtgccggcgagggcctcttctagctcgtagaggcgcagcgggctttccagcacgcggtcgcggccgtagaggaaggtgcggccgtcgacggtttccgcgtacagcacttccgacggttccacgatgaacgtgcctgtgccgtcggtgccgagaagccggcaatccactgcgttcgccgcggccatgatggcccgcacgcgccggtcgatggccgggcagcggatggtgacctccgcctcttctaagtcgggccgctcttccacggtcagcttcacgggcgctcctttccgtctcccgtccgtagcgctagtgtgcctcgacggggcagcgacggcaagggggcgccgcttcacttgcacgagaagggccctgtgttgcagggagaggggagcgaaaagggccgcgaatgcaaaagaaccgtgaatgcgaaagggccggcctcggcgtcgccagcgaatggcgaggcttcgggaccggccccaatcaggcattggcgttgcgctcgggggcgcaacggcgcgctctcagtggtcgttcatgttgaagacgttcttcatcgtgaccgtgcgctggtcgagcacggtgccgagcagggcgcgggtttgcgtctgcacgctatcgacgagcgcctgattcgcgcgctcgagctcggcgatcaccgtcgggtcgtccatgtcgtccaggttcgccttgccctcggcggcgagcttctcaagcgcggcgtcggtctcgcgcagcgactggtagccctgggccatggtgttcaggcggtagccctggatggcctcgtagctctcgaagaactgcgggtcggaaagacctgccaccaggcggttgttccagtagaggctgtcggtggtcacttccgtgggcgtgtccaggtaggcggggagctccttcacgttcgcgtacagggccacggccgtgttgaacgggcccgacgccggggcgaaccagtgcacgccgcgcagagccgccggtgcgttcgggcgaatgcacaggatggagcactcggaggtgcggtcgatgccgacgtagcggtactggtggcgcgtctctggcgtgcccttggtgccgtaggggtcatactcggtgccgtcgtaggtggtggcgagcagatccttcacatccgacgccgacagcttcttatcgggccgcatggcccaggggatgtcgaggctctcggggccgaaggcgggcgccgggccggcgaagcgggcatcggagggcgtcaggcgacggcacaggtaccacttgcgcggggcgttgtacagctggtcgagccaggtgtaggtggaaaacgcgatacgggcgttgaagtagcgcggcagcccctcgacggtctcgccggcatcctcctcgtgggcgggcatatccatgagcaggtcgttctcgcggatccactgggccagatcggcgctgcacatgtagtcgtgctgatcgctcagcgcgtcggccaggtcgaagtggtcgatgccctggcggttgggctgcaccacgtagcagtcgtcgggcacgcgccgcgcgatccagtggtggccgccgatgttctcccagtaccagacctcgtccgcgtcgccgaaggccacgccgttggtctcgtaggtgccgtacttctccacgagcatgccgaggcgacgaacgccctcgcgggcgcttttgatgtagggcagcgtgatggtgggcaggttctcctcgccgatgccgccgggcacctcgggcttgtagttggcgtcgccgggctttccgacagcgggctggtaggtgacgagcgggtcggcgccgagcacgcgggcgttggccgagatggtctcggtggccgacatggacacgttcgccgcattgatgccggtttcggcccacacgccgttggtcgggtcggcgttgggcgtgcaggtgtagcgcagagggttgtcgggcagctcgatggtcaggtggctggccacgccggtataggagcgcggctggtcttccggcatgaccacgatcatcttcttcgggtcgaacgagaagtcctcgccgtcctcgttgcgggcgacgatggtggagccgtcgttggtggcgcagcggcccacgagaagcgttgtgcaagccatggtgtctccttggttgagggatagttcctgatctcatggtggccctgcaaaacgcccgcctgcagctcgcgggcaacttgttcggagaccgttgccagatggctgcgacgccgaaagccagctggtcgtactgctggctttcgggcaatgtgaggtgctagatgcgctcggcgtcgggaacgaaggggatggggtcgggatggctctccttgtcgtccaggtacttcaggctgtgggtgttgagggcccacacggtgatgagcatccagcagccggcgagggccagggcggccacggacacgcctgcgccctccacgacgagcgaggtggcgaacacggccacgggcgcggcggccagggtgagcgaattctgcgtgccgagggcgcttcctcgattttcggcgggaatgcggtcgaagatgaagaagccgagcagggccgagatggggccggccgaaagacccagcatgagcgcgctcgcgatgagcagcgggagcgacggcagaaggcccagccccaagattcccaaggccatgccggtgagcgacaggatgtaccaggtgcggagacgcagcttgtgggcgagcgccgcgtagccgagcgagctagcgagcatgccggcggacatggccgacagcacgtagccgagcagctcggggctgttcgcggcagtgaagtgcaccggcaggacgaggccttggaaggagcccatgaccatgaccacgccgaaactgatgagcatggacgagcgcagaattgtgaaggggcggcggccgccttctccctttgcgcccgctcggccatgacggcctcgatgccgcgttcgatgcgcccgtacacgtcctgctgggcctcgttgtagtccgcgaaggcgatctcgtccaggaactgctcgcggtcggttgggggccgcagccagttggcggtgtcgaagcaggcgatgacgggggcgagtgccgcgagggaatcctcggcgagggccgcccgctcccgctcgggggcatcgggcgtaagagcgtccagcctgcgaccgagctcttccatggcttccacgaggttctcgcttgaaatgcgttccaccacgcgctcgagctcgccgagcgcctcgtcgtcgtacaggtgcccggcgacgatgagggcggtgcggtcggcggcccgcgcgtcggcgagggtgtccacgccggagagcatgcgcaggatgcgggcgaagcgcacgggcaggtcggggtcgaggtgctccgcgcgcagctcggcgatggtgcgccgctgctcttgcaggtgctcgatctccaaggccagttcgcggtcgagctcgtccaaggcgctcgcggatgtcgcgttcccctcggcgtccatctcgtccagaacatctccgatgcgcgagaggggaaagcccaggccggccaggcgcttgatgcgcagcacgcgggccacgtcggcgggggagtagtcgcggtacccgttggcctgccgcggcggctcggacagaagccccagctggtggtagtgccgcagcgtgcgtacggtcacgcccgccaatttcgccacttcgttgctgcgcaccgatttcccccttgcggtcgttcacgtttcattagacgcctccattgtaatggctcttcgggcgcctgtccttggaaaggaaaagcggcgccccggagagacttcggctcggcttcataggcaagttggcaaaacttactcttgacaagaacatctgtttccttataatgaacgaaaacaaatgttctaaaggctgggtatatccctaacttctgtgctcgaaggacagccgtccgatgtaaaggaggctgtcatgggccgttttccctcacattttctcagacggtttcagcgaggcaacgcttgttgatggctgttgccgagccgttcgccctgcagtataatttcgtttaacgaaagtaggtagctgtactgctgatataccatgctttcacgccgcctacaaaaagtgttctccgggaactcggacttgcaaggaggcagtaatgtccaaaaaggattttgagaacatgtcccaaaaagaaattgaagactattttggtgttacccgggaggagattgaggctcttgctgctccatgggatgccggaggcgttgatggcgtgccggtgggggaggtgatcgtcgggcgaccccttaagttcggggagcatttgaggctcgtgggctttaaggagaccgagcagaagatcgagcgcatggataagcgggcggatagcttgggcatgaagcgctccgactatttgcgatggctcgtcgacaaagatctcgccgctgccgatgtcgcctaagttttcgcgtgcgtggaaggggaatgggaatggacgatagcgagcgcctcgcgcggttcgaggcggtgctggccgctctgctggcagagcaggagtcggtgtgcgtgactcttgagggcttgcgggcccaaggcaagacgcgcacggccacctaccagcagctgacggcgcgcaagctggcgctgaaatcgatgctgggcgccttcgaggagcaggggcttctgtgagtgcggcgttggatgcacggggaagagccgtcgcgggcatagatgctgagaggggggccgtcgaaggcttagaggagaacggtcttgagctgttttcccgttcggtgcaccgctggttcgccgatgccttcggggcgcccacgacggtgcagggcgaggcgtggaaggctatcgctcggggcgagaatgcgctcgtgatagcgccgacgggttcgggcaagacgctggcggcgtttctgtgggcgatcgacgcgctcatgggcgagaaggctcgggtcgctgaagcgggcgagaagtgggttcgtggcgtgcgcgtgctgtacgtgtcgcccctgaaggctctcggcgccgatgtggaccgcaacttgcaggggccgctttcggccatctccgagctggcggccgtcgagagcgcgcgccgtggcgcgaaggcccccgaaatccgcacggccatgcgcaccggcgacacccccgccgacgagcgtcgcaagatcgctcgtaatccgcctgatattctcatcacgacaccggagtcgctgtacctcatgctcacgtcggcggcccgagaggcgctgcgcacagttgagacggtcatcgtggacgaggtgcacgccctggccggcgacaagcgaggggcgcatctgtcgctttcgttggagcggctggacgatttgctggaggctccggcccagcgcatcgggctgtcggccacggtgcgcccgcgcgacgaagtagcccggttcctcggcggtgcgcatccggtgaccgtggtggccaccgaagcgctcccgagcctcgacctttcggtgcgcgtgcctgtgcgcgacatgacggccgttcccgccttcgggggatttgccggcgccggcgacggcacgcggcagcggggcgccggtccgcgccgggcgcctatcgagaacgcgtggaagtctgaccgggcgcttcgggccgtcatggccgagggcgcctcgcccgcgccgcatcctgacagccgcctgggcagctcctctatctggcctcatatcgaggcggccattctcgacgaggtgctggcccataaatccaccatcgtcttcgtgaactcgcgcggtttgtgcgagaagctgacggcgcggctgaacgagctgtacgcgaagcgcctcggtctggacgcgccccattccgaggtggccggcttctgggcggccgcgggcagcggggaagcgacggctttcggcgatgatgcggtgcgcggcgtgcccacgggctccgatgccatgcggggggcaccgggggcgagcttccgttccgacatcggctctaccacggcgttggtgaccgagcccgcggtggtcatcgcgaaggcccaccacggctcggtctccaaggagaagcggctgcaggtggaacgggagctgaaggcaggagagctgccctgcgtggtggccacttccagcttggaattgggcatcgatatgggttccatcgatttggtgctgcaggtggccgctcctccctcggtggccagcgggctgcagcgcgtgggacgggcgaaccaccaggtgggcggccgctcccagggcgtcatcttcccgcgcacccgggtggaggtcatcgatgccgccgtcatggccgagggtatggaggccggcgccatcgagagcacgcgcctcgtgcgcaacgcgctggacgtgctggcccagcagaccgtggccaccgtggccatggcgccggacggccttccagccgacgattggcttgcctgcgtgcggcggtcggcctgctacgccgatttgggccggcgctccttcgagggagcgctcgacatgcttgccgggcgttacggttcgggcgaggtggctgagttcgcgccgcggatcctgtgggatcgcgagacggggctgctcacgccgcgtcccggttcgcagcgcctggccgtaacggcggcgggcaccattcccgaccgcggcatgttctcggtggtgctgccggagggcgacgcccggcagggccgccgacgtgtgggcgagctggacgaggagatggtgatggagtcgcgggtgggcgacatcatcgccctgggcacgagcacctggcgcatcaaggagatcggtgccgaccgggttatcgtggaagcggcgccgggacgcgctgcgcgactgcctttctggcacggcgaggccattggtcgcccctacgagacgggccgcgcccggggggcccttgtgcgcgccctcgatggcggtattgcgcgcgctgccgaccgggatgaggccttggtcgagcatgtggaagagggcgccatggccccggcgctgcgcgatcgcctgacggccgacgggcttgacgaggacgcccggcgcaacctggcggctctcatagaggcccagcgcgcctgtaccggggcggtgcccacagatcggcgactcgtggtggagacctgccccgatgaaacgggcgatatgcgcgttattctgcattcccccttcggtcgccgcgtgcacgagccctgggcgctggccgtggcccatcgcgttaccactgcgctgggcttcgacccgcaggcggtggcctctgacgacggcatcgtgctgcgcgtgcccgccgccgaggacgccctgccaggaagcgatctgttccgtttcgattccgacgagctggaatccatcgtgcgcgaacgcgtggggttcacggccctgttcgccgcccgtttccgcgaatgcgcggcccgggccctgctcatgtcgccgacggccccgggcaagcgggcgcctttatggcagcagcgtctcaagggcggacagcttttggaggcggcccggcgcgaggaggatttccccatcgttctggaggccttgcgcgagtgtctgcaggacgtgttcgacctgtcggccctgcgcgaggtgatggacggtcttgcctcgggttccatcaagatgagcgaagttcgcacggccgccccgtcgccgttcgcggcgccgctcgtgttcgggtatttgggcgagcacctctacgagggcgatctgccccatgccgagcggcaggcgtcgcttctgtccgtggatccgacgcttctgggcgagcttctgggcaccggtgctgtggaggatgtgctggatgcagaggtggtggcgcgcaccgtggccgagctgcagcggacggccgatggttggaaggcgcggggtgcggaaggcgtggccgatcttctgcgcgagctggggccgcttacggtggaggagattgccgctcgaaccgagggcggcgaagtcgccgtccttctcgcggacttggaagccgcccatcgcgctttctccgccgtcatcagcggcgagaagaggtgggctgccgctgatgatggcccgcgtttgagcgcggtgctcggcattgtggctcccctctgggcccagcgagagggaaagctgtcccgccccctggacggacttgcggcccgcttcgcgcgcacccacgggcctttcgacagcgaagaggccgcatgcaccctgggggtcggcgtggcgcttgcggccgagtcgctggaacggctggccgccgaggggcgtctcgtgcgcttggggcccgaccgctgggccgacggcgccgtgctcgcccgcttgcgcagccgatccctcgcccgggcccgcgaggcggtgcgccccgttcccgccgacgcctatgtgcgcttcttgctggatcgtcaggacatcgcgcgcgccggtgagccgacgcttgcgggcgtcgacggggtagcccaggtcatcgcgcagttcgagggcgcggcccttcccatggaacagtgggagagagaggtgctgcccgcgcgcgtgcccgactatcggccggccatgctggacgagctcatcgccgccggcgaggtgctgtgggcggcctctactgtgggggaggcgcatcccatctcgttcttcccgacggactcgcccctggcgccgctgcccgttgacgcccaggccggggtggcggaggtctccgcggccgagccgggggagttggaggatccttcgctggacgccatcgtgcgccacgtgctggtcgctcaagggccgctcacgttccgtgctttgacggatggcgccgcgcagctcgccgggcccgtggcacgcacggatcgcgaggtggccgaggcgctgcagcggctcgtgtggaagggggaggcgaccagcgacgggctgggctttccccgcgccggagggctggccgcggcagcatcggcgtccgcagccggcggccagacgccgccgccctcgcggcggcgggcgagcagccggcggggtcggtcgctccacagcgaggcccgcagggccgcccgtgcggccgcggtgggccgccaggttgcgtcgaccgccttcgacgccgctctcgccgggcgctggtcggccttggcgccgagtggccagagttccacggtgcaagcggtggctctggtggagtcgctgctcgaccgctacggcgtcgtgacgcgcgacatcgtgctggcggcgggcgtgcccggcggcctttcgatgctgtacccggtgctcaaggccatggaagaggcaggcgatctcgcgcgcggcatgttcgtggagggcatgggcccggcccagttcgcccagcgcgagaccgtggaggccctgcgcgccttcgcccagcctgcggacgcatcggcgcccgcctccctcgtcgcgcttcccgccgacggcccggcatgcctcttcggtgccggcattccctggcccgatgtggcatgggacgcggtgggcgaggcccctgcggtggattccgcgctcgtggctgcccgccccgctcgccgcgagggagcgcttgtggtcattgccgatggctcgccggtgctgtgggccgcgccgcgcctgaaatcgctgctggcgttttccgccgacgaaaaattgctggaggcggccgttgccgccctggtcgcctcggtgcgcgccgctctcaagcgcgagggcgcctctgctgcgcgccgcaagatcgtcgtcgagcacttcaacggccgcgacgtgctggccactccggccgcttcgtggcttcagagcgccggcctcgtgcgccttcccgacggcttccgcctctatgcgagcccgttctaaagcgacctcgccgaaaaaagaagggccgctgcgcctctctccgacgcggcggccctgcgattccggctgcggtccccctgatgatacgcagccgttccgagttagcacgaggtaaagaaagcgggcggcggccagaaaggagaaccgccgcccctcgagttcccggcgcgctgtgccgggttcccgcatagcccttggtgaaggcggagcggcctggtctcaatggccccagaagaccaagctgtgggagtccgcctccaagaggaacgacgtctactatagggggcgcggccgtcgggcgccatcgccgcttataggtaagggcatcgcgctttttaggtattgcggagccgcagcctgaaaagactgccggcaggcgcattatcacaggtcggccacgagttcccgaatcgtcgggcgctatcctgcggcgatgctagaatcggcgtttggaagggagcgcacctgttcggtgcgctgtgtcgcacgatcgctcggcggtgtgcgcacatctcgtctgtgcactggagcgaagaaaggaggcggaaaggccatggaaggttttgcgttgcgcgatgcgggcgacgaggcgcgcgccccgcttgccctgcgcccggtgcacctcgccctcgtcgctttcgtggtcacgctgcccgcctatgcgccgaccatgggggcttttgccgaggcccctcagttcgaggcggtcgccgacgtgtttctgttcgcgctgtttctcgccgccgttacctcgtctgccgtggtgctcctgcgcggtttgcagcgcccgcgcaaagtgttctcgcgcgcccgggtcaccgccattgcggcggtggcctatctgctcggcacgatgggcgttctggggcttctgttcgcccctgcgccgctgccggcggcagccgtgggcgcggggcttttggcagggacggcgctgcccctgctggtggccgaatgggcccgcgctgtggccgtccccatcgatcaggcccttgtcctgtgcgctttcgtcgtgctgacggcatccttcgtcggttggattctcgcgctgctgccgcttttggtgctcgttcccgtgctctgcctgctgctcgtggcgggagtcgtcgtgcctccggtggccgcccgcgtgggcgacccggcgcttcccctcgcccgccccgccgacacgatgcgccgcctcgtgtcggtgacctggctgcctcttttggggttcgccgtgtacgcgttcatgaccgacgtgatggcccatagcgccttcggcgtcgtgcaggcgtcgtttctcggtggagctgttgcggcgctcgtgatgttcggcgtctgctttttgtggggacgcacgcctctgctgccctggtcctaccgcatcctcgtgccccttatggcggcggcgtttgtggtattgggcgcgtttcccgcgggcacgttcccgcgggacgcctcggtggtggccctctacgtgttctacatcgtcctcgccctgctggggtgcgcggtgctgctcgccgtggtgcgcaatcgcgagttgccggcaaacgtggcgtcgggcttcgcctgcggcgtggctgcggctgcggcgcttttgggacagattctctcccaagtgctcgcggtgaccgacgacttcgccccgtggcttgcggtgctcactggcgcgtttgtggcggtgctcctggtgtttctcggccgcacgtcgtggaacgagctggtggcgcctcgcgagtcggctgccgcggaggagtcggttctggccgcaggatcgggtgccggcgacgccgctggcgggggtaccgccggcgcggctcgcggagaagggctcgagggcgcaggcgctcccgatggctttgagccctccggccgcgccgatgcgcccggcgatgccttcgaactggccgagccgagcatgcaaagcactctggaggcccgctgcgccgaggtggcggcggcccggggcctctctccccgcgaggccgaggtgctcgtgtttctggcccgcggcttcacgccggcctacatcgcgaagtccctcgtgctctccgtctcgacggtgcgcacccacgtccgcaacgtctaccgcaagctcgacgtcaacaagcgcgaggagctcatccacctcatcgacgaggggtagggcttcgcccctcgtgcggtgatcgctgctttgcgtcattggcatgccttcggaaagcctcgagagtctcatcgtgtacaatgctccttatggttgatacggggattaaagagaacgtgctggaatccatccgcgccgtcgcgcgccggtgtggtgtgtctcgcgtcgtgctgttcggctcgcgtgcgcggggagagcaccgatccaagagcgacatcgatctggcggtgttcggcggcgatcaggtgcgcttcaccctggatgtcgaagaggaggcgccgaccctgctctccttcgatttcgtgaacatggatggcccggtttcccaggaactgaaggagcgcgtggcgcgggaaggcgtggtgctctatgaagaagtacgataactacgcggcgcagctggcggtgctcgagcgcgcgaaggacgaggatctctccaacgagttcgtcatgagcggcgtcacgaacaagttcgcgctccaattcgagttggcgtggaagctgctgaaggagacgctggcctacgagggcgttgccgctgcggcatcgggctcgccccgcgagattctcaaggccgcttttgccacctacgatttcatcgacggcgatctgtggctcgaaatgctgacgactcgcaacgacctctcgcatatctacgatggggacgccgcccgcgccatggtcgaccgcatcgtcgaggcgtatattccggagttcagggctctgaaagccggtttggacgaactctatgagggagtgcttttcggggtgcaggacgagtagcgcgctcctgtgcgccgagcttatttagctcaagttgcaaaatgcggcatttcacaaagcccatttttaacaaaatgcagcaattcaaaatgtcgataatcaacaaaattcgcaattgaggcgagcggccaagtggtggagctgctctatcaagcctcttcaacaatgtcctcgtatttggcgtagaggtcggggaaggtgtggcgcaggctcacgggcttgaaggtgtcgcgctcgacgacgcacacggtgacgagcgcatccacgagcggcgtcgcgccctcgcgcagctggggctcgcgacggccgagtgccgccgcgccttctgcgttcggatcgccggcgatcccgtcggccgtctcgccttccagaacatcctccgcacggtagacctgctggcggtagaccgtgcgcatcggcaggttcttcgcgatcgacgtgcgcacgacgcccgcctcgccgtagcgcagcggcgccttgtagtggatctcgatgtcgtggatggggctcatgtagccggctccctcgatgcgctccgcataggagaagtccagcgcgtccaggaagtcgatgcgggcgtcctcgaagtacagcaggtagttcgcgtggtagaccacccccatcatgtccgtctcgccgtaccgtaccttgatgggggtgtgcacatgcatctcttcgctcgctttcgccgtctcgctcgagttccgtcgatcattatagtgaaggcggcgcggcagggcgtcattttgtgcaaaatagcatggttctcgtagttttagctgtggcgttatgagaggcagaaaattgcgacctggggagatgcccatgacgagacagctgtcgaagtcaacggactacgagaagtaggctgttttgcacattttgggctttcccgctgttaaaccaccattgacatagac

SEQ ID NO: 10641 - DNA, 859 bp, Unknown
  gut microbiota DNA sequence
gaagtcttgaccactccagttttgcgaaagtgtcggctggccaatttggagtccgcacccccgagacgctcataaccgtcgatctcatgcaaaaaccgagggttgagttgaccgacagacccccagaggctgaaacgctccaaatcaagagaagagcatcgggaaaaccagctcttgctgtcgcagaagtgccgcagccgcgatctcgctgtctcagagattccgcagttgacgctcttactatcccaaacgcggtgagaaccaaagaaaagggagcccggaggctccctttcggttgcggcccaaggcggccggcaagctctggcgtacgctcgcgctactcggcggcgtagaggtccttgagcttctgcagatgcgaccagcgggccatggcggcctgctcgttctcggcgaacagctcctcggcgcgctcggggaactcgcgggtcaggcggctgtagcgggcctcgttcatgaggaagttctggtactcgccctcggccggatccttcgagtcgatgacgagcttcttgcccggagcgccctcagggttgaagcgcagcaggttccagtagccgcagtcgacggccttcttcatctcggtctggcagttggtcatgccgcccttgatggagtgcatctcgcacgggctgtagccgatgatgagcgaggggcccgggtaggcctcggcctcggtgatggccttgatggtctgattgaggttggcgcccatggccacctgggccacgtacacgtaaccgtaggtcatggcgatctcggccagagacttcttcttcacgtccttgccggcggcggcgaactgcgccacctggccgaggttggaggccttcgaggcctg

SEQ ID NO: 10642 - DNA, 19691 bp, Unknown
  gut microbiota DNA sequence
cgatgtcgtaggcccagccgtcgccgccgaagatccacacggacttcttggtcaggtattccttgttggccaggatgccggccgccagctcggccacctcgccggtaccctcggccgccgccgaaagggccgccacataggcctccgccgccgccttggaggcctcggcgtcggcacgggcctcgagccacgcgcgggccgcgtcggccagatccccggccgcaccgccgcactcgatgagcgcctcggaatcaacgacgaccttgtcctgcacggcctcgtagccgagcagcatgcccatgccgtgctcggcgttgtcctcgaacagtgagttcgaccaggccgggccgtggccgtcggcgttcaccgtgtagggcgacgtcgccgccggaccgccccagatggaggagcagcccgtcgcgttggcgatatacatgcgatcgccgaacagctgggtgaccaggcgggcataggaggtctgagcgcagccggcgcaggagccggagaactcgagcaggggctgcttgaactggctcgccttcaccgacgtgccctcgagctcgggcttgcgggcgaccttgctcacgcagtaatcgaacaccggctgctcgtcgagcgtatcggcgatgggcttcatggtgagcgagtcggtcgggcactggatgacgcacaggccgcagcccatgcagtcgagcggcgagacggccagcacgtacttcatgtcggcgcccaccttgcccttgacgggaacatgcttggtctgagccggggccgcggccagctcctcgtcggtcagcgcgaagggacggatggtggcgtgcgggcacacgaacgcgcactggttgcactggatgcaggtgtcgggcgtccactcgggcaccgacacggccacaccgcgcttctcgaaggccgcggcgcccagcgggaactggccgtcttcgtagccgacgaacgcggacacgggcagggagtcgccgtccatgcggcccacggggaacatgatgttctccacgagcgagaccgtctcggaacggccctcgatgccggaagccttcggcgcatcctcggccgtcttccacgcctcgggcacctccacctgcacgaaggcagtggcgccagcgtcgatggccttgtggttcatgtccacgatgtcctggcccttcttggcataggacttcgtggcggcatccttcatgtactggatggcctcctcctgcggcatgaccttcgccagggtgaagaaggctgactgcaggatggtattggtgcgcttgcccatgccgatctcgatggccagatcgatggcgttgatgaggtagagcttgatatcgttctcggcgatgtagcgcttggccgcggccgacaggtgctcctccagctcctctgccgtccactggcagttgatgagcaaggcaccaccgggcttcacgtcgcgcacaatcgggaagcccttggtgatgtaggagggattgtggcaagccacgaagtcggccttgttcacatagtaggggctgcggatgggactatcgccgaagcgcaggtgcgagatggtcacgccgccggtcttcttcgagtcgtactggaagtaggcctgcacgtacttgtcggtgtggtcgccgatgatcttgatggagttcttgttcgcgcccacggtgccgtcgccgccgaggccccagaacttgcactcgatggtgccaggagcggcagtgttgggggcgggaacctcaggcagcgacaggttcgtcacgtcgtcgacgatgccgatggtgaactggcggcgcggctcgtccttctcaagctcggtgtacacggcgaacacggaggacggcggggtgtccttggaaccgaggccgtagcggccgccgatgacggtgatgccgtcgcggccctcaacggacagcgcgttcacgacatccatgtacagcggctcgccaatggaaccgggctccttggtgcggtcgagcacggcgatcttcttcaccgtctcgggcagagcggccacgaacttctcggtgacgaaggggcggtacaggcgcaccttcacgaggcccaccttctcgccgttggcgttgaggtagtcgatgacctcctcggccacgtcgcaaatggagcccatagccacgatgacgcggtcggcgtccggggcgccgtagtagttgaacagctggtagttggtgcccagcttcgcgttcaccttctccatgtactcctccaccacggccggcaggtcgttgtagatggagttgcaggactcgcggtgctggaagaagatgtcgccgttctcgtgggagccgcgcatggccgggcgctccgggttcagggagtgctcgcggaaggcgcgcacggcatccatgtcgcacatctcggccagatcgtcgtagtcccacacctggatcttctggatctcgtgggaggtgcggaagccgtcgaagaagttcaggaagggaacgcggcccttgatggcggccaggtgcgccacggcggacagatccatgacctcctgcacgttgccctcggcgagcatcgcgaaaccggtctggcggcaggccatgacgtcggaatggtcgccgaagatgttgagcgcctgggtggagacggtacgggccgacacatggaagacggtcggcagctgctcggcggcgatcttgtacatgttggggatcatgaggagcaggccctggctggccgtgtaggtggtggtcagcgcgccggtggccagagagccgtgaaccgcgccggccgcgccgccctcggactgcatctcgcacaccttcaccgtggtgccgaagatgttcttgcggccctgggcagcccaaatgtcgacgaagtcggccatggggctcgaaggcgtgatcgggtagatgccggcaacctccgtgaacgcatacgagacatgcgctgcggcgttgttgccgtccatcgacttgagttctctcgtcatgttcctctcctttgcatctggcccgcacggaatcggccggcttgcggcctcgtcgctcaacgcgcgggtggtactgtcgcggagaggtcggagggacgaagcgcgtccgacgatgcgggtcggatttgctctgcgaacagaaatacctgtctgatattagcagcccgcgttcgctgacgcgccgtcaatgcccccgcgcgccgcactaggcttatccccgtcggtcggcggggcacctgcagctttgtcatgggctttcttcgagctgctccaactttctatataataggctgcggaaaacgaagaaggagcctttacgatgctgaacttccccctcacgcggcgggcctttgtggctgggacggcggcgacggcgctggcgttggccggctgctcggtggagcagcccatcgagcccgggcccgcgccggcagatccggccgacgacaatgcccccaccgaacccgtggccgcgcagagcggcgtggcccgcacgctcacggccgccgtggcctacgaggggagcgatccgaaccccattggcacgagctccggcgtcttcctcgcggccggctggcacgtcttcgaggggctctacgagctgaacatgcacacctatcgggccgagtgcggcctggcagccgacgcgcccgttcagatagacgacttggaatacgaggtgaccctgcgcgaggacaccgtcttctccgacggctcgccgctcacctccgccgatgtcgtgaacgccttcgagcgcaacggcgaaagcgacctgtacggcgcgttcctctcgttcatcacggcagtgtcggcccccgacgaacgcacggtgcgcttcaagctgaacgcccccatgggatcggtgctgcaggagcgcctggccctcgtccgcgtgttcccggcgacgctcaccgacgaggagttggcaagcaaacccgtcggctcgggcccgtggtgctacgagaccatcaacgccgccgacgggggccgcatctccttcacggcgaaccaccgctacaccggcccctggccagccacctgcgagcgcatggaatggtcggtgctgctggacgatacgcgccgcaccgacgagcttatcgacaaagacgtcatggtcatggaggccgccccggtcgtgcgcgccgaggagctggccgatgcgggggccacggtggaatgggtgcccgggttcaacctccccttcctcatgttcaactgcgagaagccgcccttcgacgacgtgcgcgtgcgccaggcgctgctgtacgccatcgacgtcgactcgctcatcggcacgtatatggcgggccacgcgcgggcggccacgtcccttctgcccgattacttccggcattaccaccgcgcggccacggtctacagctacgacccggagaaagcgcgcaagcttctggccgaggccggcgtcgacgagctggcgctgaccctgcgcgcgaacgacaactgggtgagcacgctcgcccccgccatcgcagaggactggaaggccgtgggcgtcaccgccgaggtggtgctcctggacacgacggccctgtttgcggacctatccacggaaccggagccgggcacgcttctgcccttcgacgtcgtgctctcccccggcgacccgtcgtgcttcggaaacgacgccgacctcatcatcagctggtggtacggcgacaacgtatggacgcgcgcccgcagccgctgggccacaacgccggccttcgcggaggtggcagaacttctggccgaggcgcggtcgaagacctccgaggacgagcagcagcccctgtggaaccaatgcttcgacatcatcgccgccgaggtgcccctctacccgctgttccaccgcgagacggccacggcctggtggacggcccagctggacgactacgaccccatctcggccacgggactcaacttcctcggcacgacgcccatgcgcgacgccgatcccatttagcgccagaagaccaccgtgtcgagcagcccctggtaggcccacgggtaaacatccgagtaccaaccggtttccggggcaaggcagagcagcgcgctgtaggccaccgatacgccgacgagcacgagcagaagcttcagcatgagatcgtgaagggccgcccgctcggccagcgactcgttcaccacgaagcacagaagcacggcggcggccaagaacatgaagctgaaatcggcgtagtaccgctgcaggatgcccgccaactccgcatcgagcagcgccacgagcacgccggaggccaccagcaccacgatgatgccgaagatggtgcgcgtctcggcctgacgcgcccgcatccccagaatgcgccgcgtgaaggcgagcacccacagaataggcagacaggcgaggatgccgccgaaggtcacttccttgatagtctgccccatgtaggtggtctcgaaaggcgccggctgcaaaaacgggaagacgccggtcatgcagggcggctgcaggaagtaggtgaagaacgccggggccagacgaccgacgttcatgccgcgcttggtcatgtcgttcaccgtcaggttgtagttcgcgccgaaatcggtcagcgagccgaagcgcgcgtagttgtaggccatgatgcccgcggccaccagaacgtagggggccaccaggcaggcgaactccacgacgccccggcgggtggccagccggcgctcggtgatgtaggtgcgccagaacagcgggaaggccaggagcgacagcacgagcagctggggacggcagccggccacgagcgccatgcacagcgatccggcgaacagccagccgcacttgtgcgcggcgagccgcgagcgcatccagcaatacaggccccacaacgagaacgccagaccgcacatgatgggcatggaatagaaggtcgggaatttcaccagatacatgatgccgcagcagaacacgagcggtatctgaagcagcaggtacacaccgaggctcaccgaacggaaatggtagcgggcgaaccggtcgagcagggccgtggctcctaagatgaacagcagcgccataacgagcacgccgatggccgtggggaaattggccccggtgagcagatagaagggcaggtagaacaacagcaccggcaccacgccgaagtagacgtagtagtgcccgtcatgataggccacgtcgaacagatagggctcgccggtctccttctgggcctcgtcgcgggcgcccttgtcgtaagggtcttccatgtccttgagccactggggcggctcctcctccaggtacagctggcctttggccatggcctgggccagcatggcgtactgctgcgcgttgtcgccgcccacctcgaaggtgttcacgagcgacgtgccgttccaagcgccgtagttgtaggaagaggtggccacgcccacgaggttcgagccgtagaagaggaacgtcgtcgtaagcgccagctcgatggccacggcgaagatgatgcccgccttcgacttgcgcgggttctcgacaatgcggatgcggtagatggccgacttgggacggaacgcgtagcccaaaagcagcagcccgaaaacggccacaaagcgcaacgggttgaaggcgaaggggcggtgggcattcagggaaacgccgttcaagaggatggggtaggagacgtcctcccccactacctcgatgcgcaagttctccacgtacccggcggtctgcaggttgatgaacttgctcggatccaccaccgtggacacgctcgcatcggggatgccgacggtgtactccgtggtgtcgaaataggtctggtgggccgagtcggtgaactggatcttcacggcgatgttctgggccggctgatcggcgttgaaatcgatgcggatgttgcgcacctcggtgttcaggctggagaactcgagcgtgtgatccacatcggtgagcagaaaggcaccctcgtcgttgcgctggagctgaatacggtcgtccaagttgatggttcgatagcccgacgaagtgaagaagttgatattgaagacgaagacctccaacgccagggcgataagagcaatgatcgccaccgcccgggccaccttcagcaaggtaccgcggtagacgagcatgaaatgctcgaaggtgtaggctatgttctcgcgcacagtgggcatgagggagattataccgtaggggctgaccttggtcagccctcgcaagcagaacgacagcgcacgacaaaaaaggggcgaccaaggtcgccccctacgggtttggctgtgcgttctccggcctacaggtcgagggcctccttgacgtcggcgtacaccacgttcgggtcgcggtcgccgtcgatggtgacgagcagctcgcagccgcggtagtagtcgatcagcgggctcgtggacgtctcgtacacgtcgagacggttgcgcaccgtggcctcgttgtcgtcgtcgcgctggtacatctcgccgccgcacttggggcaggcgtcgccgtcggcggcgctgccgatgtagccgcagtcgcggcacatgcggcgagaggtgagacgggccacgatgacctcggggtccacatcgatgagcagggcggcatccagcggacggcccagcttggagagctccgcgtccagcgccacggcctgggccgaggtgcgcgggaagccgtccaggatgaagccagcggccgtgtcgtcgtcctgcaggcgctcggtcaccaggccgatgatgacgtcgtcgggcaccaagtcgccggcgtccatgtaggacttggccttctggcccagctcggtgccggcggccacggcggcgcgcagcatgtcgcccgtggagatatggggcgtggagaactcctccaccagcttggcggcctgagtacccttgccggcacccggcgcccccaaaagcacgatgttcatagcaaacatcctttcctattcggactgcgcgtccgccttacttaaagaagccttcgtagttgtacatcttcaactggctctccaccttgctcatggtgtcaagcgccacgccgatcataatgaggatggacgtaccgccgaaggcctggatgagctggttgttggtgaagtagaagatgatggtgggcacaaccgcgatcagcgcgatgaagatgccgccgggcagcgtcacgcggttgatcacgttcttgatgtactgcaccgtggccgtgcccggacgcacgccaggaatgaagccgccctgcttgcggatgttgtccgccgtctcctccggattgaacaccatggaagtgtagaagtacgcgaagaacacgatgagggcaacggtgagcagccagttcagccagccggtggagcaccagttcgcgaaggtggtcaaccaatcgacgttgaagatcgccgccagctgcgccgggaagtagatgatgcagctcgcgaagatgatcgggataacgccggccgcgttcaccttcagcggaatgtaggtggactggccacccatcatcttgcggccctggacgcgcttggcgtagttgaccggaatgcggcgctgggcgcgctccacgaaaatgatcagcgggatgcagacgagcaccacggccaaaatcacgatggtgagcgcgatgcccgtgcccagatcgttcgtcagggtagccgacgagaagatggccgacggcacgcgggacacgatgctcacgaagatgatgagcgacatgccgttgccgatgccgcgctgggtgataagctcgcccatccacatgatgaaggcggtaccggcgaccaaggtgaacacgatgatgatgttcgtgagcgcctcgggcacctccgtggagaactgcacaccgtaggccggcgacttgaacagcagcaggtagcccaccgcgttgatgaggccgagacccagcgtcaggtagcgggtcacctgggtgatcttgcgacggcccgtgtccccctcgcgagcccaacggcccacggcggggatgacgccctgcatcagctgcatgatgatggatgcggtgatgtagggcatgatgccgagcgagaacaccgagaagttcgacagcgcgccaccggtgaacaggtcgagcatggtcatagccacgcccgtgtcctggaaggccgtggcaaactcatggaagggaatgcccggcaccggcacgtaggcaccgaagcggtacagcgcaagaatagccaaggtgaagaggatcttcttgcgcagctccggaaccttgaatgcgtcaatgattgagcttagcaaggctcttcgacctttcctccggccgcctcgatcttcgccttggcggaagcggacaccttatcgacgcggacagtgagagccttggtgatctcgccgtcgccgagcaccttcaccagcgcgtcggcatgcttgatgatgcccttggccttcagggactcgccatccaccacgtcgccggcctcgaacttggcatcgagacggctgacgttcacgggcaggtactccacgcggttgaagttgcggaagccgggcagcttcggcagacgacgggcgagcggcgtctggccgccctcgaagccggcacccttgccgccaccggcacgggacttctggccgttcataccgcgaccggcggtcttgccggtgccggaagcggggccgcggcccacgcgcttgcggttcttcgtcgagccctcggccgggcgcaaatccttgagttccatgtaagtaaatctccttttcgctctctgaccggggattttctcttccctcagtcagtgctagcagctcgccgctagcaaacttccatctatcatggcaacggcgtgtctgttcagacacgccgattgtcatctttcatcccgacacattattaaattcatagactcactggttcgcccaagggagtcagcgaggttgcgacaggtgcctggaattgccccgccttggggccaagttggcttaggccaacgccgtgccccaaacaagggacaaggccaggtgcctgtcggaaccgcagcgtcgggattgaagttggggaaatttagatttcctcaacttcaatcaagtgcttaaccgtgaaaatcatgccacggacgctctcgttgtccacctgctcggtggtgctgccgatgccgcgcaggcccagcgcgcgcagggtgcgaccctggttcggcttgcggccgatggcgctcttcacctgggtgaggcgcagcgtcttgttcgtctcagccattagttctccttcccgccgaacatctcggccacggagatgccgcggcgctcggcgacctggacggggctctccatgttcttgagaccctcggcggcagccttcacgatgttcatggcgttgtccgtgcccagcgacttggtgatcacgttctgaacgccagcaagctccatgatggcgcgaaccgggccaccggcgagcacaccggtaccgggaacagcgggcttgatcagcacgcggccggcaccgtactcgcccatgatctcgtggggcaccgagccctcggcggtcacggggacggtgaacatgttcttcttcgcgtcctcgacgcccttcttgatggcggtgggcacctcggcggacttgcccatgcccacgcccacgcggccgttgccgtcgccgacgacgaccagggccgagagctgcatgcgacggccgcccttgacggtcttcgcgacgcgattgatgaagaccacgcgctcctgaagctcaggagtcgtgctctcctgctgacggttgttgttacgagccataagctaaaaccccttctagaatttcaatcctgcttcacgggcagcttcagccagagccttcacgcgcccatgatacaggtggccgccacggtcgaacacaacttccgtcacgccgttttcctgagccaacttgccaacgatggtgccgagctcggctgcgccctcgacggtcgcgccggacttgccggtggccttgaaggcctccccgagggtagagacgccgcagatggtggtgtgggccacgtcatcgatgacctgcacgtacatgttgctgttgctccgcgtcacgcacagacgcgggcgagctgcagtgccggagatcttgccgcgcacgcgacgatggcgacgggcaagacgggcctgcttctcctgttgcttattcataggtttaatcccttcaatcagctaccgaataggcacttagtctttgccggccttgccagccttgcggcggacatgctcgccctcgtagcgaatgcccttgcccttgtagggctccggcttgcgccacttgcggatgttcgcggcaacctggccgacctgctccttgctcggaccggacacgacgatctcggtctgagagggcacctcgaaggtgatgttctcgggagcctccaccagcacggggtgggagtagccgagctgcatctcgagatccttgcccttgagtgcggcacgatagccgacgccgacgagctgcagcttcttggaaaagccgttcgacacgccctccaccatgttggcgagaagggtgcgggtcaggccgtgggcgctcttggactcacgggtgtcgtcgggacgggtgacgatgagctcatcgccgtcgcaggtgatggtcatggacggcaggaacgtgcgggtaagctcccccttggggcccttcaccgtcaccgtctggccgtcgatggtcacatcgacgccggcaggaacggggatgggcatcttgccgatacgagacatactagataccttcctttcctaccacagataggcgatgacctcgccgccgatgccctgcttgcgggcatcgcggtcggtcatgacgccgcgactggtcgagataattgccgtgccgaggccgccgagcacgcggggcagatcgtccttgccggcatagatgcgcagacccggcttggagatgcgcttgatgccgcggatggtcttggccttcttcgggccgtacttgagggtgatctcaagggtgccgcggggctcgccgtcgatgacatcgaagcgctggatgtagccttcctgctccatgatgcgcacgatctcgacgagcttcttgctcgtcggcatggacacggtgtccttgccggcagactgggcgttacgcacgcgcgtaagcatgtctgcgatggggtcggtcattgtcatgtttgttttctcctttgatccgtgatgaaccggcgttcggttcgtcggcgcccatagcgcctccgcctttaacgtcggcacacccgcgtgtccgcgtcttctaccaggaagccttggtcacgccgggcagctcgcctttgttagccaactcacgcacgcagatacggcacaggccgaacttgcgatagtaggcgcggggacgtccgcaacgggtgcagcggttgtgctgacgcgtagagaacttcggctcgcgcttggctttggcgatcatcgatttcttagccatgcatgtccttctttctttatgtccttaagcccgcagccttatcgcgaacttgtgaccgaggttgcgcgacgcggggccctatgcgccccggtcggtttacttgctcttgaacgggaagccgagggcggacagaagagcgaacgcggaatcgttgtcgccggcattggtcacgaaggtgatgtccatgccgcgggtgcggtcgatcttgtcgtactcgatctccgggaagatgagctgctcggtgatgcccagggtgtagttgccgcggccgtcgaagctcttcggcgagatgccgcggaagtcgcggacgcgcggaagggcggtggccagcaggcgatcgaggaactcccacatgcggtcgccgcgcagggtcaccttgcagccgatggcctggccctcgcgcacatggaagccggcgatggacttcttggcgcgggtcacgcagggctgctggccggtgatgatgcgcatgtcgttcatggcggcatcaagcagcttggaatcgccggcagcggcgccgacgcccatgttcacgacgatcttctccagcttcggcacgcagttgatgttcttgatgccgagctgctcgacgagcgcggggacgatctcggtctggtacttcaccttgaggcggggggtatcagccatctttcttcaaacctttctccgatggattaaacgccggatttccgacccggcgtccctgggaccttcccagggccatggcgcttgcgcgcgattggaaattgtcccacaaaacgagatactttccaagtaaaaaccgcccgctacacaaattcggtagcaggcggtctgttcagagcctcgagtgccttatcttaggcctcgacggcggggatgtccttgccgcacttcttgcagacgcggacgagcttgccgtcctcgcggcgacgggccacgcgggtggcctcgccgcagctggggcacacgagcatcacgttggacacgtgaatgggcgcctcgacggtggaaatgccgccctgggggttggcctgggtcgggcgcatggccttcttgaccatgttcaccttctccacgacaacgcgggacttctcgggcaccgagcgcagcaccttgccggtcttgccgcgatccttgccggcgatgaccttgacggtgtcgcccttgcggatcgtcatcttgttctgagccattctgacacctcccctacagcgtttccggtgccagagacacgatcttcatgtacttcttgtcgcgcagctcacgggcgacgggcccgaagatacgggtgccgcgcggagagccgtcgttgttgatgagcacggcggcgttctgatcgaagcggatgtaggagccgtcggcgcgacggacttccttcttcacgcgcacgatcacgcaacgcacgacctcgcccttcttgacgttgccgttgggcatcgcttccttgacgctgcagatgatcacgtcaccgaggcccgcgtagcggcgcttcgagccgcccaggaccttgatgcactgcaccttgcgagcgccggagttgtcggccacggcgagcatggattgcatctgaatcatgtgatgttcctactttccttatcaatagtcctcgtgccggagcactcaaactatttggccttctcgacgatcttcagcaaacgccagcgcttcatcttggacagcgggcgcgtctccatgatctgaacggtgtcgccgacgccggcctcgttgttctcgtcatgggcatggaacttcttggtggaggtgatcatcttcttgtagatgggatggggcttgcgctcctcgacggccaccacgatggtcttgtcgttggcatcgctgacgacgacgccctgacgtactttacgcagattgcgctcttcagtcatttcttgcaccttccttaagctacgcgctcagctcgcgagcccgcatctcagtcatgatgcgcgcgatgtccttcttaacctgcttgacgcgggcagtgttgtccagctggctggtggccatctggaagcgaaggttgaacagctccgccttggcctccttcagcttcacctgcaggtcttcggcagaaagttcacgaatctctgctgctttcattattgctgcccctccgtttcacgagtgacgatcttgcacttgatgggcagcttgttgatggccagacgcagagcctcgcgggcggtctcgtcatcgacgccggcgatctcgaacatgatgcggccgggcttcacgacagcgacccagccctcggggttgcccttaccggaacccatgcgggtctcggcgggcttggaggtgatgggcttgtcggggaagatcgtgatccagaccttgccgccacgcttcatgtgacgggtcatggcaatacgagctgcctcgatctgacggttggtgatccagtgcgcctcgagggcctggatgccatactcgccgtggttcagacgggtgccacctttggccttgcccttcatggaaccacgctgcaccttgcggtgcttaacgcgcttaggtacgagcatttacttgtcacccctctcgcggcgatcgttacgacgggaacggttcggacgggacgaaccctcgagcgcgggctggggagccttctggcccggcagcacctcaccgtggtacacccacacctgcacgccgatggagcccatggtggtggcggcggtggcgaagccgtagtcgatcttcgcgcggagggtgtgcagcggcacgcgaccctcgcggtaccactcgcggcggctcatctcggcgccgcccagacggccggagcactggatgcggatgcccttggcgccggacttcatggcggactgcacggccttgcgcatggcgcggcggaaggccacgcggccctcgagctgctcggccacggactgggcgatgagctcggcgtccagctcggggcgcttcacctcgaccacgtcgatggagaccgggccgtcggcgaccttctcgagcttcttgcgcagggcgtcgatctcggcgcccttcttgccgatgaccacgccggggcgggccgtggtgatggtcaccttgatcttgtcgccggcgcgctcgatgtccacgcgagacacggaggcacgggcgagctgcttgtcgagaaacttgcggatggcgatatcgttctcgagcgtcttggcgtaatccttaccggcgtaccagcggctgcgccaatcctcggtgataccgaggcggaatccggtagggctgactttctgacccatggaccttatgcctcctctcggggtgcgacgacaatggtgatgtggcacgtgcgcttgttgatgcgcgacgcggagcccttggcgcggggacgaatgcgcttcagggtcgggccttcgtcgacgtaggcggccttgaccaccaggttgtcgccgcgaaggtgattgttgtgctcggcgttggccacggcggagttcagcgtctttgcgacggtctcagcggcggcgcgctcgcagaaagccaggatctcgcgggcctggggcacggacttgccgcgaaccaggtcgaccacgatgcgggccttgcggggagcgatgcggacgtaacgcgatactgctttagtttccatgtaacttctcacctatgccctatcgcttcttcttgtcggccgcatgacccttgaaggtacgggtcggcgagaactcgcccagcttgtgaccaaccatggactcggtaacgtagaccggcacgtgcttgcgaccatcgtacacggcgatggtgtgacccaccatttccgggaagatggtgctcgcgcgggaccacgtcttgatgacttccttttcgccggccgcgttcattgcctcgatgcgggcaagaaggcgcggttctacgaaaggaccctttttcaaacttctgctcactatgactccttacgattccgctacttcttgcgacgacggatgatgagacggctcgaggccttcttcttgttgcgggtgcgatggcccttggtcggcacgccccagggggtgaccgggtgacgaccagcggacttgttcttgccctcgccgccgccgtgcggatggtcgaccgggttcataaccgtaccgcggacagaggggcgaacgcccatccagcgcttgcggccggccttgccgatcttgatgttggagtgctcggcgttgcccacctcgccgatggtggcgcggcaggtgatgagcacgcggcgcatctcggaagagggcatgcgcaggatggcgtagttgccctccttgcccatgagctggatggaggtgccggcggaacgggcgatagcggcgcccttgcccggctgcagctccacgttgtggatcagcgtaccgacggggatgttcgccagaggcagagcgttgcccggcttgatgtcggcttccggaccggagaccacgatgtcgcccaccttcaagcccttcgggtgaatgatgtagcgcttctcgccgtcaacgtagtgcagcagagcgatacgggccgagcggttgggatcgtactcgatggtggcaactttggcgggcacgccgtccttgttgcgcttgaagtcgatgatgcggtagcgctgcttgttgccgccgccctggtgacgggtggtgatgcggccatagcagttgcgaccggccttcttcggcttcggggccagaagagacttctccggcttggacgtggtgatctccgagaagtcggagaccgtctggaaacgtcggccggggctcgtcggcttgtactgtttgattcccacagtaacaacctttcttgacttcggacttccgcgctcgccggccggtaacggcaaccagcgggacacgttcgcccctttcctttggagtttccgctcgcgcgcctctccgcacaccggaacctcccctacggtagtggcgaggcgattgccgaccggcgcagatggaggctctacgctgcgacgccgtcttgccacgcgcccgggtgtatccatcgctgggcacacagacgcaaagaagcattataggggtggggggcaaccgcctcaagaactttttcgacaagcggccaaccgtcacatttcccgcacacttaggctcgtcacgggaataggcgacttaacgacctttgcggatgccgcctttgcgaccgttggccttgggcggcttgccggcgcgctgagccgaagcagggccgggacggctggaaggtgcgcccttggcaggtccgcccttcgcaaacctccccttccccttgcgcggggcaccgccgtcctccacttccctcttcttggggcgcttggggcggatgaggcactgcttgtcccagccgatgaggtcggttcgcccggccttcgttagcgcctcgcgcaccaagtcgtagttgtcggggttgcggtactggatgagcgcccgctgaagggctttctcatgcgaggtcttgggaacatagatgggctccatagtcaaaggatcgagcccggtgtagtacatgcacgtggaaatcgtcgagggcgtggggtagaaatcctgcacctgctcggggttgaagcccatgtcgcgcacgtactcggccagctcgatggcctcggccaacgtgctgcccggatgcgacgacatgagatagggcacgacgaactgcttcttgcccgtctcgcgattgatttcctcgaaagcgtcgcagaacgcgtcatagacggcccgaggcggcttgcccatggcagcaagcacggtgtcggacacatgctcgggggccacgcgcagctggccggatacgtggtgctcgaccagctcgcgcagaaacgtgcgatcgggatcggggtcggccatgacgtagtcgaagcgaatgccggagcgcacgaacaccttcttcacgccgggcagcttccgcagcttgcgcagaagacccgtgtaatcgcgatgatcggccttcattgccgggcagggcttcgtgcccaaacagcggcggtctgtgcaggcgcctcgtgtgcgctgcttggcgcaagccggcccgcggaagttggccgtgggacctcccacatcgtggatgtagcccttgaactcgggatcggccgtcatgacgcgggcctcgtcgagcagcgactcgtgggagcggcccgtgacgatgcgcccctggtggaaagtgagcgcgcagaaggcgcactcgccgaagcagccgcggcaggaggtgagcgagaacttcacctcggaaagcgccggcacgccgccggcctcgtcgtaggaaggatgccacgtgcgcgcatagggcaggcggtagacggcgtccatctcattttgggtcagcggcgcagccggcgggttctgcacgacatacacgccatggggacaggtctccaccaagcgactgccacacaccggatcgctcgcgcggtactgggtggcgaagctctccgcgaaggcgcgcttgtcgcccgaaacctcttcccaactgggcaacatctcgtagtcaaccacgtgttccagcgaacgggtgcgaaacaccgtgccatcgatgaaggtgaggtcgctcacggaaaggcccgcggcgagggcatcggcaatctcgacgatagagcgctcccccatgccgtaggagatgagatcggccccggaatcaagcaagatggagcgcttgagggaatcggaccagtagtcgtaatgggcgagccggcgcaaactcgcctcgatgccgcccaaaatgatgggcgtttccttgaaggtgcggcgaatgaggttcgaatagaccacggccgcgtggttggggcgcgcgccgcccttgccgcccggcgtgtaggcgtcgtcgtggcggcgcttcttgttcaccgtgtagtggttcaccatggagtccatgttgcccgccgacacgagaaatcccagccgcggctcgccgaacaccgcgatgctttccgggtcgttccaatcgggctgggcgatgaagcccaccttgtagccgtgggattccagcacccgcgtgatgatggcgctcccgaaggagggatgatccacgtaggcgtcgccggagacgtagacgaagtcgagctgcccccagccgcgcgcatcggcctcggcccgcgtggtgggcaggaacgccgaagccggcagggagggacgcgcgtttttcggagcgctcttttccgggcgcttgggactgcgatgagattggggcgcgggcttcttagacacagagagtacgtccttcatagaaacgggcggggaagcccccgccctggcgtgtggttatggcgcaaggccgatatcggcccgtaagctagttctcgtcggccgccttcgcctcgtcggcgggcgccgcgggcgcgtcagcgggtgccgcgggcgcgtcggctacggtgatcttcgcctgggaggccacgaagcgggcggccttcaggcgctcggccgtctcgcgcagagcgaagccgcgacccgcgtcctccagctgctggcgcatcatcttgggattgccctggggatt

SEQ ID NO: 10643 - DNA, 1021 bp, Unknown
  gut microbiota DNA sequence
ccgggggtgcgcgaattggcaagcagggtgagtgtatagacactcacgatttttgcgcccgcagggggcggcaaaaatgcctgttggggagcctccccaaacccggcacttcgggacactttgtcccgaagtcagcggcgcaagcgccttatatctgcgtcaccgttgcttatcgctcctgttccttatttttctgcccgtccgtcaggcccagcagatggtcaatgtttgtcttgaccgccacggcctcccgcatttcctgctgcgctttccggtactcggcgtacagtttctttttccgtgctgccagagcgcggcgcttttctttcagcgcgtccattttcggcagctttgccccgcccagcagttcgttcatggcagccttcgccgcccggtaatcggccagctccgcctcatgctcggccagatacttcctgctgtaccgggccgccttgtacccatcgaatacggggcgagttttggcgtaccgcaccaccgcgcccatcagttcggaggtgtgcgccagctccgtctcggtggcccgcaattcatcagagagccggtgaaagcggtccaccgctccatccgtttttgcactcagcgcggcatagtccgtaagctgccgctcccggaggaattgcagcgcggcggccatctgcttgatgttgtagaccttggcccatcgctcataggccgggccttttccctcccgaagccgctgctcaatgttcacgatcaggcccacgcgccgggacgctggggcggcatcctccgcagccgggatcgaacgctccccggcgatgaccgcccggatgtcctcgggatcgtaaccgtccccgagggtggatgcccggagccgggtcggtttctcctgtcccggcacaagaaaggagatcgcgccgccccgtccccgcctgaccgcatagcctgcctcctccatgagccgcaggaagtcggcaaaatcggcggggcgctttgcaagggcttctagtcatacttcctggagtagaacggcggcagg

SEQ ID NO: 10644 - DNA, 1026 bp, Unknown
  gut microbiota DNA sequence
aggtgacgctctgtgcctccaatccgctgtccacccaggacgacactgctgcctcgctcgtgcgcgactacggcgtgcgcgtgtatgccatcgccggcgaggacgcggaaacctatgagcgtcacatcgcggaggtggtggccaccaatccgcagatcatcatggacgacggcgccgatctggacaccgctctgcacacgaagttccccgagaagctggaaggcgtgatcggcggcaccgaggagaccaccaccggtgtggtgcgtctgatggccatggcgaaggacggcgcgctgcgctacccggtgttcaacatcaacgacgccaacaccaagcactgcttcgacaaccactacggcacgggccagtccaccttggacggcatcgtgcgcgccacgaaccgccttctgtgcggccgcactatggtggtgtccggctacgggtactgcgggagcggtctggcccagcgtgcgaagggcatgggcatggacgtcatcgtctgcgaggtcgaccccctgaaggcgcttgaggcccacatggagggctaccgcgtgatgaaggccgaggacgccgcccgcttcgccgacgtgtgggtcaccgtcaccggcgactgcaacgtcatcgacgagccggccttcaagaacatgaaggacggcgccatcatctgcaactccggccatttcgactccgagatcaacatgaaatggctgcgcgcgaacgccgtgaaggtggaggagctgaagccgctggtggaggagtacacgctgcccgacgggcgcaccatcaccgtgctcgccgaggggcgccttgtgaacctcgcctgcgccgagggacatccggcctcggttatggatatgagcttcgccaaccaggcgctcgccgccgagtacctctacaagcatgcctccgagcttgaggacaaggtctacgacgtgcctgccgccattgacgacgacgtggctcgcgtgaagctggagacgctcggcatcgagatcgacaccctcaccgaggagcagatcgcctata

SEQ ID NO: 10645 - DNA, 40691 bp, Unknown
  gut microbiota DNA sequence
ctcggcgttcgagagacggctgatggctccttggaagtcgaggggcttgctgatccggagggcctctgcaagaaattctgggatggcgtgaacaatccctctaaagtgagcgcgaatctcttaaccaacgaagatgtctcccttgttgaggcggaaggaaaaacctatcttcgaattaacgttcctcgggcgccgcgtcaacttaaaccggtgtacgtttcgggagatcaggcgcgaggcacctatcggcgcaatggtgagggagactaccactgctcagctgatgagattgttgccatggttcgcgatgcgagcccctctccgttggacgcgcttgttctggagaatttcggcctcgaggcgctggatatggactcggtggaacgattccgagccacgatggaggcagtgcgccccggtcatccgtggaacaagctgggcgcggaggatctcctgctcaagctcaatgcggcgggtcgtgtggaaggggagggcgcgttgcatcccactcgcgccgggctgctcatgttcggctacgaatatgagatcgttcgggagtaccccgagtacttcctcgattaccgagagatgggcgacggtgcacgctggcgcgaccgcgtcgtttccaacgacggtacgtggagcggtggtctgttcgatttttggagcaaggtggttccgcgcctcacggcaggggtgaaaaggccttttgctttaagcgagtcgttgcaacgggtggaggacaccgaaatgcacgccgccgtgcgcgaggctttcgtcaacagtcttgttcacagcgattattacggccgccgcggcgtggccgcgctgcgctatcccgacaggattaaaatcgagaaccccggcagtttgcgcatcgccttggacgttatgctcgccggtggtgtctccgatgcgagaaaccccacgcttatgaagatgttcgggctcatcaacgcctgcgaaaaagcgggcagtggcttcgatgtcatgaggcgtgcggctgtggatgcgcaggctccattgcccgctgcggtggaaagcttcagccccgatcgtattgccgtgacggtgtatttggggaatgctgccgccgatcaagcatacgggcccaatttcgccgaggcggcaaccagtggccctaagcctcaaatgcggccagcggatgagtcgtctgccagtaagaaacaagaggacttcagcacctatccggaagaggagcgggccgtgctgcgcatggctagtgaacggggagagttcaacaggcgcgacgttgagcagctgctcgcttgcggctcgaccaaggccaaggccattgtcggtgctcttctggagaagggcgctatctcgtccaaaggcgctagccgcagcacgcgctacacgttgtccggggaatagctcgccttcgttgctgcaaccttgttcaatgtaaaatcccaacgtgcaacgggcgcgtgacagttcggcgcacgagcggtcattgcgcggtacttgcgacagtcggctttctagaatggggaggaaaccctgattggaaagaggcgacctatggcggtgagcgcgggagatgcggcttcgaggacgaaggcgccggcgatctcgacctgcgcgcccgcatcgcctgcagcggcctccccatcgcctgcagcggcctccccatcggcgctcgtgctcgcaaaacccgcaggcgcctccacgcctcctgccgaccacgccctgcacgggcgggctttggcgctggtgttcttcggtcttttgctcgccatgctcatcagctcgctttctgagaccatcgcttccacggcgcttccaccattgtgggcgacctgaacggcgtagggatcatgcagtgggtctctactgcctacattctgttgtcgacgctggtcatgcccatctacggcaagttcggtgatcttgtcggccgcaagcgcctgctcatggcggcgctcgccctatacgcagcgggcaagatgatctgcggcctatcggtgaacatgggcatgctcatcagtggccgcctcatctccggcctcgggggcggcggcctcatcatcttgtcccaggcgacgctctccgacgtggtgccgccgcgcaagctcggcacctacatgggcgtcatcggcgccgtgttcgccgtatcgaatgtgctggggccgctgctcggcggctggttcgtccaggtgacgggctggcgctggatcttctggttcaccgtgcccgtggccctgcttgccgtggtggtactcggactcacgctgccccgcgacgcccgcgccctcggaaagcaccccatcgattggcctggcatgatggccatgaccgtggctgtgacctcgctcgtgctcgccttggcttggggcggcacgctcattccctggggaagcctgccgtttatgggccttgtcgccctagctgtggccgccgctgtggtcttcgtgctgctggagcgccgcgctgccgagcctatcattcccatggggcttttccgcaaccgaaacttcgtgctgtgctcggtgacggggcttttcctgaacatcagcttcatgggggcgctcaactacttgcccacctacttccaaattgtggacgacctttcgcccgaagtggccggtctcgtgtgcacggccaccagcgtgggcatcctcatcacctctacggccaccggctgggtggcgtcgaagacggggcgctgcaaggggatgctcgtggccatgtgcgtcgtgagcacggtgggtctgtttctgctgtcgcgcatgcaggtgcacgaggcgctgtgggtgccagtgctgtacctgttcgtgctcggcttcggcatggggctcggcatgcagttgctcgtgctcgtggtgcaaaacgagtttccccacgccatggtgggcaccgccacggcggcgaacaacttcttccggcagatcggcgcctcggtgggcacggcgctcgtgggcgcgctgttcaccatgcgccttacggccgacgtggccggcaagctcacccatgtggacaacctgtcgctcgccacgctaacgccgcagattgtggacaagctgcccgcgtcagcccagtcggttatcgccgccggctactccgacgcgctactgccgctgttcctctggttcgtgccgctcatgctcgcctgtctcgtgatgatgctccttttgaagcgccaccccctcgccaccaccatcaaccacggcggcgcggggaagtaggggaacctctcggcgaccgcattttgtttgtagccgcaaatcgacggttgttgtgtcaagatcgtcaatttgcggctacaaagtgggcaaaatcgcctgcttggaacgaaatggtgtcacgaagcgacgcttcttacggaaaaaccgccaatttgaggctagaaaagcgggtgcgggtgagggggcttacccgcaggcctccggatcgaggcggtagccgatgccccagacggtttctatgatgcggggctcggtgggatcgtcctcgatcttggcccgcaacttcttgatgaacacggtgatggagctggtctcgccgacgaactccggcccccaggccgcttccaccagctgctcgcgggacagtaccgtgccggggcttgaggccagggtcgccaagattttgaactcctttggggtcagcggcacgtgctcgccgcccaaggtggcgcggtgctgggccatgtctagggaaaggcgccccacggtgatggtgcccgtggacggcatggcggcggtcgggcgcatggcggcacggcgcagatgggcctcgatgtgcatcatcagctcgcgcgggtcgaagggcttcaccatgtagtcgtcgcccccggccgcgaacccgacgcccttgtccacgatgtcccctttggccgataggaagatgaccggtacggtgacgccccgggtgcgcagttcgcggcaggcggtgaagccgtccatcttcggcatcatgacgtccatgatgatgaggtcgggcgtctcgcgggcgacggcgtccagcgcatcggcgccgttgtcggcgtaagcgaattgccaatcggcaccctccaccatgtcgcgtaccacccgggcaatgcgcggctcatcgtccacgagcagaatcttcgccatcgtcgtcctccttcgcggttgtcagcggctcggccttcggcgctgcgggtcaccctgcggctttacgcttcctcgtcctcttcctcaatgacgggcacataggggatgcgcacggtgaacgtgctgccctccttcacccggctttccacggtcacggtgccgccatgcagctcggtgaggtcgcgcactacggcaagccccagccccgtgccccggtagcggcggttggccgattgcccggcctgcttgtacagctcgaagatttggtccaactcttcgggcgcgatgcccatgccgtcgtcggcgacgcgcatgacgatccagccggctgcggcatcttcgccatcgggggcattggtgtccgccttttcgctctcactgtgggagtcggtttccccgtcctcgaacccaatcgtcaggcgcacgaacccacctcgatgggtgtacttgatagcattgttcaccaggttctccagaatgcgtcgcagcttctcccagtcggccatgctcaagggcacattcggcgctaccgtgcaggtgagccgcacgtccttgccttccgcgataggggccagcgccttgcgcacgaactgggccaaatcgacgaagtccaccggctcgggcaaaagctcgtccttcttggcggcgtgcttggaaatgacgaggatgttgttcaccatgttcagcaaaagggtggcattcgactcgatttcgcccacggcctcgcgggtcttgggcgctaggctttcgtccgcgttcaggatgcgcgcgtaggccaaaatgctggtgagcggcgtgcgcagctcgtggctgacgatggcgaagaactcgttcttgtaggccacctcatcacccagccgatcgagtgctaccttcagctcgcgcttctggtagttcagcatgtcgttgagcaccatgaggtcatcggtcttggaacgcacctggccctccagatcggcataaagcgcctcaaggtcgcgggccatgcggtcgaactcgccggtgagctccgccagctcgtcgcggggccgctcgccggggtcgggcaccgtgagggtgtagttgaagtcgcccttgcccacggcgcccgccgcacttcgcagctcgtcgatgggctgcagcaccagctggcttgtcacgaagtacagcccgatgaaggccgctaccatcatgaacagcccatgatcgcctgctgcatcatgctatcttgaatgccggcggcgtaaatgcccatgggctcggtgatggacatggcgccgcccacttggcccacctgcatgccctccttggggtagccgtactgatccagctcgccgacggggtcgccgtgacattctaggcacgactcggtcacgtacaacggctccgtatagcggaacacccgcgtgccgtcgccggcgtccacgacgcgccagaatgccttgcggtcggggtcggcgttgaaggcggccagggcctcctgctcgaaggcgtccggcgcgttggcagcctgacgcggcgtgtcattcgtgaagcggatggagtagtcggtttcactggtgaacagcatggagatagacttcgccgccaccacgcacacgaggtgcttcgtacggaaagcgccgtcctcggcacggttgatgacttcctggttcatatcgacgaagtcccacgccgcgcgcatttcggcggcgagcacctcggctttttcgcgtgcctcgttctcggcctgagcgttttgaagcgataggttccatagaatgtcaacggccatgagcgcaatcataatgacgccgatggaaacggcgatcttgaagcgtatgccatagcggaacgggcgccccgggtgatcggtcgacatggtgtcccctcctcgtcaatcttcatattatgcccgatggagctgcatgcaggagacttcggtggggaaggtaattcttttttaatatttgccccgaagtcttaatgaaaagttccgctggccgccattgaagtgacgttgagtcaacggcagaataatagccagcgagtgcgagggtttcggccgaggagggccgcccgatgcgacagcaaggcggtaggagatccgccgagagcgggggttcaaacgtcttttcgccgcagcttgcgagaaaatcctatctgagggaggagagttctatgacgaagaacagcgaacgcgccattgacgccaagctcacccgtcgcgccttcgtgggcgctgccgcggctacggctgctgtgggcctggccggatgcgccccggcggccaccgacgaggcgccggccaaggacgagggggagggtctggccttcaccggcgaggacgagttcgccgactgccagctcgtctacggttgctgctcgccggagtgccagcaccacctgctgaagggttatgtgcgcgacggcaagctcgtgaaagtggagagcggcgaggtgaacgagagccccgcttgcgcccgcggcttcgcccgcgtggagctgtgcaactccgacaagcgcctgaccaagcccctcaagctcgtgggcgagaagggctccggcgacttcgaggagatcacctgggacgaggcgttcgatctcattcaggagaagctgcagtacgcactggacaatggcggtcccaagtccatcatgtcccagggcggttcgggcaacttcagcgccctgaccggtgcgttctccacgtttgtcggttggctcggcggtggcacgtccacgtccggcaatatgtgctgcgccggcatcgactcgggcctggcgccggttctcggccagcgcatgcagctggtccgcaacgagatcgccaactccaactacatcattgcctggggcaacaacccggtcatctcgatgacgggctatttcggccgcttccaggagatgatggacaatggtggcaccctgtgcaccatcgatccgttcctctccgagactgccgacaagtcccaggagtggatccagccttggcccggcaccgactcggctgtggcgctcgccatgctgaaggtggtcatcgacgagggtctgaccgatgaggagtacatcatcgcccacaccacggcgccttgcctcattgacaagaagactaacgcgccggccttcgctgacccggctgacgacaccacgtatcaggtgtacgatccggcgaccaagacgattgtcgcccacgatgccgctggcgtgacgccgctgctgtccgtggaaggcaccgagatcgccaacgactacgtgaccatctacgatctcatcaaggccgaggccgacaagtgggacaaggaggccgtcgaggccgagtccggctgctcctacgacgacatcgctcgcatcgcccgcgattacgctaacgccgagcatgccatgatcatccagaacatgggcggctaccagcgcaccgagaatgctgcttacgctacggctacccaggtgtatctggccctgttctgcggtcatatcggccatcgcggcgacggcgtgtacgacgcctgcggctccaccaccctggtgcccggcggctctgcctatgaggccaaccccgatgctgttaagaacgagtccattcccgtgccgtgcttcggtgagtggatctgccaggacaagcccaccaagatcaacttcatgtggatcgcccagggcaatcccgtggcccagtggccgaacacgaacagcgtgaaggagggcatgaagcacattccgttcgtcgtgaaggtagacatgttcctgaacgcgagcgccatgtacgctgacctggtgcttcccgtgacggcgctgttcgagactccgaacgtcacgcattccgtgcgctcggctgtcatctccatcagcgaggccggcgtgaccccgccgggcgagtgcaagactgacctggagattacccgcgaagtcgccaagcgcttcggcctggagcagtacttcaacgaggatccgtcggtgtacatcggccgcgtgctcgagccggctggcatcacctacgaggagctcgccgagaagaagggaatcaacgcttgggatctgaaccccgactacatcgcctacaaggacggtgagttcctcactcccaccaagaaggcgcatctgtgggttcaggcgtgggtcgacgagggctacccggcgatcgcgtgccaccagcgtcctgaggagcatccgctcaatgccgatagcgagctcgccaagaaatacccgctggcctcggttcagcgcaagacccgcagccaggtgcacacgacgttcaagaaccttgagaccatgctgtgcatggacgggcacaagccgaacatctacatcaacaccgaggacgcggccgatcgcggcatcgtcgagggcgacgaggtgacggccttcaatgatcgtggcgagcatacgggcctcgcgcgcgtgaccgaccacctcaagaagggcgttgtcgtgctggagaacggctgggaggataccacggcgtcctcgtcgagtaatgtgacgagcaacaagtggcccaccctcggtaccatccactgctgcaattccacgcttgttgaagtgaagaagggggcgtaaaccatgactcagggattctatgtcaactctgctgattgctatgggtgcaagagctgccaggtagcttgcgccactgagaaagtgctgacacctggcgtgttcattcgccgcgtgcgccagattaacgctgcggcacctggcggccatgccttcgtgtccatggcttgcaaccactgcgacgagccggcctgtgtggcgaactgccccgtgggcgcctatcagaagatggataatggcctggtggtgcaggatcacgagaagtgcatcgggtgcaagacctgcatcgaggcctgccccttccatgcgccttcctacgatgaggcgacgtccacgacctacaagtgcgacgggtgcgccaatcgccaggctcgcggagagatgccggtctgcgtgatgtcctgcccgagcgcgaatctcaccttggatgagatggacaagctgcccgagggcacggatgtcaaggaccagtcggagaccaagccgaacttgaaggtggcgttggacaaggatatcgacgcgagtgtcttcgctgatatcgacgccgcgccgggtctgttcgatgccggcgccgagcaggcatagcgactgagctttcgcgatattccggtggcgcccggctgtggtcgggcgcccttctcgatggaggtgcgcggggaattccaccctcccttatttccctgggcacctcctctcaacacaagggaggttgtcttcgtgttctacctggcatggagaaatatcacgcgccggctgggctcttctgtgctcacggcgtttattgcgtttatggcggtgctcgcgctgaccgcctcgatgattgtggtgacgtcgctggaggatggggtgcgcctgtcccgggaacggctgggggccgacatcatggtgctgccggccggcgcttcaggcaacgcctcggaggtgctgttctgcgccgagcctgtgaacgtgtatctgccagcttcggccgtggaggccgtggcagccactgagggcgtggccgcttcgacaccgcagttcttcacccagacggtggatcagagctgctgctcggtggtgggggtcacccgcgttgtgggcatcgatgcgacgacggacttcgtgctggcgccctggatcgttggcggcgtagaaggcgccgggggtgctggtgcttcggctgaggttgacgacttcggccttggggatgacggcattctgctcggctcggcggccccggccatcgagggcggccaggcttccattttaggatcggtcttccatgtggccggtacgctggcccccacgggaaccagcgtggacgagaccatctttatggacatcgacgcggcgcgtaccattgcggcagcgagcccttatttgaaaagtgtttggggcgacgccgaccccttcgacgccgtctcctgtctcatggtgaaggcggccgacggaagcgatatcgacgcgctatgccaggcgctcgtggatgcggtgcccgggtcggtggccgtgcgcacggcggacatggtttcgggggcgtcatctcagctcgccgtggtggaggccatcgccatggcgtttcttgtcgtgctcgtggtgctggcggcgctggctttggccgggcggttctcggccctggcggccagccgcatgcgcgagctgggccttttgcgcaccttcggcatggggcgcggccgggtcgtggggtgcttcgcctgcgagatcgggctggtcacgctggtggcggctgtggtcgcggtggtggtcgcctgctcggtggccggctcggtggtcggcaccttccatagcgaattcaacatgcccggggcggcggtgcctgcgagtgcctatggggcagctgtggccgtggggttgctgtttgccgtggcgctgactgccgtggcgctggtgcagccggtcgttcagatgctgcggcgcgacccgcaggagacgttgacgaggggggatatgtgatggagccgttgatcgagctgaagggcgtggtgaaggagtttcgcagcgtgcctcccgtgcgtccgctggacggcgtgtcgctggctgtggcaccgggccgcattgtggcggtgacgggcgtttcgggcaaggggaagtcgacgctgctcaacgtgatgggcggtttgctgcgagccgacgaggggtcggtgctctaccacggcaccgatctggcgcgggcctcggccgccgagatcgacgccgtgcaccgccgtggcatcggcttcgtcttccaaagcccgtacctgttcccggcgctgacggcgcgagagaatatggtgatggcgctgcgggccgccgggcagtcggttgacggggcggccatcgagaccatgctcgaggaggtgggcctgaccgaccgggccgatcatctgcctgccgagctttctgtggggcagaagcggcgcttggtgctggcccgtgttcttttggcccagcacgatttgttgttggccgatgagcccaccaatgatttggatgccgactggtccgacgaggtgttcgaccggttccgtgcgtttgtggccgcaggcgaccgctcggtggtcgtcgtcacgcacgacgaagcctacgcccgccaggcggatgaggtgtacgttttggaagaggggaggcttgcgcgtcgcgaggaggtggcctcatgctgacgtgtggccaaaatgcgcgacgcatgggctgtgacgatacgaaccttgcgggcagtggctgttcggaatgtacggcatcgagcgaccgcatgcttacgcgaagggcgtttgcctctcttgtcgggttagctgcaggatcggtgctgctgggggttctgccgggatgcgctggtccggacgcggggcagacggcccctgctgcgaatgaaggcgaaggcttgaattccggcgagggcggcaaggacgagatgcccccaacttcggaaagcgctccggcagcgccctctgcggcgctttctccgggcttgctgtgcgtggcggaatacgcgaacaacacgcttgcggttgcggatcccgcaacgggtgagatcctgcagcgcatagccgccggccagaaccccgccacagccctggtggccgacggctgggtgtacgtcggtagttccggcggcggcgaggtgacggcggtaaacatcgccgatccgtcgcaggtgacgtcgatcaccgtgggcaagcagccgctcgggctatgctatgacggggcgcagggcattctctatgtgggggattatttcgcatcgagcatccacctcgttgctacgcagctgaagtccctggtcaaaacggtgaagctcagcgcttccggctaccataaccgaaccgatcctcccgactgctgccgcatcgaccccggtacgggtcgccgcacggtggcgctggcgctggctcccgagggaaatttgctgtactgcgccaactacggcaccttcgacgtggcccgcgtcgaccttgcgacgggcgaggaaatcgaggccttcgacggcgtggtgggcccgcggcagatcctcgtgtccgccgacggagcgcagctgcttctggctggcgtgggaggggagggcgagcagcaggtgagcgacctgtacgtgctcgaccgttcctcgggcaaacgcgtgcaggaggtgccggtgggccagtctgtcgccggcgtggctcaggcctctgacggcttggcggtatgggccattgcccgtgacgatggggagttggtggccttcgacgccgactggaacgagacggggcgtctgtctttgggcgtgggcatcgatacgctcgtacttgctcccgacgagaagacgctgctggttggcaacagcatcggcggccaagtgcacgtggtggatgcgtcgtcgctggcgctgctgaatacgattgaaggattggcgagtcccaagggcatcgccgtcatcgcttgaaaggggaactcatgaagaacttgcaactgctggcgcccatcgcggcgcttatctgcgccgccatagtgtgcggagccgtgcttctgtgggcgccggtgtgctcgggcacgcttgaactggctaacggcaacatggtgcccatgcgctgcacctatacggcgaagatcgccctcatgctggcggtcatcctagccgccatggcggtggcggcccttgtgacgaagcggcccatgaccgtggcgctggcgctgctgtcgctcgccatcgtgctgctcactttcgacacgccactttccatcggcgtctgcaagagcgccgacatggcctgccagagcacggcgctgtggctgcgcatcgccggcggcatctccgctgtggccaccctcgccggcgccctgctcaaccccgaccgcaaacgcgtcacggagtagggcacctttctcgcgaacgcatgcgagactgactcccttctccggggaatctggaaaatgtgcttatctggatcgcgatttggaaaaggtgtcattgtgggttgattgacttggaaaatgtgctttttcgaattctaaaaactccctatctgacctggtaaaactcgaataataccaggtcagaccctcatccaaaaaagcacattttccaaccttcgcagacaatggggaaattgatctggctatgttttcgtgctagtatctatatcactgtagcgatatagataggatggctactatgagcgaagtaccgcgcttgtaccatgggtcgccaattcgagtgaagcgcccccttttttggcgtgggcaatccctacaacgactacggtttgggcttctattgcacggagtcgtttgagcttgcctgcgaatgggcctgcccgaaggcaaaggatgggtttgcgaacgcctatgaccttgagctcgcgggcttgcgcgtggtggatctggacgccgagccttacggtaccatcgaatggcttgcggtgcttttcgccaatcgacagttcgacgttccgacgagtcttatggaggccgctaagtcctacgtggcggcccgatacccgtcggagttgggcgaagcggacgtggtcgtgggctaccgtgctgacgattcctacttttcttttgcccgggcatttctggagaatcgcatcagtctcgcacagcttgagcgcgcgatgaagcttggtgggccggggcgtcaggtggttgcggtgagtgaggcagccttcggggcgctcaggttcgtaggagccgagcccgcgtcagcatcgctctggcatgagaagcgcatgaggcgagatgagaaggcgcgccaggacttcgatcgcattctgcacaaggagccctttgaccccaacgatgtgtacatgctcgacttgatgagggaggggtaggccatgggggagtatcgatacgccgtcgtcgagctgccgccttcgccttatgctcacgacctgcaggaagtgctggcatttgttttcgacatcggggtgaatgtggccggatgcacgggcgatcaggtggctcaggcgtttatggcgtcgggtctggctgaggagttcgaaaagcagaacccggtatatgtggcgggcaagtcatcctacgacctgctgcgcatcatgctgcccctgctaccttgcgacgaggtgcccgcgccgtgtcttcgctatgaccggacgccggacttctgggtcgggtgggtgctcgcgcattaccagatggctacgggccgctcttaccggtccatcttcgcgaccgctacctatgacgagattcgctctatgtattggccgctgcacgaggcacctgaaagcaagtttgtcgccatcttcgacgagatgcgcaccgagcgcgcgaaggccaccaacttgcgaattctgcgcgaggcggcaggtctttctcaatcgcagctagcaaaggcatcgggggtgggcgtccgctccatccagctatgcgagcagcgacagaaggacatcaacaaggcccagggcatagccctctaccgcctgtcccgtgccttgcgttgcaccatggagcagctgctggagcgatagaaggggcacgcgccctgcagtttatctcgattctgaacgcactgcgttcagaatcgtgcctgcttttatcgcccttcgggttcgaagctttctacgaggtcgatgagctcttgacgtttgtggatgtccagcttcacgtagatgcgtttggaatgggtgcgcacggtgttctcggagacgaacagcagctcggcgatgtgggccacagtgttgcctcgggcgatgagctcggccacctccgcctcgcgggccgacagaccgtagagctcgcgcactgccgccatctgcttcgagaggcggtcgcggaaggcggcaccatcgcgggtagctgcagtgctaccggacgatacgctatgaggcgctccctgcgcgcgatctccgctttcggcttgcgtgccgacggtgtcggcagcgcagaggaggggatccgcgattgcggcatccttcccttcgacaccttcttcagaaacagatgctgatgcttccgaggcggcggatggtgtgtcggtcatggcggctgcgctgtcggcacgggcgatcacgcggcttgcgggccctttcttcccgccgcgctggagggccaacagctcgatctcgttgatgtcggtgtcggccagcacgcggcggaagcctccctggccgatgaagtacatgatgccgagaaggtacagcgctgcaatcgtcactagggcaaggggtggcagcccgcccagggcgcccccagtcgcagtagccccgccgactgcagcggcgcccgcgcctccagccccgccggccgtcatgaccccggcgctccctgcgaccagcccttccaacatcgacccgccgagaaagcccacgtcgtgcaggccgtacatgatgccgccgaacacgccgtagatgaacaccgggttaatgcccccgtcccgcgatacctgggcgcactggatcatcatgagcacgatggccaccgaccacagcgcgtacagcccggccgcgagcccttccgcatagccttcgcccagaagcggcagcagcaaaaagccggtagtcaccacggggaagaacgcccggtagctcgtagccacgttgatgcgcaggcttttggtggcccacacggccagaagcgccacggccgccaccagcatcgcccccatggagagggcgttcacgaaggtgcccaccgatgggtctccgatggcgagagagcgcatgatgccggtgcagagccccagggtgcccagggaaagcgccggccgccagatagtggcgagcacatgacggtaggtacggccgtgctcgcggggcacgtcctcgaacatgggctgagccaggtcgatagtgcggctcttcagcacggcggccagcccgaacagcggcaggaacacgcaggggatgaggtaggccgtcaccgctacggggataaggtagagcgcgaagtacagcacggccgcccatgccgtgccggcgataaggttgcccataccctcgcgcgcgtcctggctggcgaagaggcgctgccacagcatgtagaacccggccgaccccacgccgagcaacgttccgccggcgcaggagagtcccacggcggcgccgttcagatacatggccccgatgagcaggcaccagccgcccatatagggaaccgccaccgccttcaccatgaagtggcgcgtctcggcggggaagaaccatgtgccggcggcgctcgccaagaaggtggccgtgaaggcgacggactcggccgcggagaaccacagcatgacgtcgggggtttggaaggccagcggcaggaacgggaacacgccgccccagacgctggccgcgttgatggcgaggaagagcccgtaaccgagtgacgccacgctcggccgcagcagtgcgcacaacgctttcaggttcacgcgattccccccttcgccttccgtatcctgcctcttctcgttgggttccagtatagcggggcggggcgcgcccgtcttggcacagcgacgaatgggtgatagagtaaccatgcgtgaactggggaaatgcgaaaatcacacggagtatgtgacacgcttgcggcgctggggccctatgatgcgacccgtcgggggcggcgatgaggacgccgcaaccggcgcggcggctccttccggggctgtcgcgggggcggctctcgaagagggtcgcggccccgaagagaagaggttcgcaagaggaaagggaggaccatgacgaactccgagaagaccgcactgtctcgccgcacgttcgtgaagggatccgcgctggccggcctgggggccgccgccgtaggcaccacgtctctgttcggctgcgcgccgcagggcgccggctccggagacgccgagctcgccgagaccggcgatgccgcgtcggtcgatgagaaaatttgctggggccactgcgcggtgaactgcgagtgccgctgcgctctgcgcttccatgttgtcgacgatgaggtcgcctgggtggaaactgacaacaccggcgacgacacctacggcgaccatcagctgcgcgcctgccagcgcggccgatccatccgccgctggatcaaccaccccgaccgcctcacggtgccgctcaagcgcgtgggcaagcgcggcgagggcaagttcgaggagatctcctgggacgaggcgctcgataccatcgccgaggcctacaagaaggtgctcgacgagtacggccccgaggcggtgctcgtgcagtacgccaccggcgtgcaggacagcaacatccgcaacttcgtgaagcgcctcgcctgcatcaacggcggcttcctgaagacctacggctcttattcctcggcccagatcggccaggctctgccgtggctctacggcggccgcgaggccaacggcacgtcggacgtggccaactccaagctcgtcgtgctgttcggcgacaacagctgcgagacgaagatgtccggcggcggccctacctaccactacatgatgggcctggagaagtccggcgcgaaggtcatcgtcatcgacccgcgctacaccgacacggcggccgttcatgccgaccagtggatccccgtgcgtcccggtaccgatgcggcgctcgtggacgcctgcgcctatgtcatgatcaccgaggacttggtcgaccacgacttcctctcgaagtactgcgtcggctacgacgacgccaccatgcccgaggaactgcgcggccagggcaagtcctacgtggactacatcaccggcaaaggcgcggacaaaaccgcgaagaccccggagtgggcgagcgccatcacgctcgtgcccgccgccaccatcgagacgctggcccgcgagatcgccgcggcgaagccctgcgccatctaccagggcaagggcccgcagcggcgcggcaacggcgagcagacggcccgcgccatctgcatgctggccattctcaccggcaacgtcggcatcaacggcggcaacaccgggtccgacctggacagctactacatgccggccgactatggcatccccatgcccgacaacggcgtggaaacctccatcggcgtgttcacctggatcgacgcggtggaccgcggcacggctatgaccgccacccgcgacggcgtgcgcggtcgcgacgccctggcggtgcccgtgaagttcatcttcaactacggcggcaactgcctgaccaaccagcaccacgacatcaaccgcacccacgacatcctggccgacgagtccaaatgcgagttcatcgtggtgtgggacaccttccttaccgattccgcgaagtacgccgacatcctgctgcccgacctcatggcggtggagcagcccaacatcgtgcagagcgagtacgcgggcaatatggcctacaccatcgccggtaccgccatcacctcgccgaagttcgagcgccgcacgctgtactccaccctggccgacatcgccgagcgcctgggccagcgcgacgagttcaccgagggactcgatgagatgggttggctcgagcgcctttacgagcagggtcgcgagggcgaccccgaccagccgaccttcgaggccatgctggagcagggcatctaccgcaagcagtgcccggaaggcgagcacgtggccttcaaggacttccgcgacgaccccgaggccaatccgctggacacgccctccggcaagatcgagatttactcgcaggccttggaagagaaggtggccgactgggagttggacgacgatcagttcatcagcccgctgccggtgtactgccccgagtccgagggctacgccgacccgctggcggagaaatacccgctgcagctgaccggcttccacttcaagggccgctgccattcctcctacggcaacatcgaggtgctgaagaaggcgaaccccggcgagctgtggatgaacccgctggacgccgccgaacgcaacctggccgacggcgacaccgtgcaggtgttcaacgaccgcggcaccgtggagatcgtcgtgaaggtaacgccccgcatcatcccgggcaccgtggccatgggccagggcgcgtggcacgacgccgacatggccggcgacaagatcgaccgcggcggctgcatcaacacgttgaccgcctacaagccctcgccgtttgccaaggcgaacccgtcccacaccaacctcgtcgaagttgtcaaggcttaagcgcggaagttgaacggaggaaacgatcatgactcagtacggattctatttcaacggccagcgctgcaccggctgcaagacctgcgtgatggcctgcaaggacaaaaacgacctcgccgagaccatcaacttccgcaacgtgctggaatacggcggcggtacctggacgcgtgccgatgacggcacctggggcaccgacaccttcgcctacaacgtgtctgtcgcctgcaaccactgcgacatgcccgcctgcctgggaaaatgcccccagggagcccttacgaaggacgacgagacgggcgcggtgctgcgcgacgaggagaagtgcatcggctgcggtacgtgcgttgcggcgtgcccctacggcgccccgaaggtagatgccgagaaggggaagtcggtgaagtgcgacatgtgccacgaccgcgtggctgccgggcagatgcccgtgtgcgtggaggcctgtccgctgcgcgccctggacttcggcgacatcgacgagctgcgcgagaagtacggtgatgtggcggatctggctccgctgcccgattccagcgagacgagcccgaacctcgttctgaccgctccggcctgcgccgcgaacgctgcttccggcgagcttttgaacgagcgcgagatcctctaggttccgttcgccctgacgggacgaacggacgggccgacgctgcggctccgacaggcacctgcctctgcgcttcaccgcttgccctcacgtacgaagtgcgctcggccgcggttcagcgcagatccaggtgcctgtcggaccctcgctgacttccttgggcgcaccagggtgcggtagaatggcagcagcatttctagaggtttggaaggggggcgaggatgcagtacgggttctactttaacgggcggcggtgcgccgggtgcaagacctgtatcatggcctgcaaagacttccacgacctgcctcccgagatctccttccgccaggtgtacgagtacggagggggcacgtggcggcgcgaggccgacggcacgttgtcccaagatgcgttcgcctacagcgtttccgtggcttgcaaccattgcggtaatccggcctgtgtgcgcgtatgccccaccggggccatgcacaaggatgagcgcgggctcgtgtcggtagatgcggcgcgctgcatcggctgcggctactgcgccctgtcgtgtccctaccgagccccgaaggtcgatcgcgaggctggccactcggcgaagtgcgacggctgcaccgaccgggtggccgcgggtttggagcccgtgtgcgtggaggcgtgccccctgcgggcgctgagcttcgggcctgtaggcgagctgcgcgagcgctacggcggcgcggccgacctgccgcctctgcccgatgcggcggctaccgccccgaacctggtgctgacggcgccggcctgctacgaggccgacccggagcgcatccgcgccgagggctgtgttctgagcattcgcgaaatcgtgtgagtgaggcgacgctttccgaggagcgtcagcaaggggatggcgccgcgtcccgtcgggggacaggcgcaggaaatagagaggacggctatgaccgagcaagcagtgccaaccaatcgggtcgcaacggaacctgggccgttcggggccgttgccgacgaggctgcgggaggcgacggggcgatggccgcggtggccttcattggggcgagcctggccccgttctttctgaacgacccgcgcacgggggatgccgccgacgccttcgccgctctggccgagttggatgcggaggccgccgctgccgagtggcccttcgtggaagaggctgaggcccgcgcgtctctcgccgctatggtgcgcggtctggctgccggcgccgacaacgaggagctggtctgggagtaccgccgcctgttcgtgggcccgggtcatctgccggcgccgccctggggctcggtgtacaccgaccgcgagtgcgtcgtcttcggtgaggccacactcgccctgcgcgcctggatgcgacgcattggcgtggcacgtaccaccgacgagcgcacgcccgaagaccatatcggcctcatgctggcgctgctcgcctatctggccgaggaacgccccgaacttacggacgagtacctgcgcgaccacctgctcacctgggcgccgcactatctggaagccttggaggaggcggccgatcatcccttctatcagggcctcgccgcgctgacccgctccacgctgctcggcctgcaagaagcgcgcggcctcgaggtcgtcacgccccgcttctaccgctagggcgtctcgtggacggcttctcgctcgcgttcggcgaaatcacgctcgtgctcttcacgaccctggctccctcgggcgcggtggcttatctcatcatggggctgccggtgctcgtgggccgagcgcaggacgaggtggctcggcgtctgaaccggtggtcgtgcctgccgctggtggtgactatggtggggcttatcgcctcggccacgcacttggggaatccgtcgaatgcgctgtatgtgtttaccggcgtgggccgaagcccgctgtccaccgaggtgttcgcggccgtgatcttcctcgcgttggcaggcgtgttctggctgtactcgtttgccgagcgtccgcacgttgggctgcagcgggggctgttggccgccattgacgtcgccatcgtcgccttcgtggtggctgtggccttcgcctacaacgtagataccatcctcacgtggagcttgccgctggtgcccgtgagtcttctgctgaacgcgctgctcggcggcccgcttttggctctcgtcggctttgcggtagcaagtcgcgggcttagtacgaccccagcggccgagccgtcaatagtgcacgccgagcctgagggaacgtcgaaggtgcacgccgagcctgagggggcgtcgaaggtggggtcggccgcagtgcacgttttcccgagccgctgcggcgcgcgcgtcctgctcgccctcgcgacggcggcatgcgcggccaacgtagcggtgtacgcggtcctcggcttccaactgcagtgcattgaaaatgagcttgtctccgccgccgatctcgtggtcggctatccagtctacctcgctgccttcgccctgctcgccgtttgcgccctcgttctcgcctggcgcgccgaggcccagggcgcacgtcgccgttcccttcctcacctcgccgctgccagcaccctcgccttcaccgccctcttccttatgcgcttcaccttctacatgagccatctcaccattggcctcggcgtctaaactggcaaaaattttttacagttttcggtacttagtgtaccaggtgtacgatttcggctattgaggaggccatggtgcgtttcggttgtgcgcagtcgctcatcgtgaccttcgacaaagaacgagatatcgaaacgcctgagggcctcatctccgtgcggcctgcttggaagtggctgctggaagcgtgagcgagaaaaagaaactacgatttggtagctatgattttgcagccacgatttgacggttgtgaaactacttccgtcgatttgcgactgcttttggtctcattgcgggaaattccgtctcgttttagccgcaaatgaacgcttgcggtttcactaccgttcatttgcggctgcaaaatgcgctcacgcttccattagcaccttttcgtccaggttctctacccaggtgcgcagaatgcggccggcttccacgtccatctttgcgagggtgcggccgaactcgctgcgggggcgatacacggcgccggggcataagtagatgcccgcggggcgcgcgtcgggtcccgttttcagctcgggcacgtgggtgtggccgtgaacgatgacgtcgggcagcggatcgcccggtgccagggccgccgagccggcgaagctgatgcgcacgtcgcccggcttgtggcccaccaaaaagcgcacgccgtctaaaaccgggtgcgcgaaatgtcccacggcgctgccgtactcgtcgaagtcgttgttgccgagcaccgccgtgaccggtgccagcgtttccagctcgcgcaggatggctacgccgcctatgtccccggcgtggatgatatgctcgcaatccgccagcgccgcgtaagcacgggggtcgagcgtcccatgggtgtccgaaatgatgccgatgcgcaacatggtgactccttgctgctaggacgatagttcgcgcgcccgcgcccgacggtcgcttgcggctggcgacggctcgctcccgagccagcacctggcagcggctcgcgccagcgcccgacaacggttcgcgcatgtctcgatgatagccgttttcgcgcaacaagcttcgcgaaataggcaagatgccgaatgttttagatgtttcagaaaaagccgaatcaacccgagagaaaaaccgaagcaaaacactcatgaatatcctcggtgccgccttttcgatacggcgaccctgctatgatgaaggcagtcaggcgggggagcaccgtcgaggagcagcgcccccgcgcgaatctgctcgagagaggatttcccatgggcaagaaagttgacgaggcgctcgatatcgcatacgaggacgtgcccacctatctgcacgctcatcactccatgtacatggaagcccccacggggctgtactacctgaccgacgtgaacgaccgttattggcgcgttcaagacacgaggcggttcaacgagaagggccactatatcgattgcagcccgctcgtgcctacgattgccgagtttttggagctgccgtacaacgacgagggccataccattaaaagcgtctttgcccaggcgacgttttacccgtcgggcggcgagaaagatgtcgtagaggcgacccagtagcccgaaggccgaggaaggccgaaaaagtccgaggctcgaggaaagagctgggggcgcagaaggcctagggcaagagcctgcgagggcgcagaaggccgctcgggaatagcgtgttgcaaggtaaccattcggtggggcgcttccgccaaagggagggagcgccccatctctgttatgatgctcggtgcgagagcgccgacaaggcggcgcggcgatatgctggattatgcatgagagaggtgtcacctatgggaaagaaggacgttgaggcgctggacatcgctttcgatgacctgccgacgtacctgcacacgaatcacgcggtgtacatggaagtggccgacgggctgtactacctgaccgacgtgaacgaccagtactggcgcgcgcaggataccaaccagttcaacgagaagggtcactacgtcgattgcagcccgctcgtgcccaccatcgccgagttcctggatctgccgttccacgagggaaaatcgatccgcgatttggctgccgaggccaccttctacgcatccggcgatggcaaggacatgcccgaggatttctaagcgccggtgcgtggtttccgaagcggtctgtcttttgttcttacgacgttcaagaaccccgaggtgtcgaaaggatgcctcggggtttgtgctatgatgccctgcgaactaccctggtcgcgaagtgcgcggccactcgagaagagaaagaaggaatcatggcagaagaatgctcgcacgagtgctccagctgcggcgtctccggctgcggcgaccgcaccgccgaggccggcccgtccaccctggcgcccaacaagcgcaccaacgtcaagcatgtgatcggcgtcgtgtccggcaagggcggcgtgggcaagtccctcgtcaccagcctgctcgcctccgagatgaacaagcgcggccacaaggtggccattctggatgccgacatcaccggcccgtccatcccgaagtccttcggcgtcgatagccgcctgaccgctgacgccgacggcatcaacccggcgaaatccgccagcggcatcgaggtcatgtccgtgaacctcatgctgcccgagggcgacatgcccgtggcctggcgcggcccggtcgtcaccggcgccatcaagcagttctggcaggaggtgaactggggcgatgtggactacatgttcgtcgacatgcctccgggaacttccgacgtcttcctgacggtcttccagtcgctgcccgtcgatggcatcgtcaccgtgtcggctccccaggagcttgtggccatgatcgtcggcaaggctgtgaacttggcgaagtcgctggaggtgccggtggtgggcctcgtggagaacatggcctacttcaagtgcgacgagtgcggcaaggagcaccacatcttcggcgagccccagggcgcggccgtggccgagaagtacgatatccccgcggtggccacgctgccgatggatccgaccttcgcccgcctggtggacgagggcaaggtggaggcctacgaggtggaaggcgccctggacggcatcatcgaccagatcgtcgccacttgcgaggccgagtaaagccggcgctacgaggggcgcgggcgccgcgcgagggccgctagcgggaatttccaaaattcctgaaaaaagttcttgcgcaccgcctccgttatgctaatatagtcctcgcactttttcggggccttagctcagctgggagagcgcatggctggcagccatgaggtcaggggttcgatccccctaggctccaccacatgttctacgaccgccttcgggcggtcgtttttttgttgatgctgcggttccggcaggcacctggaaaatgacccttcacctcaggttttaaggaatcctttcaggaactttacaggtatgtgcgattattgttgacaccgtgtgtggactaagtaattcgctttatacgatgcgcgcgcattgaaataatagctccctgaccttacgaaacgttaaagaacgttacgctagggttgcaacattcagttagcgctcatgaaggaagggcgggagtcccgcggagggagtgggagcgcgctcgatgagcctgcgccggcaatagggctgacgcaatgtcatgaaaggttgaggacacatgaaatttgcctcgttcaagagctctgctctgaagagcgtgggagcggtttcgctctgcgtcgctctcggcgccggtctcgtgggctgcggcggcaatggcgccggcggcggtgccgtggccgctacggttaacgggcaggacatcatggagcagacgatcaccgattacatcgcgaacttccgcacctccagctcgttggagtctgatgaggcctggggcgagtggatggtcgccaacggctatacgcccgagtccgtccgcgaagaggtcattgactactacgtcaaccaggatctctacgatcaggccgccaaggagtacaacgtgacggtcgagcaggccgacatcgacgcggccatggaggagaccaaggcgatgttcgagtccgatgaggccttccaggaggccctcgaggcgtcgagcatgaccgaggagtcctatatcgaggacgtcatccgtccgaacctgctccagacgaagctcgccgaggccgtggctgcccaggataccgagggtgagggcgacgacgctacgctcgcccaggcccaggccatgagcgagcagttcaacggcgctaagcgctcgagccacatcctgctgaccgccgaggaaggcgaggacgacgccgctctggccgcccgcgcccaggagctgctcgatcagatcaacgccggcgagatctccttcgaggatgccgcctcccagtattccaccgacaccggctccgctgctaacggcggcgatgtgggctgggacgcgctgagcaccttcgtcaccgagtaccaggacgctctggccggccttgagaaggatcagatcgttgccgctcccgtgaagagcgagtacggctaccacatcatcaaggtgaccgatgtctacgaggttcccgagggcggtatcacgtcggttgaccagctgccgaccgagttccaggagtatctgacctacatggagcagagcaatgcttcccagaacttctccacctggttcgaggagtatcgcaacaacgccgagatcaccgttaacccgatgcccgagggcctgccctacgacatcgaccttgctccctacgaggaggctgctgcccagaacgccgagggcgacgctgccgccaccgagggcactgagcagccttccgacgagaccatgtccgccgaggatcaggccgctgccgacgccgccgctgccgatgcggccgccgacgaggccgctgccggcgaggctggcgctgatgccgctgccgccgatgaggccggcgacgctgctgctgccgatgaggccgctgctgaccagacggctgctgaccaggccggtgctgacgccgctgccgaccagacggccgccgaccaggctggtgctgacgccgctgccgaccaggccgccgagggcgccgagggtacccagcagtaagctgctctcgacaacccaggcgtttcccaaggacccgcgctcaggcacgggtcctttttcgtagcagcgcatgatgcttcaagagggaattcccccgaggacgtactctcggtcgcgcagccagcagcgagctttgccgacgaagggttcgctctctgccggcggcattcgaaagcagccaaaggcgccacgtccatttgtggaggagctgccgcgaaaaccgttctcgtccgcgaaatgcgttatgcttcttccctagaaccccgttccgctctcttcgaaaggccttccatgctcttctgcgatatcgatcttctcgacgccgacttcgctatcaagcgccaccaatgggtgggggtgcgcgacggccgtatcgcctatatcggctcggtgtctcccgcgcccgatgaagctgctaccttcggcgagacttacgatggcgcgggacgtctgctcatgcccgcgctctacaacgcccatgcccatgcccccatgacgcttctgcgcggttacgccgagaacttgccgctgcagcgttggctcgaggagaagtgcttccccttcgaggccaaaatgaccgccgaggattgctattggggcacggtgctcgcctgtgccgagatggcgcgcttcggcgtggtcagcttttcggacatgtattacgcgaccgaggagcgtgcccgtgcggtgcttgaggccggcatgaaggctaacatgtgcgaggggctggtggccttcgaggagaagccctacgcggaatatccgatctgcgcccagatggaggctctcgtgcgcgactggcacggggccggcgacggacgcattcgcatcgactacaacatccattcggagtacctgtccactgagacggtttgccgcgacattctggatatcgtgcgcggcactgacttgcgcctgcatatccacctatccgagaccgagaaggaagtgcgcgagtgccgcgagcgccacggcggcctcacgccggtggcctatttcgacagcttggggttgttcgaggtgcccgtgacggcggctcattgcgtgtgggtggatgacgctgatctggatatcttgcagcggcacggggtgttcgtcgccaacaacccggcttccaacatgaagctcggcagcggtttcgcacccattcccgagatgctgcgccgcggcattcccgtgtgcctgggctccgatggcatggcgtcgaacaacaaccacaacctgttccacgacatgtacttgcaggcgcttatctacaagggcgcgacgcttgatccgacggcggtcacgccccagcaggcgctggcggcggcgacgcgcaccggcgcgctttcccagggccgcgaggattgcggtgtggtggcggaaggcgcccgtgctgacctgtgcgtgctggacattacgggcccgtcgtggtgcccggcgcccgatctggtttacaacctggtctatgcgggcgacggggccgatgtggtgctcacaatgtgcgatggcgaggtgatctatcgtgccacctccgctgctgcctccgccgatgcctctggtgttgcctccgccggcgtccccggtgccacctccgctggcaccgcgcgcggctgtattcagcatgccgtcacgaacgccgaatggcccaccatcgatatcgagcgcgccaaggccgagtgcgccgcccgcaccgcccgcatcatcagcgagctatagccatatcccctgtgtcgagcagcccagctgttcccagtctcgcgaggccgcggttcttgccgtggcctcgcgtgtcgcggccgcaccttcgtcggctaaagtccacgctgctatctcgcagcgcgcttccttccccattggcttagcgtgctgcgacgcgtgttttgtcgtgacggccgccagattgtcgggcgcgagctcttgtcatgccataattggcggtttggtatccgaggaagccttttcgcgtgaaattctggcagaaatcggggtttagtaccccgatttctgccaacttcggcgatttggttcctcgggtctgaagaaatgcctggtcgcgattcgcccgggcagcttccgcaggtaccaaacttcgagatttgcccgggggcggctaccaaacttgagctctcgccacaaaaagataccaaaccgcgcgatttcgccagaatttcgtctcgtcccggtaccaaactcccgatctcgccagtctcgccctgggtctcggtaccaagctcccgatctcgccagccctgccctgcgcctggtaccaaacttgcgatcttggcgtaacttctattggccgccaagccccaaggttctccagagccgagtctgccgttcctcgaagccctgcacgcgaaagcgcagggggtgcttgagcgctcgcgcgatagttgctgcagctcgattcatctcgtcgatgcaggcgaagtggtttcgcgtgatgctaatgacacggtagccggagtcctcgagggccgcccgtcgcactgagtcgtggtggtgacttgccgatgtcagatggaaggcgtcgctgtcgtattccacgatcagttgttgtgtctgccagagaagatcggctacgtagtaggaacgatcggccagtttcttgttggcctctgccaggttgatcggttcgttgaacgatggctgcggaaggccgtagcctccgcagcggggcggaaggtgcagcacgagccctagggcgcactcgcggggcgacgctgcatttgcgagcatccagtgaacggcgctccgcacatgagcgcagccagggacgtctcggtgacggtcgctaatttttgcgatatcggctggaaacgtgaggggtgctcgtgcgagaagggtacttgagtcttcggcgaagcagaacgtgctgcagagtattgttcccagataagctatctcttctatgcgttttccgcgagctgcttgaataagtgccaattcgggacctggcaggaagataccgttggcaatgcgatagagcggacttcggatcaccgactcgggggcaacatggcagcgggcgagcttttggcgacggtcgtcgggattgaagacgagaatgtgtgctggttgcgtgagccagggaaagagttgcgccagataggcgatgccggccgttgtcggcgcggtttccgctggtggctttccgcggaaggcgatgctgtcagaggggcgcaaggcaagatgggcatatatctcaagggccgagtcgccgaaaaggatcagtttgctcataggtgtccgtcctcggagttaaaagttgttgtctcggggatgctacaggtattgagccgtattaatgacgcgagaatgtctcggttggttcctcgcgccaactgtagcggagtcgcatggggcggcggtggggcgttcgggccaactcgcggaccagcttgcgaatcggctcgcgggccaactcgcgaatcaaaccccgagaagctccccctgagaaaaagcgcacgaacttcgtctcgcgaatttctcgctgtactcagcggacgcggtgccctctgctaatatggacgccacggaaaagacgccgttcgtcggcgctgaaagaccgctcgctggcgatgcgccaggagctcgcaggccgcagacctgccagccaagagctcgcgggtcgcggacctatcagttggcgcagccccgtcgtgggcattcgcggcaacgggaattcagcgtagcgtttggcgagaaagcgcgcggccgatgggcagcgcgcccgggttagacccgcgcaaggggtgcgggcgccctctatcaggaaggcaggtggtcgctcatggcagctccggctcccgaacacgtcagaaacatcgtccttgtgggacaggatggcgccggcaagacctcgctggccgaggccatgctcttcgtttccggcaagacgccgcgcatgggcacgacgcacgacggcaagtcgtacctcgattacgaccccgaggagatcaagcgcaagttcaccatttcaacctccatcgcccccatcccttacaaggactacaaaatcaacgtgctggacacctccggtcatcccgatttcatcggcgacacgctggccaccatgcaggcagccgaaatggccctgttcgtggtggacgccgtcgatggtccccaggtcatgacgacgaagctgtggcgcgaggccgaggacatgcgtctgtcgcgcgcggtgtacatcaaccacatcgatcgcgagaacgccaacttcgacgccgccatggcgctgctgcatgcccgcttcggcggccgcttgggcgccgtgaccatccccatcggccaagccgaggagttccggggcgtcatcgacatcatccgcatggaggcccgctatttcgaggacggcggcgagcgcgtggaagccgtggacacgctgccggcgaagtaccaggaggaggcgcgcaacgctcgcgacaagctgtgcgatctggtggccgaggccgacgacgagctcatgatgaagcatctcgacggcgaagagcagcttacccaagaggagctggaaggcctgctggacaaggccatcgcccaggagctcatcatcccggtgttcgtgggttctaccatcatcatgcagggtgttcagggtcttatggaagacatctgcacctacttcccgcacccgaagagccacggccgcttccgcatggccgacgacgtgacggtgcgcatcgacgagacgaagcctccctgcgccttcgccttcaaaacggtgtccgacccgttcgtcgggcgcctcaccttcctgaaggtcatctccggctacctggagccgggcctggagttggtctgcgggcgcaccggcaagaaggagcgcctcggcaagatccaggtcatgatgggcaaagaggccgtcgacgtgaagagcgccaaggccggcgacatcgtggtcgtgccgaagctctccgatgtgcgtgcgggcgacacgctctcctgcgagggcaccatcgccatcgagcctctgcctctgcccgagcccttgtaccccgtggccatcgaggccgtgtcgaagaaggaagaggacaagctcggcaccttcctggctcgcgccgccgaggccgaccccacgctgcgcatcacgcgcgatgaggacacgcatcagaccatcatccacgccatgggcgagactcaggttgatatgctaatcgggcgcttgaaggagcagtccggcgtggaggcgaagctcgtgcccgtgcgcattccctaccgcgagaccatcaccaagcaggccgaggcccagggccgccacaagaagcagaccggcggtgccggccagttcggcgactgctggctgcgtttggcccccatccccggcgagggctacgagttcgtggatgagatcaagggcggcgccattccgaacggcctcatcccggccgtcgacaagggcgtgcgcgaggccatggaagagggcttcctcgcggggtaccccatggtggacatcaagtgcacggtgttcgacggctcgtatcattctgtcgactccaacgagatggccttcaagaccgcggcccgcatcggcttccgcgcctgctgcgagaacgccggccccatcatcttggagccctgggccaccatggaagtgaccgtgggcgaggagtacgccggtaccatcatgggcgacatctccacgcgccgcggccgcatcgtgggcaccgacgcgggttttgcggccggcgagaccatcatcaagatgcgcgcgccctacgccgaggtcatcaactacacgaaggatctgcgctccatgacccgcggctctggctcctacacgctcacgctggaaggctacgagcaagcgccagccgacgtgacgaagaagctcgtggaagcctacgaggccgcccgggcggcggggaactagcaagctgcctgcacttctcgttcagcatctgtaatgtatcaagccgggaggttcgcttcccggcttttctttctgcaacaaagtcctgttccagccctattttccagaaaatttccatggcttgtaaaaatttttcttgacttggtcttcacgccgtagtattttagcgaattgcaacttttttgcagatttgcgatggacgtgaaggaggaacagcctcgtggcaatggataagaaatccgctcccaccagcctttacagggatcgccgaagcttcgcgaagattcccgacgtcatggacgtcccgaacctgatcgctatccagacggaaagcttcgactggttcaagaacgagggcttggcccaggctttcgccgatgtgtgcccgattgagaacaacaccggcgacatgtgcgtggaattcggtaagcacgagttcggcgagcccaagtacacggtggacgaatgcaaggagaaggacgtcacctatcaggcgccgctctttgtggagatccgcttcatcaaccgtgagaccggcgagatcaaggagcaggaggtgttcatgggcgacttcccgctcatgacgccgcgcggcaccttcatcatcaacggcaccgagcgcgtggtcgtctcccagctcgtgcgctccccgggcgtgtacttcgcctctgagcgcgacaagacctccgacaagaccatctacaacgcgaaggtcatcccttcccgtggcgcctggctcgagtttgaaaccgataagcgcgacctgctctccgtgcgcatcgaccgcaagcgcaagcagccggccaccctgctcgtgcgcgccctcggcctggccgagacccgcgaggagatcatcgagcttctgggctcctccgagatggtgctgcgcacgctcgaccgcgaccccgccaccaccaaggaagagtcgctcatcgagctgtacaagcgcttccgtcccggcgagccgccgacgatcgattccgcccgcacgctgctcgacggcctgttcttcaatccgcagcgctatgacctggccaaggtcggtcgctacaagatggataagaagctcggcttcacccccgaggagaacgactcctccacgctgaccaacgaggacattgtccgcacgatgcgctacatcatcggcctgcacaacggcgacgagggattcgtcaccgacgacatcgaccacttcggcaaccgtcgcatccgttccgtgggcgagctgattcagaaccagttccgcatcggattgtcgcgtatggagcgcgtggtgcgcgagcgcatgtccatgcaggagcccgacgagatcacgccgcagtcgctcgtgaacatccgccccatcgtggctgccatcaaggagttcttcggaagctcccagctctcgcagttcatggaccagtccaaccccgccgccggcattacgcacaagcgccgtctgtcggctctgggcccgggcggtctgtcccgcgagcgcgccggcttcgaggtgcgcgacgtccacacctcccactacggccgcatgtgccccatcgagacgcctgaaggcccgaacatcggccttatcggctctctggccacctatggccgcatcaacccctacggcttcatcgagacgccctaccgtcgcgtgatcgacggcaaggtgaccgacgagatcgactacctgaccgccgatgaggaagagaactttaccatcgcccaggccaacgacttgttcgatctggagacccgcgagttcggctacaccgacgaggacggcgtcttccacaagtccgcccgcgtgctcgcccgtaccaccgacaccaacggcgtgttcggcgaggccatggacgtgccgccggagatggtcaactacatggacgtgtcgccgcgccagatgacctccgtggctacctcgctcattccgttcctcgagcacgacgacgccaaccgcgccctcatgggctcgaacatgcagcgccaggctgtgccgctgctgcgcccgagcgccccgctcgtaggtaccggcatcgagcaccgcatcgcggtggactccggcgagatcctcgtggcccagcgccccggcgtggtcgactatgtggacggccagaccatcatcatcctgaacgacgacggcgagtacgacgagtacctcatcccgaagttccagcgctccaaccagtccggctgcatcaaccaccgccccatcgtccgcaagggcgacgaggtgcaggccggcgacgtgctggccgacggtccgtcctgcgacggcggcgagctggcgctcggccagaacctcatgatcgcctacatgccgtgggaaggctacaactacgaggacgctatcatcgtgtccgagcgcgtcgtggccgaggacctgctaacctccatccacatctccgagtacgaggtggacgcccgcgacacgaagctgggccccgaggagatcacccgcgagatccccaacatctccgaggacatgatttccgatttggatgccgacggcatcatccgcgtgggcgccgaggtgttcccgggagacgtgctggtgggcaaggtcaccccgaagggcgagaccgagctcaccgccgaggagcgcctgctgcgcgccatcttcggcgagaaggcccgcgaggtgcgcgatacgtcgctgaaggtgccccacggctccggcggccgcgtcatcggcatctaccgctcctcccgcgaggccggcgatgatctggcccccggcgtgaacgagctcgtgcgcatctacgtcgctcagaagcgcaaggtgcagcagggcgacaagctgtctggccgccatggcaacaagggcgttatctcccgcgtgctgccggttgaggacatgccctacctcgccgacggcaccccgatcgacgtcatcctgaaccccctgggcgttccgtcccgtatgaacgtcggccagctgctcgagaaccacctcggctgggccgccaagtggggctggtcggacgccgaggaaaccgacgaggtcgtggagggcccgatgtacgtggccacgcccgtgttcgacggcgccaccgaggaagagatctcggacgccatcgagaaggccaaccgcaacctcatcaacatgaaccatgcgaagtacggcgacatggcccgcgacgagctggtgccccagctgacgcgcaccggcaagacgtggctgtacgacggccgcaccggcgagaagttccgcgagcccatcaccgtcggccagacctacatcctgaagctcggccacatggtggacgacaagattcacgcccgctcgaccggcccctacagcctcatcacccagcagcccctcggcggcaaggcccagttcggcggccagcgtttcggcgagatggaggtgtgggcgctgtacgcctacggcgcctccaacgtgctgcaggagatcctcacggtgaagtccgacgacacgtcgggccgcgtgaagagctacgaggccatcgtgaagggcgagaacatcccggcgccggaggtgcccgagtccttcaaggtgctcgtgaaggaaatgaagtccctgtgcttgaacgtcgagctcgagggccacgatatgcaacccatcagcgaggacgagatcgaggactacagtgccgaccaggcgctttacgccgcgctcgccgctgatgccaagaagaccgaagacgaagaggccaacgccatcgatgccctggctgccgagctgggcgacctgatgagcggtcttgagtccgacctgaacaccgacctcatcggtggcggagaggaggcctaaccccatgacggaattcgacgtcaacaacttcgacgccctgcgcatttcgctcgcttccgccgaggacgtgcgcagctggtctcgcggcgaggtgaagaagcccgagaccatcaactaccgtaccttgaagcccgagaaggacggcctgtactgcgagaagatcttcggtcccaccaaggactgggagtgcgcctgcggcaagtacaagcgcgttcgcttcaagggcatcgtctgcgagcgctgcggcgtggaggtcacccgctccaaggtgcgccgcgagcgcatgggccacatcgagctggccgcgcccgtgagccacatctggtacttcaagggctccccgtcgcgtctgggctaccttttggacattccgccgaaggagcttgagaaggttctgtacttcgccagctccatcatcacctcggtggacaaggaggcccgcgaggaggacatcgacgacttgcgcgacgagcttgccgccgacatggaagagctggacgccgagcgcgaccgcctcatcgaggccacccgcaagctgtctaccgactacgtgcccgaggaggacgacttcgtcgacgacctcgacgacgacgagcgcctcacccccgaagaggtggaagaggaggtcgccgacatctacgaggagttcaatgagcgcaaggccctgcgccaggacgcgttcgacgccttcctgaagatcgagccgaagcagctcatcggcgacgaggccctctaccgcgagatgcgcgcgaactaccgcgactacttcaccggcggcatgggcgccgagtcggtgcgcgaccttctggacgccatggatctggaggcgacctctgaagagctgcgcgaggtcatcgccacgggcaagggccagaagcgcgccaaggccgtgaagcgcctgaaggtggtggatgcgttcctcaagtcggacaacaagccttccgacatgatcctggacgtcatcccggtcattccgcccgatctgcgccccatggtgcagctcgacggcggccgcttcgccacgtcggatctgaacgatctgtaccgccgcgtcatcaaccgcaacaaccgcctgaagcgcctgctcgacctcggtgcccccgagatcatcatcaacaacgagaagcgcatgctgcaggaggccgtggactcgctgttcgacaacggccgtcgcggtcgtcccgtgactggccccggcaaccgtccgctgaagtccatctccgatatgctgaagggcaagcagggccgcttccgccagaacctgctcggcaagcgcgtcgactactccggccgttccgttatcgtcgtcggcccgtcgctgaagctgcaccagtgcggcctgcctcagcagatggcgctggagctgttcaagcccttcgtcatgaagcgcctggtcgagcttgagtacgccgccaacatcaaggccgccaagcgcgctgtcgatcgcggtgccagctacgtgtgggacgtgctggaagaggtcatcgtcgaccatccggtgctgctgaaccgcgcaccaaccctgcaccgtctgggcatccaggccttcgagccggtgctcgtcgagggcaaggccatcaagctgcacccgctcgtctgcaccgccttcaacgccgacttcgacggcgaccagatggctgtgcacgtgccgctgggcgccgaggctcaggccgaggcccgcgtgctgatgctgtcctccaacaacatcaagtccccggcccacggccatccgctgaccgtgccgacccaggacatgatcatcggcctgtactacctcacggccatgcgcgacggcttccccggcgagggtcgcatgttcatcgatttcgatgacgccctgaacgcctacgacgcccgcgccgatctggacctgcaggccaagatccaggtgcgtctgccctacaacacgaaggtggccaccgccttcggcgtgttcgaggatcacaaggagggcgagcgcatcgagacgagcgtcggccgcatcatcttcaacgatgtgctgccgccggactatcccttcctgaactacgagatgaacaagaaggagatcagccgcctggtcgaggacgtcaccaacacctacgacctgtccgaggtgccgccgattctcgacggtctgaaggacgccggtttccactacgccacccgcgccggtgttaccgtgtcggtgtacgacgccaccattccgccgtccaagccggcgattctcgcccaggccgatgagcgcgtcgccgccatcgacgaggactacgagatgggcctcatgtccaacgaggagcgtcacaagcaggtcgtcgacatctggaacgacgccaacgaggaagtcggcgaggccatggcggagaacttcgacaagttcaaccccatctacatgatggccttctccggtgcccgaggcaacatcaagcagattcgccagctcgccggtatgcgcggcctgatgtccgacccgaagggcgagatcatcgaccgtccgattaaggcgaacttccgcgagggcctgtccgttctggagtacttcatttccacccacggcgcccgcaagggtctggccgacacggcgctgcgtaccgctgactcgggttacctgacccgccgtctggtggacgtggcccaggacgtcatcatccgcgagatcgactgcggtaccaccgagggcgtgccctaccgcgtgcgcaacgagaagaacgaggtggacgagaacctcatcggtcgctgccttctggaggatgccgtctctcccgagaccggcgagatcctcgccgaggccggcacctacctgcattccatggcccagctgcgcgagcttgatgcggccggcatcgaggaggtcacgatccgcacgatcatgacctgccatgccgagcacggcgtctgccagaagtgctacgggtgggatctggccacggcccgtccggtgaacatcggcacggcggtgggcatcatcgccgcccagtccatcggcgagcccggcacccagctgacgatgcgtacgttccacaccggcggtgttgccggcgaggacatcacccatggtctgcctcgtgttcaggagctgttcgaggcccgcaagcccaagggccaggcggtgctcgcggaaatctccggcaccatgcaggtcaccggcgacaagatgtcgaagaccatcaccatccacgaccaggagggcaactaccgcgagtacgtggtgagcgcccgtgcccagcttctgccgggcgtgttcgacgggtgcgaggtgcgcgtgggccagcagctgaccaagggctccgtgaacccccacgacctgttgcgcctcaccgatccgaacacgacgctgcgctacatcgtgggccaggtccaggacgtgtacgtgtcccagggcgtggatatcaacgacaagcacatcgaggtcatcgcgcgccagatgctgcgcaaggtggccgtgctcgatgccggcgactccgacttcctgccgggccgtcaggtgaaccgctt

SEQ ID NO: 10646 - DNA, 862 bp, Unknown
  gut microbiota DNA sequence
ccgcgtcgttccaggagaccaccaaggtgctcaccgacgccgccatcgagggcaagaccgatcacttggccagcctgaaggagaacgtcatcatcggcaagcccattcccgccggcacgggtctgcgtcgctaccgcgacgtgggtctcacctacaagggccgcccggtggagaaggtcacgggagatgcgctgcccgacttcgcgccggatgcgctgcgcgagatcgaggaattgctgccccagccccaggattggtcgctcgacagcgacggctacttcaattcttcgggctcgttcggcggctactacagcgccctttcgggtcatcgcggccacaacctgtccgacgaggacgcgcgcctgtacatctacgacgatctgggcgtgtcccagcgttgggcgaacaagttctccgaggcgggcatcgagaccgtggccgaccttctgggtcataccgaggaggatctgctgcgcatcgagggcatcggcgtgaaggccatcgaggagctgaaggagggcttggcggcccgcgacctcatgcacgtcatcgaggacgacctggcggcttcctccgacgacatgagccagctgctcgacatggtgttctcgcccgatgacaccatcctcatcggcggcgacgagcccccgacgttcaacaccgacggcgaggagatgctcggcgaggccctgcctccgcgctcctaccagcgcaacctggaggagcttgacgcgctgctcggcaacatgggcggcttgggctccctcggcttcggcttcaccagcgccgaggacgaggcagcttccaaccaggccatggaagacggcgaggagtaagcgctcgcaacgggttccgaaaccca

SEQ ID NO: 10647 - DNA, 673 bp, Unknown
  gut microbiota DNA sequence
atatgtcaatggtggtttaacagcgggtccaaatcccgtgttccagaaaagcaccttttccagattaggagagcgaaaaaggcccgaccgcgggctggacgcggtcgggccggaaaaagccggggcagcgggagggagaatgccgccccggcgcggaaaatgcttagttgcggataagcagcgcgcaatttgcagcgggcatcggcacgcaggtcgaaactcgcacaggccggagcacacgcgctcccgtgctagcgctcgcgcaactcgtggcaggtgccgcactcgaaggtgccccggtggtggcactgggcgcagtacttcatggcgtccttgggcaagtccttcgaatggttgttgtggcaatcggtgcacgtagccgggttcgcctcgtgcttcacgccggccgggcgctcgtgcgggttcacaacggtgcccttgtcgtcggtcagcgcggtggagtcggccgtcagcgtcgccacctcggacaagtcgccgtggcaggcgatgcaggtggcctcgtccacggtgacgaccgtggccttggtggccggcttgtcgcccatggcgatgccgtcgtgcacctcggccaacaccgcctcatcggtatggcaggtgacgcaggtcacaccctcggcctcgtgggccacgccttggggacaggcggaatcgg

SEQ ID NO: 10648 - DNA, 5268 bp, Unknown
  gut microbiota DNA sequence
gccgcctcggcggtatggcaggtgacacagtcggactccatcgtccagttcaccggctgaccggccatagcgtcgtcgccgccggcctcctgctcggcgggggcggcggcagtccccgaaccgcccgcatcggacgcgggcgcgctcggcgcacagcccatgagcgtgcccgtgagggccgccacggcgagcactgcggcgatgatggccgcaaaggcaaggcggcgcggccgcttcgcttcactttccatggaattctcctctcatctcgctcgcggctcgccgccgctcgcagggggacggccgccccgcaccatgagcgcacggggcggccgccttacttgcttgagtgagcctcaaggctcggggaactactcggcgtcccagttctccagaccggaggcatggcgggcggcgatacggccccacacctggttctcggcgttgttgccgccggtgatgccgtaggtgtggctctggaagttgccgaagcagccggccgcgtacaggcgcgggatggggttctgggccggatcgagcacctgggcgttctcgttcttcataggaccgcccaaggtggagcaggagccgggatagatggacacggcgtagtaggggccaccgtccagcggcaccatggtctcggcggcgcggtcgaagcgagcgtccttgccggcggcggcgaagccctggtactcctcgaaggtggccttcagggtgtccacatccatcagcggatcgaactccttgatcttctggcccagctcctcgatggtggcaccggtgaggatccagccgcgctccagctcggccttgttgtcctggctccagccgtcccagtcgcgcacggaatcgggcaggtcgctggcgaagttgccgcactcgaagaagtcgccctggctggtggacagcttgccggcgtcaaagcagctctggtcaaagatgccccaggagggaatgcggtcgaagtcggcgatggagtcgtcgaaggacagcagcgtatgccagccgttgtgcggcgagcccatgttgttctcgttcacgaaacgcttgcccaagcggttcacgttgaagtagccgaagccgggcatgaagtacaggatggagaagtcgtactcggggtcgcgcgtccacatggagtacatggagatggccatgtccatgtgccacagcttcgcccccacgtcctcgaccatcttgatgccgtcgccggtgttgaagcgccagccctcgaacttgaagggagagcacttgaggtactggttcttcagctcctcgttgaactcgaagccgcccagcgtcatgatgacggccttacgggccttcacggtcttctcctcgttgccgatcatggtgtaagcgcccacgatctccttggtctgggggttctggatgaggcgctcgtcatggcagtcgaacagcacctccacgcccagagcctcgcgctgggcatccagctcgtggaaggacagcatgccgaagccgtcgaccgaggacagcttgcaggagccctcgtaggcgttgtcgtccaggaagaagtactcggggatggcaccggccagcgcctgctccaccacctcgtaggtcatgccgtacttgtcggcgtactccgtgttgcgggcgcactcctcgacccaggcctcgatcatcggatcgggagtcttgcccttggtgaaggcgcggatgtagtccttgaagcgctccttctcggactcctccacgatggtccactctccgttgttgatggagctgtttccgccgccgcgctcgggggccttctccagcacgagcacctgctggccgcactcgtcggcgccgatgagcgacgcccacatgcccgcgccgccgtagccgatgacgagcaggtcgcactcgtagtcccaggtctggggcagccagtcgccggtgttggcgagggtgtcggcaccgcccgcgctttcgttcgcgcagccggccagcgccgccgtgcccgccatggccgctgcggccaggcccgcgcccttcagaaacgagcgacgggacacgccgagttgttcgtctttcttcatgaaagatccttcctcctcatgtcgtgcggacgcccaagggcacctcgagaggcttcgcgccttttgagatttcgcgctttcgcaaacctcgaaggctcgaagagaacactctcgaaggccgcccgctcccttggcgggcccctccccttgcggctctcatccgcgtttacaagtcccaagattacgcagaaccgctcgcccgcgcatctgagcatccgtcggattttcaaaaagaatctttcgtagagcgctgacgtttccccagatcaacgcatctaggattatcaatccgataggcgcaaattccctgataggctatgatttgaagctctctgtggacgaatcggctagaataatcgacattgcactgaggcacagcctgggaggggaagcccgtgtcagcaactacacatgcgcgcgaacctatcgaaggacctatcgaaaacgcaaccgaagagagaacagacgacgcggcacgccaagctgcggattgcggaactcctgcagagggagaaggcgaaacgcgcagaaggcggcccgtagacgatgcggcgctcctgaacttcctcatcgtcgtgctgggcttcggtctgtgccgggcatggatcgtcttctgcctcggcgcgcccctcgtcttccctgccgcctccccgacccattggatctacctcgccagtggggcgctgtgcgcggccgttgtggcccttatctgtcgtgcgggaggaagctcgatcgccctcatgcgccggatgctcttccgaataacacccttcgcgctgcttgccagcggcatcctcattcccttggcgatacgggccaacagcgagctgctcatggcatgcggctttgtggtcggtggcatcggggccggaccgttgcaggtgctctggggcgatcgcttctcacaccattcggttcacttcgccgccttcgcctcccctgcggccgccatcgtcacggcaagcgtggccgccctctcgtcgagccagacgagcttcatggggttcatcgtcgtgccgcttctgtccttcggcctgctcgtcttccacgcggatcgcaccgggcacccctggcgcgagcttgtcggcaaaagcgaccccgactcctcgcgagacagcgcgccccagagcgcggtcgcggaacccgccgaggcgatgacggcgcagccgacaggcttcagggccggcagccgcgtgcccctcggtgtgggcaagctcatgttctccatcatgacgttctcgctgctttgccgcatgttcgacaccatgaacagcggcgaagatcccctggcgttcctcggcggaagcccgatcttcgccctcgtcgtggtgggcgcggccttcatcgccattgtcgcgaaggcgggcgatcgcttcaaccccaccttcatctaccgcctgtcgctgcccatcatggtggcgggctacgtcgccatcgctcttttgttcgacagtcacgccgccatctcgctgctcatcatcaacgtgggatacgagttcttcgacatcctcacgtgggtgctgttcgtcgacgcctcacggcgccgcaacgagaacgccctgtacatcttcgggctcggggtggccttcatgttctgcggcatggcgctcggcaatgcggcgagccatatcctggacaccctggtggccggcggaaacgtgcaggccaacgtcgtggccatggccgctattttgtgtctggtgattgtggcgttcctcgtgctgcccgagggaaccgtggcacagctgtcccgacgcgagggacacgcggaacgcggagaagagcctacagccgaaaacaacgatctcgccggatcggaggcaaaagacagcgctgcgggggacgggcaagccgacggtgccgccacggcggatcgcatcgagcgacactgcgccgccgtggcccgcgacttcggcctcaccccgcgcgagagcgaggtcatcgtgcttctggcctacgggcgcacgctggccatcatcgcccgcgatttgcatatcgcccagggcacggcccgcacccatatcgagaacatctaccgcaagctggacgtgcacaagcagcaggagctcatcgacctcgtagaaaaccacaagggctaacggccgtcccgcgaaaaaggggagcgcgtttgatggagcacgcccccttggccagccttcgctgaggtggctactcggcagcctcccccgctaccgcggctgcctcgccggcggcgcgctccgcccgctcgcgctcgatggcggcaagggcttcctggggcgtgggcggccgcggcgtttcccgcgcgatggccgcagccagggcctcctcgtcggccccttcgatggcgatgctgcggatggcgtcgccgatggccagctgctcgatcacctcgagcccttcggtcacctggccgaacaccgtatacttgtcgtcgaactcgggctgttcgcccagcgagaaatagaactggcagctgccggagttggacgcggacttgtgggccatacacaaactgccaagtacatgccggttgcgagggttgccctcccactcgtcgatgatggtatagcgcgcgtcccccgtccccgggtgcatcccgcggatggctccctgagcggcggcgagtacctgggccggccccatggtgcgcgtggtggggcagccgccgagcaccaccgatccgggcttcttcgcgtggaacttcaaattgtcgtagaagcccttcgcggccagctcgatgaagttgcccacggtgacgggcacctcgcgcccgaacaactccgcgcgcacggtgccgcgcgccgtttctatgacggccacctcccgaccgttgggcacatagcccggcgtgtagatctccagttcgatgcgtcccataaacgctccccttccctgcacgagcgcacccgcctcggcgccgcgcccacccgaacgccgcgccctttagacgccacgttcgcaaccttcaacaaaaagccctcccatcttaagacaggagggccgcacgcgcgtccgatggagcatcctattttgcgcgaaatcggccgcaactcgagttctcgtgaaccgtgagaattggaaaatgtgcttttttgttcacctttctgagctgggatttctcaagttttcgcagatcaaataaggcatttttcaaaatcaaaaaagcacattttccaattttctgggccaaaaaagcacattctccaaatccccgctgttaaaccaccattgacatata

SEQ ID NO: 10649 - DNA, 2211 bp, Unknown
  gut microbiota DNA sequence
gtggcgtacatgacggccttgatggtgtgcatgcggttctcggcctcgtcgaagaccttcgactgcttcgactcgaacacgtcgtcttccacttccatctccgtcacgccgaagcgcttcgcgatgtcggcgccggtggtggtgttggtgtcgtggaaggccggcaggcagtgcaggaagatggccgtcggcttcgccatggccatgatctccttggtcacgcgatagggctgcagctgctcgatgcgctgctgccacacctcgtcgggctcgcccatggacacccacacgtcggtgtagatgacgtcggcgtccgtagcggcttccttcacgtcctcggtgcacttcacggtgcagccgttctcggcggcgatgccctcgcaggtcttgatgagctcatcgtccatccagcagtccttcgggccgcagccgacgaagttcatgccgagcttggcgcacatcaccatgagcgagcggcccatgttgttcttaaggtcgccgaagaagacgaacttcagacccttgatgtcgtagttgaagttctcctgcacggtgagcgcgtcggcgagcatctgggtgggatgccacatgtcggtcaggccgttccacaccgggacgccggccttctcggcgagctcctccacatcggactgggcgaagccgcggaactcgatgccgtcgtagaagcggccgagcacgcgggcggtgtcctcgatggactccttcttgcccatctgggagctgcccggatcaaggtaggtcacgcccatgccgaggtccatggcgccgacctcgaaggcgcagcgggtgcgcgtggaggtcttctggaacaagagaacgatgttcttgccctccaggtagcggtgcggggtgccggtgcgcttcaagtccttgaagttcttggagagcttcagcaggtactcgatctgctcggtggagaaatcaagcaggcggaggtaggactggccggaaatattcacgggcataatacgttcctttcaatgagatggcggccgaccgacaggccggccgccgggaaattctcaagcaatgcgcagcgcttcaagccgcgcgatgggttgccttacagcgcctcgcgccaggccggcatggacatgcagcgcgggccgccacggccgcgggagagctcggcggacggcatgaccaggcagttgatgccgttcttgtacagcacgtcgttggtgacgttgttgcgctgatagaccaccacggtgccggggcgcacgcacagggtgttggagccgtcgttccactgctcgcgctcggccgcgatgcggtcgccgccgccgcaggggatgagcgtgaccttctcgccgacgtactcggagagcacggactccagatcctcgttgcgctcgcggatcttggtgccgcccttgccgtccggggtgatctcgaagacggtcagcggacccatgatgccgggatgaatggtgaacttgtcgcggtcgatctgcgtgaacacggtatcgaggtgcatgaaggcgcgggacaccgggatgttgaacgccaggatggtgtcgatcgggctcgtctcgtcgttgaagatgttgtgagcgatgtggtcgatggcgtcgggctcggtgcgctgggagatgccgatggccagcacgtgctcgttgatgttcaggatgtcgccgccctcgatgtggaaggtgtcgttgcggctgtaatactcgggggtgcccacgaaatcggggtgattcttgaagatgtaatcgccgtagatggtctcgcggttgcgcgtctggctgtacatgcggttgatggacacgccgttgccgatcatcgcgaacgggtcgcgggtgaagtacaggttcggcatcggggcgcacacgagcttgcagcggtcggacaccatgtccacgagcaggtgcgtgtccttctgcggcagctcctgcaggttgatgccggccatggtcttcataaccatgtccttggtgttcgggtagttgctctcgatatagtcggtgatgatgtcgtggtacatatcagtgcggatgcccgcctcgtagatccactgatcgaggaactggcggcgcagctcgggcttggcgtccagaacctcggccatgagatcctccaggtacacgacctcgacgccctcgtcgcgaaggatcttcgcgaaggcgtcatgctcttcctgggccacgggaaggaacgggatgtcgtcgaacagcagctcttcca

SEQ ID NO: 10650 - DNA, 15883 bp, Unknown
  gut microbiota DNA sequence
gcttcgtcctcgttgaacgtgaaggcaaggtaggcggacagggccactttcagaagctcgatgggcttgatgtcctcacgcttttggtgctcccgttcaagtgcaagcttgacggcgtcaacgggaagggacgcgcgttgtctgactttcgtcattggttggccaatccctcccttctttccgcgtgcgctatggcgcattccacatgataacgtgcttatcatacctgcctcgagcgccgacattgggcaatgaagggtcacgcgctatccgagtttgtaaaagggggaagggatcctacaaagggtgaggcgcgccgttgagttcgaaagctttgtatcgctttacttcctcgcgccctcgttcaatgagctcatcgagcgacaaatgcacaggatcgtcctttcgtggatcgaggaggtagacgatgagttggtcttgtggatcgatagggtgcacgattgccagcataatgccatcctgcctatgaaagatggcctccttgaaatagtaattcgtactcgttctattcgtgaggccgaggatatcttgcgcagcgcttggtgtttggacatcaagaacaccgtcagctgtcgcgatgggcaagaatggtgtgtcgttgctgtagtcaacggagagtcctactatgacgctactgagttctttctgatacaggatctcgcctgttgcgagatcgaacacgatgaaggtgcgtcctgccgcgcaaaccactgatgtagtattctcgtcttcaataaagccgcatatttgtggcgtgtcaaaagggctttccactggttgttcggaccgataacgttcatgtcgcaggtacccgaagcgacccaaggatcttttccgatgaaataggtgtttacctgccaaggagagagaaagccagtgattccgccctctccttcaatttgcgcggaggccacggctaatgcgttctcgtggtactttagggagaagatacccgggaggcatcgcgaggaaagtgctgccacacgagcagattcgtcattgaaagatgcttgtatgacgcgatcgcctagtccgaggtataaatgagagttgtccggagacaggcaggaaggaaaccgttccttagttgcgccggcctctgggatatcttctctgacggtgcgcaatgtctctccgttattgagatcaatttgcttgcagctgaaagatccttcttcgaaccgcgccgtcgtgcaggttgctccgtcttccgcaatggccagcgaattagcaccttcgttgtcgacggaccagttgagggtgcctatccctggatcaaaggagagaaggggatcgtcgagattgcggctccaggcaagaagcgatcccgtctccattgcctcaatgctccaatcctcggcgtcaaaatctgtcgtgtcgtcgagataagagggcaggtcgagtgtcagatagggcgctccagaacgcgctgaggcaatggtgatagttcctgtatcgtcaagcacgcaaattagagaaagcttgttcaagcacacgaattgcagaatattgcccttggcctgtatgttgtagaagggagaccatggcgatgccgagtcgggattcacaagtagcgcgcgctccaaagcagcttgcgcctccggaacgagtggcctgctatggtcggcttctgatgcaggcagggcttcgagtgcagtttggatggcttggatgcggttgccttgctcgaattgaaccgatgaagcggcagcgagagtcttcgattccgcgataagcgctgcctcgctggttcggtgaaattggaaggcgaagacgccgatggcaacgatggcgagagctgcggctgcggaggagagggcaatgcgcttgcgcttgcggattcgctcacgttggcggagatcatcgtagttgcagccggcgacggcggctatgatacgtggcagctcggctttgcgcttggccttagcctccggacgcagatcggcggcgaggggctcggccggcatttctcgcaagattccgttggcatcgggcatcatgcgcgttttcaaaatgggtggaatgctttcctcggagctgcctgcggctagcacgcaaatgatgcgttcgcgtccgtgaagttgctcgaacatctcgatttcccgccgcacccaagggctttcctgtgtttccggcgagcaaatgacaataagcgtccgcgaagccgccaaggcttcccgaatgctgtcgggaagcgaatgcgaagccgcaagctcgtcctcgtcgcggaagcatttgccgagtttggcggagcggcggggtctgcgcggttgctcgctgtgcgcgttgctgttgggtggggcgggttcgatgagtgcatcgtcggtgtgcgaagttatttccgcaggcgcattcgtctgcggaacatgctgcggcaaccgatactcctcaatggctcgctgcacctcacaagccacccccgcatcccgaggcagatgccgatagctaataaaggccgcatagccggaggggatggtatgtatcgaagcgtttcgcatgagggaaattataagggattgcgagaggcttggcttttccgggtacgtctcattgcccaatgaagaagacaaaacgcttgcatcatatggagcagccgggatcgtcagatgtcggtgaaccagttccagacagattactgattggaggaaaaaatggcttacaggagcagcagtcgcggtagctttcgttcagggggattcactaaatccaatggcacgcatgtttcatccgctcgtgcccaccagcatgttgggcaatcgtttggaggctataccaagtctcgcacttcttctggcggttacaagatggtgaagggaaagtaatttactcaagaggcaatttgcagggttgacaagcattaggcagggcgctccactgtgggagcgccctgccctgttgttaagcttaaaacgcgtttcctgtgcgtaggcagagtttcagtctgttcagaccccagctgccgtattttctctcaatgtactcttttgccttggacgaggaaaggggcagcgcttgatgattgccgtggttgtcatcatgcagttcgatccccggtgcaataataacccttgtattgaatccaatctcggttttggggagcacgacctgcatctcaattgcttcgtctgagctgcggtcggagatatatcgggcattctgcttcaccataatgaaccattcgaaagcatggttggagttgtgaataaaattgtctgcaagttctgatcctggaggggagatgaggcctggcgcatacccaattgcatcatctattccagtcaaaatgaacccgtctgaattgaccaatggcaacataaatctctcctttgcgttttgcggattggcattatgggtgctgctgaattccgtaatgataattgagcctaaaagaattgtagtggcggaaatttggcgttattgcgcaatgagcagacgcatggctcatgagataaattattcaacaaaataggattgctgcgtctaggatctttgtgagcagcagtcacatgcatgtgctgagcttcgcgtttatccaacctcggtccaccaagtgtattcgcagccgttatcgctgttcatttggagggagccttcgtagacgtctagatagctgctaactgaaagccatgtacctccgtggtctactgcgttgagcatctctgcaaagtcgtcgtagtgctctgcccagatgaccaaggtgacgcgattgtcgctgggataagctgagcctatgtccacgaaaatgggcattccattcgcgtctttcgcttggtacacgttaacgacgggtccagcaactgtgcatgcttcgccaatatggttgccggcgttgtaccaaagatgcgattgcggaatgcccagacgctcggcaatggcttcaggggttgactcctcgagctgttccatctcatcttcgtaggctttctgctctcgttcaaactcttgctgccgttgcgcccaggactgcacctcgctttgagagctcaaggtttcctgctgtttgggctttgaggagtccgagcttgatgagtggtagcagccgtatagcgagcaggcaacaaaagctgccaggagcccaatgagaagatttttccaagacagtcgtctttgcttgaaggtgctattccacgcgattctcatgtcggtctccctgctgctgtaggcgagttgcagttcagcatgtttgcacttgcaatttttgctgttaaaggatactccctacaatggtttgccgatagcccaatacagggtactgctcgtgccgtggtggctccgtgcgttcttctctggcggacaaagcgaaagccccggaaggggtgattcctcaccgttcgggggcttcgcagctaaagatagtactgctagcgtttggcgtcaattggctcttgcgtttgtggctgcacttacgaagatggcaaagtcaccgcagcggtttttggttccgttgttgctgttcgtgctacctcgtcacttgaagtcacagactgtgatttcaagatccccattctttggccaatttaaaggagaggctttcgaagagcttttcgtgctatagtgtacaacgtacaacattgaaaagcttaggagcaggttatgggcaatgcggaggctatggttacggctcggatgggggttgggaaaaaggaggagggcaatcgggttctggcctctttgggaaccaatgcgtcgaaggcggttaaccagctctacgattacgtgatcgagaggggagcgcttcccttcgacgaccgagtggaagagagacggccgcgcagtcgggctgaggttgaagctgcggtgggcttggtggacagcttggtggctccggtggccgagccctatcggagcatgtcgacgaaagacgcgcggatggctcggctgggcgtttctggcgccgcaggggagggttgccgatgaagctgctgctcgataccaatatcctgctggattgcatgatgggccggcagcccttcgccgccgatgcccgcaaactgctcatctcgggcgcgctcggcgaggtcgatctgtggatgagcccgtcgcagttcaccgacgcgttctacttgctgacggagggaggcaagccgcgccttgcggagtcagtgaagcttcgcttgctgaaagtgaagcggctggcgcgcatctgcacgctgggggagcgcgacgtcgagagcgcgctggagtcgtcgtggcccgacttcgaggacgcctgcctctaccagtgcgccaagaagctgcatgcctgcgccatcatcacgcgcaaccgggccgacttcgagcgctcgaccatccccgtctacgactgcgccgagttcttcgcccacctcaaggacgcccacggcctcgtgtacgaggagatcgattggtaggctattctggtatcatcgaacctgcctctgatttgttcctgatgttgagtaagcgaattcagtttgaaaggcgagaacttcatgcggctataccatgcttcaactcaaacggccagtgagccgaggattgtgaatcgttctccctacttggatttcggaacagggttttacaccacgacaaaccttgctcaagcggaggatttcgctcgcaaggcctttgtgcgccgtggcatggaaggggctccgacgctgaatagctacgaatgcgatatggagcgagccaggcgcgagctacgcgttctcgaattttccgaacctaatgaagagtggctggagttcgtcgtgcacaaccgaaagcaaggtcgcgataaagctctcgaagtggatattatcatcggacccgtggcgaacgatgacgtattcacaacggtaacgctttacgagcaagggcagatcacggctcgtgctgctctggaaatgttaaagatcaaagagcttttcacgcaaatacttttctgcaacgataaggcgttagagaggctgacctttgagtcggcgcggacggtggagaggtgaggacgaatggctaagtctccggagcagttatctgtgctgctcggcacggcgacgcttcccggcttgtttgagcgactgggcttcaccgagccttgccaaatcgaggagttctatgcatcgaacttttatgagctgctgcgcaatcccgatagcgggctgtggcatctcagctcggcggctctggcggatttgtaccggcaggaagtggagcgcggctttttcgacgacccggaggagcagtcatgagcaaggaaatgcggtttctcgtgttcgccatcgagtactatcggcaggcgaaggggctgacgggcccggaggtggcggctctctttcgcgaaaagggactctcgcagtacgtgctggacaattatttcctctaccacatagagtctcccgacttgatggttgccgacattgatcgctatgttgaaacgggggagcggccgactctttagggggtcgttaaggtgcagctagggcattccgatacatttttcggcatcttcaaatcactgattctgacacttttgcgattcttcgtctcgcatttttgtaaagcttcaggggccttgggcgtcaacaccgttacagcgcactcgcgcggtaggcattgatggcggcgagggtgatgtcggcgaagtgttggatggcaccgacttgaacccagcggccgtcctcgcggtagcgcagggagaggttggcatcgcggccgcggcgcaagtgcccgatagagagcgtcacgttgccggggatctcccgcgtgtcgatgtgggtttcaatgctcgggccgcctaaggcccaggcggcgaggccggcgtcggcaaggcttccggtctcttggtagacggcaagcgccgcccacagcccgaagccgtcgtcttcctcagtttgatagacgtgtttctcggtgcgccccggcaggccggcgcacacgatatgggactgcttcgtgaagtggtagcgctggccgttggcgataatgccccaggtgaaaacctcccaccggcccgtgccgtccttcgcttcgaaacttgcgagtgcgtggtctgtcatgatgacctttctaatcatttttgcgcggccatgccagccgctgtggctgagttttcaggcgttccgaacgtttctatcgggggcatcggcggtacacgcgactccgaccattgccttgcggagcgagcttaccctgctcaacgagctcgcttatgatacgcagggccgttctccgggaaattcctgtattagccaggtcggcagttcgcacgccctcagcgctttccgccaatttcagggcaacggcgacagcctcgtcgggctcgtccgctcgagtggtgtgctgcccgagcgggctgtgcaccgtttcggcagcaggaaccgtcggtacgaacgctctgaagatcaggccttcctccaactcggggtcgcggcccgtgtagagacgagaattcttgaacagctcgcgcgtgccgctgccgagttcttcggccagaccgatgtgcacgaagaacgaagcgatgagagggttcttcgggagggggctgaaggtgtcaggctccaagggcccttcgaaagaagcccggctggcgttctcggttcgaatgccctcgttgtcgatgatgacttttgccgggaaggggctggtgaactcgcgatgaatgagacagttgacgaccagctcgcgcacgatggtatcgcgggggctgagggcgaagtcgccttccaaaagaaagcggtctggaagatgattccggcagaacgcggcgatctgggcgtaggcgtctatgaggttggtggttgttacaagccggtcatcgtggcgatccgtgtcgtgctggcgcacaagtgcatcggttttgtaggtggggcacagcgatcgaataacctcgtccttgccgagaagaacgacggctgccaagttatagccctgctttcccgttgagtagtctttgccgaagagcccggccgattcagcgagctgcgcgttcgtcatggctccccacggatggtcttttctcttcgcgagagcgagtcgccgggcctcgtcaatgagatcttctcgcaggtcgctcagggatacatgctcgaaaatgcgttgttcggtatagattccctgcttgcgaatgcagagctcggcgagaggagcgcttccgcgcacaacgacatcggcatccccgcgccgctcgtatactttgcccttgtagctgtgcatctgcgggctgttgggaacgtcgatcttgatgatttggcggtcaccgatctcgatatgctcgaattccatggagacgggcacgtcgaaggcgttggagttgttgacgacattgaggacgtttcttgtgacgggaagcacctgggctggatcgatgcccgtgagagagccgtcgtcctctacgccgagcaggatagtgccgccgaacgtgttggcgaacgcgcagatggtttcgaagagatccttttcaggctggttgccgcaacgcttgaattcgatgcggtcgttctcgccttcttcgataatgtctcgcagttgatgcgcgttcacggtgaccaccccttcggaatcgtgccatggcgcgattatggcgcgattatggcgcgattggcgcgattatggcgcgattggcgcgattatggcgcgattggcgcgattatggcgcgatttctggaacatgctggagcgggtgcgaccgcagctgacctacccgcggtcgaagaacgggcttttggagctgatgctcaccgggatagcgtacacctgccccacgccttcgccgagcaggcccagctgttgggcggctaggccggcggagaacatgatgcgggtgtcgacgccgaaggcctgggcgcgcgacacggcggcgccgagggcgatgcccacgtctacggagttcacctcgcagggaacgcctggcgtgcgctcgccgcaggtggcgaaaccgcagtggccgcagttgagctcctgggcttttttgcgcgtgcccacgagcgccacgcagaggcttttgcgcacacagttggcgtcgcgcaggaagaatgcgaacccgcgctcctcgccgacggcctccatggtgcaagcgagcgcttccaaatcgtcgccgtccaccacggcgcattccacgacatcgacgcccttgcccttgggagccgtccgtgctgctaccatcatcttctgggcgatgtccagcgcctgcgccttccgaatgtccctctcgtcgtaaaccatgccgcctcgctttcgtcgctttcgcgcttgtcgtgcgtttctggttccatcttactacggcaatcgtctcgtatgtccgagcgcatgcaggcgctcgcatagcggctgggtcacaaacggtgggcacttgttgcggagatcgcggggttgggtatcatgctcgcatggcgttattcgaggcagaacatatcggggtgcagtttcgtcgcgacgggcagccgttcgtgccctttgcggatgtgagtttctcgttggaagccggctgcttgtacaacctcacggggccttccggatcgggaaagtccactctgttgaacgcgtgcgcgctcatgttgccgcgctcgggcggcacgctggcgctcgagggtgttcccgttgatcggttcaagccgacggaatggcgccggcgcgtgtgcctggtgcctcaggctgcgtcgctggtgcccggcacggtgcgggacaacctgctgtttccctggacgctgaaggtgaatgccggctcgccgaagcccgatgacgacgtgctgaacgagatgctttccctggcgatgctcgatggcgtgacgctcgatcacgcggcggctcagctctcgggcggccagcttgctcgggtggcgttgctgcgggccttcgccacacgaccgaccgtgctgctgctcgatgaggtggaagcggcgcttgatggggagtcggccgtggccgtcagtcggcttacgcgggcgatgctcgcgggcggggccgcctgcttgcgcatccgccatcgggccgaggatggctacgcgtacggggtgttcacgctggccgatgggaagatgacctaccatcaaaacgagatcacggccgacaacgcacccgctacaagcgcggggaaaggatgcgactcgcgagccgatgaagtgcttgcgaagctgaaggcggtgcccagcgcgccttccgatgtttcccctcttgttggttccgcattcgacccagccgcatcgccaaggagcgactcgccgtctttgcggcccgcgccggccgaccgaaagccggtcgagccctctgcgaaggggggctcccgatgaccggcggcgtggtgaacatcgggtatgtggaactggtgggcgcaagcttgctcatgctggtggcgggcatcgtgtcgtggcgcatggggctcgggcagagccgccgcatcgccgtctctaccgtgcgggcgtttctgcagctgctcgccatgggtctgcttctgggctatcttttcaagtaccagacgtggtggctcgtgtgcctggtgctattgggcatgtgcgttgcggcaacgcagatcgccacgggccgcacgaacaaggtcgtgcgggggctttgggccgacgtttttctttccatcaccgtgtcatccatggtcatcgcattcatcgtggtggaaggcatcatccacgccgatccgtggtacaacgccatgcagctcgtgcccatctcgggcatgattctcggcaacacgctggccgcggcagcggtggccaccgaccgcctgtttgctagcatggattcccgtgcgaacgagatatacatgatggttgctttgggcgccactccgcgtgaggcggcgtttccttccatcaaggcggcggtgggcgccggcatgacgccgcttttggcccagctgtcggcggcgggcatcgtgcagattcccggcatgatgtccggccagattctggcgggtgccgatcctgttatcgcggcgaagtaccagatcgtcgtgctgctcatgatttcggcggccacgacgctctccgttgtgatcatctgctttctcgcctacaagaagcgcttctccgtcgaaggctactacttgtcgccggccctgcgcgatgatgccggcggggcggcctagcctggcggcgcggcctcacgggcgagaccaactagcctggcagcggacgtgaccttccgggcgagaccgcctagctggcaagcctacggtatgccaacgggttggtgcgaggcggtcgggcggcgggaacgttcccgtaccatggaggcgacgtttgccccgaccggttaggaggcacccatgctcgaaggcgacaaaatcaaggtggcgcagggggagaatccctgctacctgctgttgaaccaggcgaatcgccacgggcttatcgcgggcgcctcgggcacgggcaagacggtcaccatgaaggtgctggccgaagggttcgcccaggccggcgtgcctgtgttcatggctgacgtgaagggcgacgtcactggcatggcccaacccggcgacgacaccgagaaggtgcgcgagcgcgcggcctctctgggcgccgcaggctgggagcctcggggttgcgacgtgcgcctgtgggatatgctcggcggcgacggcgtgcccgtgcgcatcaccatttccgacatggggcccgacttgctggcgcggcttctggggctcaccgacgtgcagcgcggcgtgctggccatcgccttccgcatggccgacgataacggcatgctgctcatcgatctgaaggatctgcgcgccatgctcggctatctctccgagcatgccagcgaggtggaaacgctttacggccgcgtgtcgtcacagtcggttggcgccattcaacgcgcgctgctcaccctggaagatgcgggcggcgacatcttcttcggcgaaccggcgctggatatcactgattggctcgtgaccgacgatgcgggccagggtaccgtgaacattctgaacgctgcgaaactcatggcatcgccccaggtgtacgccatgtttctgctgtggatgctcagcgaaatctacgagcttctgcctgaggccggcgatcttcccaagcccaaactcgtgttcttcttcgacgaggcgcatctgttgttcgacgacatgcctaaagagctgaccgacaaaatcgtgcagaccgtgaagctcatccgttccaagggcgtcggcgtctacttcgtcagccagtcgcccgccgacattcccgacgaagtgctcgcgcagctttccaaccgcatccagcacgggctgcgcgcctacacgcccgccgagcagaaggcggtgcgcgcggcagcggcggccttccgcgagaatccggccttcgattccgccgaggcattgctggagttgggcaccggcgaggcgctcgtgtcgctgttgaatgaggatggccagccgagcattgtggaacgggcgcgcgtgctgccgccggagtgccgcatggccgctgccgatgcggcgacgctggaggcgatcggcgtggcccaggcgcatctggtggagaagtacggcgaggccatcgatcgcgagagtgcctacgagaagcttgccgccgagaagagcgccgctgccgaggccgacgcgctggctgccgagcgcgcccagctggaaaaggagcgcgccgaattcgagaagcagaaggccgccgaagccgaccgggccgcaaaagctgcggccaaggaggaagagcgtgctgccaaggctgccgaaagagaggctgagcgtgcccaaaaagcggccgagaaagaagccgaacgcgccgctcgagctgccgagaaacagcgcgagcaggccatgaaaacagtcagctccgtcatcggccagatcgggcgcgagacgagccggcaacttttgcgggggttgtttgggaacttgcggaagtaggttctcgctgccgtacaatactgcccatgatattgaatggccgcaacatagatgggctgcgggcgtcccggatcgcgacgctgacgcggcgacgcttcgtggccggtgtggcgtgcgcagtggcgtgtgcggcggcggggctgctcgtcggttgcgggtcggcctctaagtcggccgaggtggccgccatcgagccctacgtgagtccctacgactggtccggcctcgtgcgcgacggcgagaagctgtcgtactacgaaaacgatgcgctctgttcgcgctggggcatcgatgtgtcggagcaccagggcaacgacatcgattgggccgccgttgccgacgccggcgtgcagttcgctttcgcccgcatcggcaaccggggcgccacggaaggtgcgctttccgccgacgagttcttcttccagaacgccattcgcgccggggaggtgggcatccaggtgagcgcctatttcttctctcaggcgctgaccgaagacgaggctcgcgaggaggcccggttcgctctggacaacctgcgcgaaaccgaggctgcgggcgccacgttcgtctacgtcgcctacgaccacgagcccgtggaaatcgaaggcgcccgggccaacaatctctccagcgagcagctgaccgccaacgcccgcgcgttctgcgaggtcatcgccgcggccggctacgcgcccatgctctacggaaaccagcgcgacttgctgcgtctcgcgcccgagctgcgcgccgcctatccggtgtggctggccgagtacgacgtggaagtacccaccgctccgctcgacttctccatttggcagtacaccaacgccggcacggttcccggcatccccaccgacgtcgatttgaatgtgtggcttgagccacagaagtaaaggagtcctcgtgaacatcaacaacgccattctgcatgtgttcgatttcgtgtcctgcgtgaatgtgttcgcgcaggcgcccatggacctcggaaacaaggccgccaagcgctacgtcacgtcccaggccaagcgtgcgctgggcaacctggacagcaagcgcggcaccttcgcagagaacagcctgttcgccgaggagttgcgcgcctatttccgcggcgagcgcgatttcgtggggctgtcccagcagatcggcgagttcatcgtcggcgagctgtcgcgcatggagaagacgccctcgaccgacctgctcgtcgtcgatttcgaaggcgacgccgatcagatggcgcgcgagatgaccgacgaggaggccgaggccgcctacaaggcccgcggcccgcgctatttcgcgatcatcctgctagagagccgacaggcctatatgcacgaggtgggcagcaacgacttcggtgacaccgccaccaccatcgcgcggcaccacgccattctgccgaacccgtctcagaaggtggcgtcgttcgcgctcatctccgccgacgacatggccgtgtggttcgtggacaaggagcgcgaaatcgccggtgagaagcgctggatcatccccgacggccttctgcagtgctccatggaggcctcgagtcgcgaagtgctggaagcggtgaccaccgtggtggaagaggtcgccgaggagttcggcgccaacacggcggtggcgctttcgcgagcgaaggcctacgtggccgtaaacgccgaggagtccgacgaggtggacgcccgcgagctgggccgcgaggtgttcgccgaccagccccgcgtcgccgagcgcttcgatcgcgccgtggaagagggcgccctgcccgagcgcgtcgtggtggagaaggccgtggccaagcgggtcaccaagagccacaagattcgcaccgacacgggcatcgagctcaccttcccggccgagtacggcgagaactccgatttcatcgagttcttcagcactcccgacggtcgcatcgagatcgccctgaagaacatcggcgcgattgagaaccgctaggacgtctatcggaaaaaccgagggccgtgcgcctgcaagaggactagaatggggaacgattcagcgaacgccccttgccggcccgcgcggtcggccgatttcgaagggaaccttatgacgaacctctacgaacgcgaagacgcctacatcccccgcgtggccgccatccacgacttgtgcggctacggcaagtgctcgctcggtgtggccatcccggtgctgtccgccgctggctgcgacgtgtgccccgtgcccacgggcctgttctccagccacaccgccttccccggctggtacatgcacgataccaccgatatcctgggcgattatctggctgcctgggcaggtattggcgtggaattggacgcggtgtattccgggttcctcggtgcccccgaacaggtcgatatcatcaagcaggtgtgggagacctacccgaaggccctgcgcgtagtggatccggtcatggccgatcacggcaaggtgtaccccacctacacgccagagctcgtggaagccatggggacgctggccaacggcgccgacatcctcacgcccaacctcaccgaggcggccatcatcttgggccgcgagtggcagggtaccgacgtggacgagcccacggtgcgcgagatgatcctggagctgcgcgagcgcggcgcgaagaacgtggtgctgaagggcatcgaacacggcgacggcctcatccacaactacgtgtggggcgacgccatcgacttcacggaaaccaccaatgccaagctgccctatatgctgcacggcacgggcgacgtgttcgcgagcaccctgctcgctgcggtgatggccggacgcgacttggccgaggcgacggccttcgccgccgacttcacggccgacgccatgctcatctccgccaagcagcccaacttcgaagaccgcggcgtctccttcgagcctctgctcgggaaggtgacggccctgctggggtaagcttggactctgctttccatggaagacctgtagcgagaggtgcgattttcaagatccgcacccccaagccccgcaaacaaaagcgacccgcatattggcggg

SEQ ID NO: 10651 - DNA, 1174 bp, Unknown
  gut microbiota DNA sequence
ggtcgcgtcctcgatggagtcgtcgaaggcgtcagggtacagcaagcgcggcagccactgcaggcccatgagctggttcaccgtcggcgggttgttcagccagcagtagggcacgttgggcacctggtagtagttgccggagtcgatggcggcaatgccggcccacgccgggtcatcgcccacggtgtcgtaaatgctgcccgtctggaacacgatgaggtcgggattccacagtgcgatttgctcgaggctgatctcgttgccgttgcctttgccggacacgtcgtcgaccacgacgacgttgtcagccaccatgtccaccacggccgcctggaacgaagtcttggcgatggcgttcaggccattgtcgcccagcaggtaggccatgcgcacgcgctcgttctcggggatgttctccatggtggtgaccgtcttgttgtagacgtcggtgcagtaggtagatagctcgcttccgcgctcttccatgcccagaagctcgcccaggcgctcataggccgcgccgtaatcggacagcttcgcctcgatgaagatgaccggaatgcccagctgctcctgaagcgcgtccaagtcctccttggcgcccttcttcgcctcgccggtgtcgatgatgacctggggcgcggcggcggccacggcctcgcggttcaaatcgtccttggcgccgagcaccgcgccgaacaccgggtagtcggcgaatttctcaccgaagatcttcagctggtcgacgttgagctcctgggccaggcccaccattttgtcgggggccatggtgagcagcacctgctgggcggtgaagcccgacgggcagatcttatcgatctgagccggcaactccacggtgcggcccaggtcgtcggtgaaggtgatagtgccgctttcggcctcggcagcggcctcggcgtcggtgttcgcctcctgctcggaggccggcgcggcggcctcaccggtgccgtcgccctcgttgccggcacagcctgccaacccgaaggccaagcaggcggacagggcgagcgccccggtcagagccgcgatgcggcgtttgttcctcgtaggtttcaacatgcagttttcctttcctcccaagtcaggaacgttctatctcgcgaacgggcacgcagacgcgcaccttgtcgccataaagggaattgacctc

SEQ ID NO: 10652 - DNA, 1042 bp, Unknown
  gut microbiota DNA sequence
acacgcccacttatacgggtggtgttgcagccacggtcaacggggtggagattcccgaggacaaggttacccaggctatccaggacattcgcgcccagatgagccttaccgatgaggacgcatggggcaagtggcttgccgagaacgactacacgcccgagtcggtgcgcgaggagatcgtgaactcttatgtcgatcaggagctcgtgaagcagggcgccgattccgagggaatcacggcggattccgcccaggtcgatcagtacgtggaaaccatgcgtggccactatgactccgataccgcttgggcagaggcgctggaggccgtgggcatgaccgaggacgagtaccgtgacaatatctcgctgtcgctggtgtctcagcagctgcagcagaaggtgggcgagggcgctgctgagccgaccgacgaggaagtgcttgagagcgccaagacttacgtgagctcttacgacggcgcgaagaagtcttcccacatcttgttcgaggcctccgatgaggctcaggcccaggaagtgctcgacaagattaacgcgggcgagcttgatttcgcgacggcggccgagtcctattccaaggacaccgcttccgctgccgagggcggcaatgtgggttgggatcgtctttcgaacctggtgaccgagtacaccacggcgctcgccgacctgaacaagggcgacgtgagcgggctggtgaccagcacctatggcattcacatcattcagtgcaccgatgtgttcgaggcccccgaggagctgacgagcctcgatcagctgccgaccgagttccaggactccatccgcgccatgctgcagtcttccaaccagtccaacgcgtactactcgtggctggaggagcagcgcaacgccgccgacattcagatcaacgacatgcccgaggggctgccctactgggtcgatatggcgaactatcccaagaaggaaagctccgaggacagcacgggcgtgacggcggttgacgctgatggcaaccccatcgttcttgatgagggcgctgtcgaagg

SEQ ID NO: 10653 - DNA, 4307 bp, Unknown
  gut microbiota DNA sequence
gaaagcaggcgcttgcgcaggcgcacggactgcggagtgacctccaccagctcgtcgtcctcgatgtattccagagcctcttccaaggtgaaggtgatgggcggcgtcagctgaatggccttgtcggccgaactggaacgctggttgcccaggttcttcgtcttctcgacgttcaccaccatgtcgccttccttggcggactcgcccacgatcatgccctcgtaacagtcgtcgcccggcgccacgaacaaacgcccgcgctcctgcaacgtgtccagtgcgtaggccacggccttgccggtggacatagcgatcatgccgccgttcttgcgcccggccatctcgccagtgtaggggccgtactccttgaagtggtggaacagcatggcctcgccgtgggtggcgttcaggatgcgcgtcttcaggcccatggtgccgcgcgaggggatggagaaggagaggtgcgtcatggtctcgtcggaggccatgtgctccatgatgccgccggcggtgcccatgacctcgatggccttgcccgcgtactcgttgggcacgtccaccgtggcctcctcgatgggctcgagcttcgtgccgtcctcagcggtcttgtacaccacgcgggggcggcccacctggaactcgaagccctcgcggcgcatggtctccatgagcacggacaggtgcagcacgccgcggccggccacctcgatgccagatttgtcctccagctcgttgatgcgcatggagatgttgctctccttctcgcgcatgaggcgttccttcagctggcggccaccgacgatttcgccctcgcgacccaccaaggggctcgtggacgcctcgaagacgacggccatggtgggctcctccacggcgatgggggccatctcggtgacggggctttccgggtcggtgatgatgtcgccgatgtcggcatcctcgatgccgatgacggccacgatatcgccagcatcagctgcggtgacctcggccttgcccaggttctcgaaggtgtacaccttgcgaatctgcgcgcggcgctcggctccgtcgggcttcacgacgagaacctgctccttctcgtgcagcgtgccggaggacaagcggcccacgccgatacggccttcgtaactggagtggtccacggtgcagatctgcagagccaccgggccgtcgatgtccacatcgggggcgggaatctcatccagaatggtgtcgagcagcggcaccatgtccatgttgccgtcgtcgggatcgaggcgcgcatagccgttcacagccgaggcgtacaccacggggaagtcgagctgctcgtcgctggcgcccagttccaccatgaggtcgaacaccttgtccacggcaccctcgggatcggcgttggggcggtcgatcttattcacgaccaccacaatgcgcaggccgcactcgagcgcatgggaaagcacgaagcgggtctggggcttagggccctcgtaggcgtccacgatgagcagggcgccgtcggccatgttgagcacgcgctcaacctcgccgccgaagtcagcatggcccggcgtgtcgatgacgttgaccttcacgcccttgtaggtgatggagatgttcttggaaaggatggtgatgccgcgctcgcgctcctgatcgttggagtcgaggacgcgctcttccacctgctggttctcgcggaaaacgtgggaggcccacagaagacggtctacgagggtcgtcttgccgtggtcgacgtgggcgatgatagcgacgttgcggatgttctcttgcttcatgaatcttctttcggttcgtttttgggcgcagaaattatagcgctttgcggggatgatggcggcgtgcggccgcagacggcaccgggacgacaaacgggcgcggcagaaggggtacgatgcgcacggccagacgaggcggcgggagcaactactcctcgaggagcgcctcgtactccttgcgttcctcggtgagcttcgccaagtgctcattcaacgtgttgagattgcgctgggcaccgagaaactggatgatgccccacacggtggcggtgccggcgacggcggcgatcatgccgaggatgccgaaaggccgccggatggtgagcagcgtggccaccgcgccaatggccgccatggccaggccgttgcgacgctcatcggagacggtgtcgcgctgggccaccagctgggcacgggcggcggcgatgccagcgaggcgcgccttgatctcggcctcggtgaggtattccacttccacgccatcttcgacctcggtccaggcacgcgcggcgccggatgaggaggatgcgccggacgagctgccggagcgcgcgccgcggccgccacgaccgccgctggcgcccgaagacagcaggtcgtaagcctcctgcaggcgtttgaactgctcagtggcgcggctttgcagcttctcattgcccgcgaacttgtccgggtgcagaatctgcaccgtttcgcggtaggcaattttgatgtcatcggctgtggcgtcgtcttccagaccgagtatatgcagggcttcagttctgttcatgggcaaagcctaacatgattttacggcccatgccagcagaaccgtggtgatcaccaaaggtacgagatcggccgcgttgcccgtgagataggtagaaggcagcacgccgcctgtcagcagaagagggccccagaacagcagatcgaaaagaccgtgagcgattacgggtgccaccagggaaagcgcccactgcgggagaggacgcgagccgtaggggctacgaacgatgagcagcgccatgacagccccgaacaacgtcgcctgcgtcaccttgaaaacgccctggatcgcagcaacaccaatgtcggctcctggcgccatcagcgatccttcagggaacaggtgggccaatccgaatatgagggaactcgtcattaccgcgaaaccgacgggatcaacgacagcgcgtaagccggcgagccgatgggcgcgcaatgctcttcttgggtatgcttcattccggcgacgcgcccaagacaggcatgcccacaacaacacgccgcggaaaagcacctcttccaccgccgccgcctcccaagcctcggcaagcaacgcaccacagcgcgtcagctgcactgcttgcgaacctccgtcggcccaccactgaccgaggccgcccacgacgccggcgagcagcaccaagacgagcgcaggcccaaagccccgcggtatgattttggtatttcccatggcgcatcattataataggtgcgcctctttgactgcgccggcacctttcagccggcctcgcgaaaggatccccatgaagcctatgccctccgttaccgcctttgcgttgaaggtggcagctatcgtgggcatgacgtgcaaccatattgccaacgtgttcggcagcgagctgccagggggcgccatggtcgctttgtattccctgggcggcctcaccttccccattatggcgtatctgctgtgcgaagggtaccaacacacctccagcgtgcgacgctatgcagagcgactcgccgtgttcgcagttgtctcgcaaattccctattcgctgctgttcggagcgacgggcaacgtgcttattactctgcttatcggactcggaatgctatggcttgtcgaccgccagcggcagaatcttgtcctatgcgcgctgggcctccttggagggctggccgtcagttccttttgcgactggggcattatcgggccgcttatgattctgcttttctggcattttcacgatcggccacgcggggtagcgctcgcgatgctcgtaccttttttgggcctaggactgccggctctttcatgggcgatcagcgatcctgtaccgctgagcctgggcgtgctcggctattacaccgttgggttcgggttggcaacaacgctcatgctgaactacaacggccagcaaggccgaccgttgaaatggttcttctatgggtactaccctgggcatcttctagcactgtgggcgctggcgcaagcgcttgccctctagctgaaacgccaaaccctgggggtgcggccgcccttcagaagcgttcccgttaaagcaaggctaaagcgcttgatgcccggcatttggaacggcgacggcatcagcctcgacagcactattgctcagcacctggctttcgaatatggccagctgctgcgccatcacgaggcgccggcgcacggcgacaacgccccacagtgccgttccaatagcccccagacccgcgacccaaggagccggatcaaccggagcatcgaaagcccccatgggaacgtcctcttcg

SEQ ID NO: 10654 - DNA, 2859 bp, Unknown
  gut microbiota DNA sequence
gacccgagcgaccatcggtgttgcgtcatcgtcgatggaaaccgtctcggctgcaggctgctcggcgggagccgttgcagcaagcacgaccttcgcagtgccggcctggggcgcgggctcggacacggtcgtgcgctcgcccgcgttgaacccgccgccgttggcaccagcagcgttatcgttgttctgggcattgctctgcgactgctgaggtgtggacggcgcgggaaccttgatgcttggtaccttcggggtttcgttatcggaaggtgcctgcggcttcacgccaccgttgttgtcgaccgacccgttaccattatcatcgggaacgacgggcttgtcggtaggatcgttatctccagggttttcgggcttgaccggctcttcggctttcttttcgtagaccaaggtcatgccggaaacggaggatcgcgcgagaggttcagccgctaccgtaacggactcgccgccgttcttctctgtagttagatctttcgaatattcgtagccttcgatgtcgatgatttggtcgtccgcagttatctccgacccaacggcagccaaaatggtgcgcgtgtcggtcttgttgccctgatcatctacatcgcccacagcaagtgcattgccctcggcgtcaatgtagcggacatcgaaattcaccagctgatcgcacagttctccgtcgaggtgccacgtatgccctgccgctgcataatcagtcgctccggagcacaccttgagggaggtccacttcgcagcactcaggctcagtgcttgggcaccagggtaatagttgatcgaccgcaaagccgtgtctatctgactttgcatagcttcaagctcaggttggtcaacctcgtaattcaagggcttttcactcggtttcgcaataccttccaatgcaatgacgcctaccgtgaaccagccctcccggttgacctccaacccggccgccttcgccgtatccagagccggcccacttaaatgcaggtacacgaagacgttcgatcccgcctcgggctcctcgggtgcaggcaaaacaaggtgctcagtagccgcatcgacgccgtcggcctcttctgccagggcagtgccgggaagcaccgtcagattcaaaaatgtcagagcgagcaatgcggccaagccggcagccaaaacccgcatcgccaaacccattcctttattggtaaaccgcgtgatgtctcccacgatcatcacccgcttccttcccatttcaacatctcgctaaagatgatccaagtttaccaaatattgacagaattatcagctcgtcaaccgcattattcggcctgggagatgccaaactcacgcatcagctcatcccggtagctctcatccacagctgcacgtcgagcgtcgtcgagccgttcggcgcccaaaagcaacgccatcagcgaagcaacctcgctagccgcttccgcgcggccctctgccaggccctgttctcggccctcggccaggccatgctcccggccctcggccaggccatgctcccggccctcggccaggccctgttctcggccctcggccaggccctgttctcggccctcggccaggccatgctcccggccctccgccaggccctgctcaagtccctcggccaggccctgttcaagccccatctggaggccgattatctgaccgcgctcttgcccctttttctcagcaatgcgcctttgaatttccatgtcttcctcaaacgtcagcaacgccatcttctccttccgccaattctcgtttttgttggcctttttcaccgcaacggcaagctggcccgtaagcggatcttccccggcttcccccgtccaaacatagtgtagcaggttctgcaagcgcccctcggggagcttgtcccaagcaggagcggatagggctttccaaagaaagccatgaccgatgcgcgcactgggtttctccaagcagttcacatcgagcgtatacacgggaagtccttcatcaaacggatcgtgcatgcagatgaaaataatgatacaagggggcagctcttcgtaaccttcccccttccgcagagtcagcgtatccaacgctccctggtagtaccgcattctccgtccgagatcttctcgtttggttgtctgcatctcgatatcatagatctcgtttttcgtcttcacgaaggcatcgaggcggacgccgtgattggtgagtgtcgggcgaacgtcatcttcagtgacgatgtactctatatccgctatcgactcgtctaggataatttcaatcacttcgcggcacagctctttatccgtcatcaaaagatcgaacataggccagtcgctgaactcgagcatgccgtctttcatgggaacctccttgtttcatcgatggaggatccaccctactcgatcgcgaccgcagaaatgacgcgggaatgtcccgatccgttccccgcgccgaccgcgacggagtcgcaaaacgcccggaagacgccccggaaccgcacgtaagccgcagtcatacgagagagggggccgggtgcctcgtgctagccgcgagcgactcccttgggcctacgtccgaaacgaccccgacgatatcctcaaggcctcgacgtttctccatgatacaactttccaactcctccacgctgggaagctcaaactggtaacgagatgcaaacatctgccgaccatcggcgagagtcgagtacttcgcgatggcttcgtttttctccgaacacagaataaggccgatcgtgggattgtcgtctgggcgccgcataagatcatcgaacatgcgaatatagctgtccatttgaccaacatccccatgggtgagctttcccaccttcaggtcgatgagcacgtagcactttaagac

SEQ ID NO: 10655 - DNA, 993 bp, Unknown
  gut microbiota DNA sequence
gatagtccttgagatcaatgaactcgaggacataggggtctttgatgaactgctcgggtttcgttgccgcaagcctgttggccgcctcggcaacgaccgattccttttctgagctcgccaaaagccgctcgtagtacaaagttgagatttgacgctcgagctgacggcttgaccaatggttcctcagagcttcctcgatgtaccattcacgagcctcggaattttcaacgcgaaggagggctcggtaatgcgtccacgtcaaatgcgaacgcaatgcgttcgcatttggaaacaggtcgtagaacctcttcatttgctgaaggttgcgcacgctatagccctttccaaactcagcggtaagccgttccgacacgcccttcagcactcccttcccgtaagcgccgcgcttctgcccctcttgctcatcctcgacaatcgcacgcccgatctgccagtaggcaagcaccatggcggagttgacggccgcatgggcacgggcgcgcgaatccaggagaatcgaccgaatagagtcgtagagatcgcggcccgcagcaaacgcgctcaacttttcttctttgcccatagaatcctccctcgccgctataagtaagcgggatccgtcatcccctccggaattgcaggccgcccttcttccggctaccctagcagagcacgaccgcggaaatgacgcgggaatgtcccgatccgttccccgcgccgaccgcgacggagtcgcaaaaacgtctggaaagcgccccaaaaccgcacttgggccgcagcctcacgagagacaagatcctagtccgtcgaagcaccgaccccctcaggtcgttagctatgtcttgccagcgggtcgcccctacgccgccaggagggcggccaggtcctcgcgggacgagaacgggcgcggctcggcccccgggtcgtgggcggcgacgacctcgccctcccagtcgtcgccgttgcggtcgaacttgcgggatcgcatcaccc

SEQ ID NO: 10656 - DNA, 362 bp, Unknown
  gut microbiota DNA sequence
ggctcggactgggggcacagcgtcgccaggatggcgcggatggagtgcttgcggttctcggcctcgtcccagcagaggctccgggcctcatcgtccatgacctcgtccaccacttcctcgccgcgggtggcgggcaggcagtgcatgaacttggaatcggggccggcggcgttcatcaggtcccaggtcacctggtacttcgggtagaacacgtccatgtagttctcgccggagacctcctcgtcgtagaggccgtaccacacgtcggtgtagacgaagtcggcgccctcgatgcaggagatgtcgtcggagatggtgacggtgccgccggagaccttgcagttctcctcgccgatggccat

SEQ ID NO: 10657 - DNA, 437 bp, Unknown
  gut microbiota DNA sequence
cgctcgacgaactgcgccagctgctcgtcagtgaactcgctcatatcgatggcccgcacatccacaacgcgcttggcgaaatccggcagcttgtcgttcatagccgtgatcttcaccacatcgcccgtgtgcggcgcctcaacatagtagccgtcgcccagatacatcgccacatggtgcacgtccccgccgtcggcgaagagcagcaagtctcccggaagcagctcctcgaagggcacctccacgcccacctcacactggtagtaggtggtgcggggcagctcgatgttgaacacctcgcggtagcagtactgcgccaaacccgagcagtcgaagccggcagaggtcgtgccgccccacaggtacggcacgccgaggaacgagctcgcgcaggcagtgaggtcgttcaaagtgcgggcctcgcgcaccggcagcgg

SEQ ID NO: 10658 - DNA, 141250 bp, Unknown
  gut microbiota DNA sequence
tggatctgctgtgctcggtggagccgcggctttagctggcctagcaggttgcagtccggcgccgaaggatacgtcgatggccgagaccggctcggcaactgaggaggactggctcggtgaagcgccagcgctgaccgaggccgactgcgacaacgtggtggatgccgatgtggtggttatcggttctgcggtggccggctcgctttccgcgttcggcgctttggagaacggtgcgaaggtggttatgctcgagcgcaacaagatattccactacggtggcaaccagggttccttcttgaactctgagttccagaagcagtccggcaagcccacctacgatccaaaggagattgtctaccacatcgtgggcaataccgccaaccgttgcgacattcgccaatggcgcgtatgggccgaccgatccggcgagctcgtggacacgctcatcgagaaggtgctcacgccggcgggcattcccttcacgtgctctccggctcccgatgagccggagctgtggctgaatcgggtgttcgatatcaatgtggtgctaggcgatcctacgaaggacaattacaaggaattcctctcaggcatgcacgcctatctggccgacaacggcgccgacattcgctacaacaccaaggccgaggtgctcgtgcaggacgaggccgggcgcgtaactggcgtcatcgccacagccgaggacggctcccgcacgttgttcaaggcggctaagggcgtcatcgtgtgcacgggtagttatgccggcaacgctgccatggtgaagaaattccagcaggaaaaggtggcgaagctgctggaagaaggcaatgtgtacaccatgtacatggataccgaagacctctctagcgcagagcccatggacgacgggatcggccaccgcatgatgtgctgggccggcgccgagatggagggaggcccccacggcttcctcggttggccgaacggcggtcatatcggctgcccgaatttggaagttgaccaggcagggcgccgctatatgaacgaggctctgttcccggtgaaccaggtgcagcaggtggtgtctgcagcttcgatgcccagcggtgccttcacttgggagatttcctccaccgaggatcggctcatgccctgcttcatcggcatcgatcctaacgtgctggacgctatcgccaaaagcggaaccggcgtgtaccaggccgataccttagaggagctggccgagctcatcgacgtggatccggctacctttacagccacgattgagcggtacaacgagatgtgcgagaagggtgttgacgaggacttcatgaagagctccgagtacctcatccccgtgaagaacccgccgttctatgccttcaacgagaagtgggtgttcgtgtgctccatcgccggtgtgcacaccaacgacaagttccaggtgttgaatgccgaccatgaagtgatcccgggcctgttcgccgcgggcaacaccgtgggacgtcgcttcggctatgcctacgagagctcgggcatgggtatgtcgaactcccaggccatggtcgccggctacgtcgcgggcgaaacggctgcgacggcctagtcgcgcgaagcagatttggccctcccctagcgaagccccggcagcctatggtgtcggggcttcgcgctgattttaaaggaagatagaaaatgcgaggcgacgctttgtgctacgcatggataagattaactgtgtacactggtaaccgcgtgacgtgaaactcgatgttctctgttgagagaggtggactatgggctctctggaaagcaagattgctatcgtgcgtgccatgaatgagctcatggcagagcagtctctagaggagatacgcacggttgatatttgcgccaaggccggcgtgtcccgtcagacgttctaccggaacttcgcagacaaatacgacgctgccatctggttcatggaggagggggcctggcactccgttcgacagattggagtgacctgtggttggaagacgggccatcgccgtctattcgcctttgtggccaacaatcggggctttatagagcgattctttcaaatgcggggctcgtcggcaatcggcaagaccgttatggagcgcacgatcgagcagaacttcattatccactaccgagagcagtacgaggccgctacgggtcgcactcctgacgagaagatagcctttcagatcacggcgttcgcgaaaatgagcatcgagtgcatcaaggagtggcagtcgtctagcgacccggaccaatccgaggagtacatcgacatcttcttgtccgccgtgcctcgcggcctatatgacgcgcttgatatagcggatagccctcaggatgcgcccgagttcgccttccctctcgcaacgctcgttgcgggatattaagcatcctcaaattcgcatcaacgctgttctggatgcagattgaaacaattgaacagttctgttccaaacttggagcagaactcgaagactgctgtctttttgtcacatcctccgctctcaataatatgcctagggaatctggcatttacacggggcgctctttgtcggagtgcgccatgtgccagttgtagggcatcacttgagacaggaggaaaccatggaattcaatgatgatgccgtaaaaatgcaggacgatgtgggaaagccctggcgttatgaggaggacggctgcacggttacccgtacctgcgtctggtccgctccgggctgccatcctgtgggatgcggtttgaaggtctacgtcaaggacggcgaagtggtgaagatcgagggtgacgagaaccacccggttaccaagggtcgtctgtgcgtgcgctgccttgcaatgaaggacttcctgtaccatcccgatcgcatcatctatccgatgaagcgcgaccgtgccgatcgcggtaaggacaagtgggagcgctgcagctgggacgaggccatcgccatcatcaagaagaactacgatgaggtcaaggagaagtacggtgttcagtccatggtggctttcatgggtacgggtcgccagggcaacatcggcgctacgggtgctcatcgagttctcggcacgccgaatggctgttatccgctgagtggcttctcttgctacggcccgcgcgtgtccatcaccatggacgtcatcggctcctcctatcctgagatagactacgccggcggtctgccgggcagctacgaggatccagcctacacaatccccgagattatcatccagtggggtaaggaacccatctactcaagccccgacggattcttcggtcacgccatcatcgatctgatgaagcgtggcgcgaaactcatcaacgttaatccccgcatcacgtggactggttcccgtgccattgagaacgtgtgtctgcgccccggcaccgacgcggctttggctatggctatgctcaacgtcatcatcgaggagaagctctacgacgctgagttcgtcgatttgtggtgctatggcttcgaacagctcgccgagcgtgtcaaggagatgccgccttcgaaggccgccgagatttgcgaggttccggaagagcagatcattcgcgtcgcccgattgtatgccaatgccaagcccgcttccatcgcctggggtgtgtccatcgaccagagtcccaacggctcccaggccggccaggccatccttgcccttatgtccattacgggcaacatggacgtgcccggcggccaggtgctcgtcgacatgactgccggtgacggcggcatgcaggaggatatcgattctgtcggttggccggagatgaagcaagagctgcgcgacactatcatcggccgcgaagaattccccttctacaccggtggactcaagatgtcccaagccgatcgccagcttgatgctttggagaccggcaagccctacagcatccatctgacgtggcttggcgagaccaaccttatcgcccctacctgttccgcccagccgaagcgctggtatgatgccctgcgcaaggtggacttcaacttcgccaccgacacgtggatgaccccgactatccagggctgttgcgacgtggtgctgccgctggcttcttcgcttgagatggagaccatcgttccgactcactacggcggatctccgaactacgtcggcgctttgaacaagtgtatcaagtgcggcgaggctgtgcccgagtgggaactctaccgcattttaggcttggctctgaatcccgaggcgtgggaggatcgcgagaaggatttcaaggagttctacgacatcgccatgatgcgtgcctacgagttcgactacgacgagctgcaagagaaggttgtcatccagcgcgacgtgtcctatcgcaagtacgagaccggcaagctgcgtcccgatggcgccaagggcttcaacacgtctacgggccgcattcagctgtacagcccgatgttcgaagccgtgggcgagaatccgctgccatattattttgaggctcccacaacgccaatttccacgccagaattggccaaggagtatccgtttaccatgatgagcggtgctcgcgagatcggctacttccattccgagggacgacagatcgagaaactgcgcgatctgtgccccgatccgctcgtcgagctgaatccgaaggatgccgagacctacggcatcaaggccggcgactgggtgcgcatcgagaacccgtggggcctggcgttcctgaaggccaaggtgacccccatcatcaaggagggctacatccaggcccagcacggctggtggttcccggaagaagatgcggaggcgccgcatctctacggcgtgtggaagtccaacatcaacacgctcattccccactcccgtatgggcaagcttggctttggcgctccgttccgcactacgctcgtcaagatttccaaggcacacgaggacgaccttatcgaggccgatcgtttcggactcgagggggaggacggcaagccgctggtgcataccgataacttcttccgcatcgatgatcccacgttggatccgacggcccgctagaaaggatgaggaacatgagcgagtacggtcttctcattgactacgagtactgcacgaattgccattcttgcgaagtggcttgcgaggaaacccacgacttcccgcctgaggcccgcggcatccgcgttttcgaagacggacctttcgagtatgccgatggcaagtggaactggaactacattcccgtgccctccgatcgctgcgacttgtgcgcccgtcgcgtgatgaatcatcagcagcctgcttgcgtgcatcactgcctcgcgcaggtcatgcagtttgggcgcatcgatgacctggttgaggagttcaagaagaagcctcgccaggtgctttggatgccgaactagtttgaaggagggacgcgatatgtgcggatacgcttgcgtgggatgcggtcgatgcggcaagaaacccgatcggcctatgcccccctttccttgtccgatatgtggcgcccctttgaacccgggatcaatgagctgttcccgctgcggtgcttcgctgcgcccgggagcatctctcaaaaagaactcgtgcagcaccgcggtgaggggctgatggtgcttggatgcgcgagtgtgagccgtcacaccttgagggtgattcgagaaaacactccctctgactgttcactgtccaggctcgatgcgccatcttttaggagacgtgccagcgcgtggtggcatcgagcgttggattgtattgttgattagacaggagaaagttatgtgcttcagaccctcagacgtttcaactctgccgacaaaatgtccgaagtgcggagagatgaacgatccgggcgttcaggtttgtgcccattgcggcgctgagcttgcaggatcgcccgctcccgcggccccgtctgcaccgggcgctcccggtgctcctggtgctcccggtgctcccggtgctccgaaagcccccggtgccccggcggctcctaaatctcctggtgctccttcggctcccaaagcgccaggcgcgaaatagctctgcgcaatcggttttcttccagtagttcgggttttgaagaggcccagggtcttgttgactctgggcctcttcgtcttcggggaagacgattgcgttgcgcgcacaggggtgtttcacgagtagattcaccgatttactcgatggagcgagttttcccagatcatgagcctcacactcatagtgtgaaactaaaaaacgccctctcatcctgttcatttatctccatcgcgcccgttaaatacgtggcagggcacggtcgagggccgggcatggaaatgaaaaggaagaggtgaggttatgggagcaaagacaacggcggctccagctatcaagctggatacgttatccgatgtcaatgatctcgggaagccttggaagttcgatgacgaggacaccggactccacgtcacacgaagctgcgtttggtcgcctccgggctgccatccggtgggctgcggcgtcaagctctatgtcgacgacgagggcaagctcgtcaaagtcgagggcgacgagaaccatccggtgacccagggccgactctgcatgcgctgcatcgccctgaaggattacatctacaatccctcgcgcgtcaccaagcccatgaagcgtgatcgcaagtaccgcggtcaagccgacaagtgggaagagtgctccatggacgaggccttgagccttatcgaggagaactattggaagacggtcaaggagcacgggttcgagagcgtgctcgtctacacgggtactggtcgtgacggcggcgtgacctccggatcgaatttggcctccatggtcttcaacacaccgaactactgctacacccagtccggctatgcctgctacctgccccgcatggcagcgagcgtgtactgctctggcatcgcctacactgaggtagactacgccggcacgcttgagaagcgctacgacgaccccgagtacaaggtgcccgaggttatcgtgctgtggggtaaggagccgttggcctccaaccccgatggcctgttcggtcacgccatcatcgacatgatgaagcgcggctccaagatcatcgctgtcgacccgcgcgtgacgtggattgccaataaggccgattaccatctgcgcatccgtcctggcaccgacacggcccttggcatggccatgctcgacgtcatcatcaaggagaagctctacgacgaggaattcgtcgagcagtattgctacgggttcaaggagttcgccgagcgctgcgccacgatgcctccctccaaggccgccgagatctgcggtgtcgacgagggggacatcatcggcgccgcccgcatgtacgccaaggccgacccggccactatctcttggggtcttgcggtggaccagaagaccaacggcctgcagaacggccaggtcatcgtggctctcacggccatcacgggcaacatcgacaagcccggcggccagctcgtcgccggcgccggcacgtcggtcacgggcggcgagaacgaggacgccgagatgatggccctcgctcgcgtcgaggatcccgagctgcacatgaagatgatcggcatggaggagtacccgggctactgcggtttctgcaacaattcccacgccgacctcaccctgcgcgctctggagactgataagccctacccagtgcgcttcgccatgctgcagaactgcaacttcgccgcgaacagcaccgccgagcctgatcgctggattaaggcgagcgccgaggcgctggacttctgctttgccctcgattgcttcatcactccgtcggtgcagtgcgccgccgatgtgattattccgctggccaccacggccgagacgccgacggtcgtgtcggtcaactacggtgccacgcccgtctatcgcggtttccagaaccccgccatcaaggtgggcgactgcatgggcaacgcagagttcgcctatgtgatgggcgctcgcctgtggcccgagaagttcgagaactggggcatccacagcacggaggacttcctgagccatgtgtggctgggcaaggagaagttcgaggacctggctcccacggtgctcaaccagtacgaccacgagtacttcaagtacaagaagggcaagatgcgtcccgacggcggcctcggcttcgcgacgccttctggccgtatcgagttgtggtcccaggcttacgagcagttcggcgacgatccgctgccctactacgaggagccgcactacagcccctatagcgactcggagtacatgttgccggcctacaaggagatgtacccgttcgttctgacgactggtgctcgcacctacagcttcttccattccgagaatcgtcaggtgccggttctgcgcgagattaatccagacccgatcttcgagatcaatcctgaggatgccaagaagaagggcgtcaccgacggcatgtgggttcgcgtcttcaacatgttcggtgagtgctatctcaaggctcacctcacacccaaggtcaagcctggcgtcgtgcatgcccagcatggttggtggttcccggaggaggacggtgaggcgccgcatctgttcggcacgctccgctcgcagatcaacaacctcatcccgaacttccatgtcggcgtcatcgggttcggtgctccgttcaaatcgatgatctgcgacttcgagcccaccgataagaacttcgacaccgacatgcagatgatccaagagaaattcggagggttggactaacaatggctacgtacggacttttaattgattacgagttgtgcaccggttgccagtcttgcgaagtttcctgcaagatggagcatgattacccggtcggcaagtggggcatccgcgtctacgatgacggtccctgggagattgaccccaagcatttcaactggaacaaagttcctgtgcccaccgacttgtgcgacttgtgcgccgagcgcaccgctgtcggccgtgagcccatctgcgtccaccattgcttggcgaatgtgatgcactacggcacggttgaggagctggccgctatgatggacggatctcagaagcaggtgctgttcgtaggccctaatcagccgcaggaggactaggccatgagggactcgtcgcgcttcggaaaatacgcgctcattcactacaagggcggcgtgcttggtcaggaacccttcgaggatcataccgaggatgagccgcgcaagattcaaatcggaatggaccaagtgccccgagggatcgatgaggcgctcttcgagatggctcccggggaaaccaggacggttgtcctgactcccgagaaggcctacggcgagcacgaccccgacggcgtgcagatccgtatgcgcgacgaggtccccgacgggcacgagttggaagtcggcgccgttctggcatggcgcaatccgattacccacgcgatgcttccggcaaaagttgtcgaggcgacgcgggactacgtgaagttggatttcaaccatccgcttgctggcgagacgctcgagtacaccatcgagatgctcgacatcgtcgacgagtaaccgtggacttgactatgcccgtttgcattcaatagcattttgagaaaatcgagcccggcccgattgtacggaccgggctctttttgaggagaggtttctatgtttaagggtctcaacggcttcggccgtctcgtgaacatcttcatgtgcgccgccatgtgcgtcgtgctctgcatcatcatccccttcgtcgttgaggcgaacctgggggttcagggcgcgctcaatccggcgtcattcttgcagagcttcgtgctgagtttctgcatcgcttatcccttcggcgatcttctgcccgccgttaactggggcgggaagctggccgcttccctgcatgtgaagggagttggcgcgtacctcattcagtgcttggtgactgccctcgtgctcatcacgtgcatcgctttcgtggtgtcgttcgtcaacaacttcctcgtttcgggcatggaggggacgatcggcttcttcctcatgatttaccccgccgctctcatcggcggtttcgtggcaatcgtagtcttcttgggcctcttcatgaaacttgcggcccgtttgagcggcttcgatccggcggctgctatggccgctcagccttccgaggcctaacgctcgctggataaaggccatgtgctacggaagaaactgcgccgagtgcaatcgctgcggcaagatggactacctcaaccgcatgttggcgaagcgaccttgtcggtcctgcgggcgcgaggtctcgtcgagcgaggcgatctgccctcattgcggggcgcgtctcaagcccgacgcgccaccgccgggcgcaaaaggcggtgcccatggctgaacagggcgaaaaagttaggtgatttgcgggtgagccccgagtgacgacaggataaaggccctggatacgtacactggggctgcccgcttttacgttcatacggctcgcgaggatggggaagatgacagaaaagggtgtctcgcatcgcacaaacgattgcgcggtaaagctcgagttcatttttggcgtgctggcccttgcgttcatgtgggccgctttttggtcggtcattgccgtcgatcagatggtggcgggagcggatatgacgattcctgtcgagttcgccatatcccttgccataggtcaagcgacgagtgtggctctctgtttggtgattctccatcgagcgtcgcgatttctctgtaggttgcccgccacactgggtctctcgattgcggttgccatcgccttgtctctcttcttctgggtggtgggatcgtcttttggggccaatatcgtcctcggtatgattgtgggtttgacagcaggcctcctgtgggtgcaagctgcgctcttcttgtcccgtgttcctgctaaggccatagcgataaccttggcgagcagttcgctttttggagccgcgattattttccttcggggcattctcgaaccgaatgccgccgacatattcttcgtggcgatgattccgctttcgctcgctttgttctatctggcctatcgattcaagggcgagggacctgcccggcggcatggggtcatgcctgccgaatcgcactatctcaaaagcgtgcgtgagaacttcttcaagaaccgcaccctttatgtagtcatttttgtcttcgccctggtcttcggcatgcagatcggccttggggctgacacggcgcgcgcctttcccggctatgccgccctctccttctccattccgggagttctgcttctcatcacctattacggctttaatcgctcgattaacttccgcacgttgtgtttggttgttctgctctcgaccattgtctcgcttcttccctggggatttgacacggcgctgactttatcgctgcgcaaggtgatcgtgtatgccgcattcaccttgttcgatctctctgtcatcgccacattagttgaagtgggatccatcgagaacacgccgagtgccatccctatgctcatcggccgggcgttcatcatgatcggtgtggtggcggggatgttgttggcgcttaccgcttctgcggggctcgtctcgcagccgattctcgattctgcatcggttgtcacccttgtggcagtattcgctctgttcacgctgattcgtcagatattcaatccgaagcgagaaggggacgagcccgagaggcccttttacgaggcgattcgtcgggtgtcggaagggcacgggctttcggcccgggagtctgagatgctattgtttctggccaaggggtacaacgcgcagcgcatccaaaacgagctgactatctcgcagaacacggtgaagagccatatctaccatatttattcgaagctaaacgtgcacacccagcaggaagcgattctcgtggtggaaagcctcatggcgtctatcaaggatggacgtttggaagagagcatggttgcccgacgctgattacgcttgttgtgcgttgaaacggcaccttgggtacggtggttgtcctagtaggcggatccttgcaatttgcggcatccagcgcatcgacggagacggttgaggaaggtcgactttcaaaatgagggaaggggctatgcgcccgccacaaggcggcgtatgccggccatgctcgagatttcgtcgaggatgacaatcagttcaggggcttggtagaaatcgccgcgtcgcatattgccaagaggtttcaatatgccgtattcgcacgctctgttgatgatggaagttgccgacctgcgggttgtctcgagcccgtttgccacgtaatcggagttgacgacgggctgctctacgagcagtgcgggtaggccgaagatacgagaccctgagcgctcttgcatgcgcgtcgtccagtctcccacaagccctgcgatagtgcgcgatgtcttttgcccgacgaccatggccaagtcgattgcgttgtaaacctgttcgacaataggcgccggatcgccctgctggtagcgtgaaagcgcgctcatgtagtcgtcgatatcgtgcagcaaacccgccgatatgggcacggttgcatgcaggaggactccgtcgctgcgcaacatgcgatggagaagcgttcgacctgtgcgcccatttccgtcgacgaagggatggatggtttcgaactgggcatggacgagggcggctttggcgatagggtctatctcttcggtctgcgcgaaggcacaaaggtcgtccaagcacgcatcgacgcggcctggcacaggtggcacaaacagtgcaccgtggggactgtagggggtaccgccgacccaaacttgctcactgcgcaactctcctgcaaaatcaagagcggttttcttgagcagctggcgatgaatctgccgaatgccgtcggtcgtgagggcgttttcgagattgagcgcgcatcgcattgcatcgatgttccccgcaatgacaagtgcgtttggcggcgcggaggacgaaagctccgccagagcgatattgcgcgcgctggaggtaaggttttctatttgggagctggctgccgattcactgcgcagcaagaggctgggaaggttaaagggcagcgagtcttggtgctcgtcgaatcgggcgaggcgcattcgggcatcagcgaggcgctcggtgagctcggccgagagccgggggcgcgcatggcggatttcggccgggacggccgcctggtaagtggaagtgatttttctgcgccgagacttcggaatgaggtagacgtcctcgtcgcgcaggtgccacggaacctcttcggtggttatggccggccagtcgctcacgaggcgtcctttcatttgatttcgcttctttactatacaattagcggaagcgaattgcaattcacttccgctaattgagatttagggaagggaaaattgctcccatctggcagttaaacgatcaggggcccacatcacatgggccgttaccaacaaggccattgccgccgttcaaaggaccgttgtaggggatggttgtgtccgtgccgaagcggaattctgcgtcgttttgctcggctgtggtttgtatgggctcaatatagctcgttacgacagagttgttgtcgaaccagtgcatggtgttataaagcccggcaccgtaaaagcccggcccgtagttgtcgacaacaccgttgaaccgcatcacgcgctttgcatggccttttggaagaagagcggggtgacgactgcttcctcaacagaaacggtccaacttccgcaatgaaaatagtccaacttccccaatcgcttcgttgacgtggtataacgggcgtcctcgtcccgataacctgtctggcctcataagggaaagatcgctcaaaacccttctctgtcctgtagggggctccgaaggagctttgggtttctcagctggcggtcagcacgcgttgagttctgtcaagtgctgccttgcgcaggaatgccgaacgtgactctccctcctgttcggctgcgcgcttgatggcaagagcggcggagtgcggtactttgaagctaatcacgtcgagaggctcgtcggccagccttggtcggcctatcaccacgttgcccgaccactggccggggagggatcccgtctcggcggcctcggccagagcttctatctctgcgtcagtgattaccttgccgctcttgagggtgtattccattttctatctccttcccagtccaagttcgcgcttcatccgctctgtcgccggcgaaagcgcatggatgatcagtgttgtcccgtcagctaagattatgccgaccatttcgacttcgcgcccggtacccgtaaagccgatcgtcacccagcagtcatcgcctctcggacgcttccgagcgaagttgtgccaggcgaaagagatctcctcttgtgacagatcgtgcttgagggcgtggggatggatgcgtatcaagtccatagacttcttccttatgtaatactaaagtataatacaaaacccaatgatccccaagggctttatcgggaagcaagagcctacatcagccgaaccgcaattatgtcgcgagaaagtcgcgtttcgttccccgcgccgaccgcatttatgtcgcaatgctttccgctacccccagagtcaaccctccaacggcacgattaaaaaagagtgatcactcctcatggttcttacgggccagcaagcggcctcccgccggccggccggcgtctacgtcgtcccgataacctgcctggttctgtagtggacgagggatctccttcgcgctgcggcgccgacctgcccgagggagcgtcggtttgccgctggggcttcgctttctctagcaaaaacgtcactgtggccacagagcgacaagcaatctcaaccttccgtaaaaatcttcactttcgaagttttttatagagctgcctcgttgagaagcataagttcgcgcatagggacgatgcgaaagcggtggtgccgccatggacgctgcgacaagaaagccgttttgccatgcaagcattggagcgtttgatcgagcagggcttcgttgcttggtgcgcgctgctgtgaggatacgaaaggatacgaaaggatacgaaaggatacgaaaggataccgcccaaggatggggaaccttggtacaatcaagacgcctgaatcgttcacttcaatggggagaatacccgttatgactgcctactgcgaaacttccgactgcttcgaaacatcgttgaaccagcacagcgacaccctcgagggactgcgccaccgcgcctatcgggatcgttctcgggacgacagagttggcatcatgatctgcgataaagatcgactcttcgtggagggcatcgcagcgctcattgagcaatgggatgagtttgatctgctcgcgaagatatattcctacgatgaggctctcgcggcggcgaaggaacatctccctgcggtggtgctgttaggggctcgtgtgggagatacgccatgtgcgctggttatacgcgacattctcgcttccgatccaggtgtatgcgttatggtcttggcttcgtcgggcgattcgcgcgaagtgctggacgcactgcgcgccggtgctatgggctatggcgtgcgcaacgagctatcggtcgaccggcttcgcggcactatctggggaatggtttgcggagaggtggtgttcgacggatccattcgcacccatctgcaagaggcattgcgctcttctgatgggcaggagccggctttctccgacgccgattcgggccttatgaagctgttgacccagcgcgagcgcgagattctctgcctgttgatggacggcctgtcgaatcaggaggtggctacgcgcctgttcatcagcgagccgacggtgaagaagaatgtcagccgcatcatcgacaagctgcaagtgcagaatcgtgtgcaggctgctgtatatgcggcgcgccatcttccccgctagcctcttccgtatccgaaagaatactcattcgacacccttgtgccgcaggtcaagggtgtctttcgtctcttatcggtgaagcaatttatatcccaactcctatacgttcggggctagggaacccaccttcatacctcctatgatgacggcacatcgggcctggcgaaaagccgagtgccgcaaccaagccgtttggaaggagctaaaccatgaagggcaagctgattcgtgtgtgcgtcgtggccaatgacgcggccgagaccatgagggatttcaacgacctgtttggggtcgagttctacgggccgtttgatgacgagaatgtgaagctgaaggtggcgctgccgcgtagcggcggcatggaggtgtcctccccgacggccgccgacgaccccatcggcttctcgcagtatctggccgctcacggcgagggcatcaagggcatcgccttgcgcgtggacaacatccaggaggccatggacgagctgaaggccaagggcgtcgagcttggcgtgtacttcgagcacaacctgatgaaggagtgcatcatccccccgcagccgaagacccacaacatcgaagtggctctcaacgagttccccgatgaggacccggtcggccaggcagtggcccgcgacatgggcatcgacctgtacgcctaacaactgcggcggaggagagcaatgaaggcagtagcaattttcaagtgggctccgaatcccgatgacgcgctggtgcgtgtcgacggcacggtgaactggagcacggcccgccatgatgtgggcgacgacgatcatgcggtcatggcctgcgctatggcggccgccaacggcgacgaggtagtcggtttgtgcgtgggcggcggcgacacgtcgttcgcagccgcacgcggcgccgagcgcacggtggtgctggagggcttccccgtgcctaccgactctatgaccatggcccgcgccctggttgaggcgatcaagggcgttgaagacgcagggctggttgctatgggcgacgccgactgggatcccatggtggccccgctggtggcagcccttctggggtggcccctgctgaccgccgtggatgaggtggctatcgccgacggtggcctggttgtgacccgccgccacggcatgggcactcaggacgtcgcggtaacgggtccggttgtggttgatgtggcagctcgtcgcgaggaagaggaaaagcccggcatgcgccaggtgctcgccgctcgcaagaagccgtcggacaccaagaccgtggagggcgaccgctcggctttttcttctcgcggcacgcgcttgcccgaggcgacctcgtcgcgcctgttcgatggatccgatcctgccgatgccgtggagcagctggtcagcgctctcaaggccgacggcgtgctctagtcgcactgaacgcaagaaaggattctctcatgagcaacaacgtggtaattatcgttgccgacgaggtgccggtgggcacgctgctcgcggtagccaagcgcgctggcaccgatgtgaaggccgtcgtcgcgggttcccgcgccctggccgacacggtggcaactggcggcgtggcgtcggtggcctggattgacgtgccggaagcaacgcctgtcgaggcctttgcggccacggcggccgaggcggtcaaggctttggagccgggtgtcgtgctcgcgccgaatgctgcagcctcccgtgttctcgccggagcggtcgccgccgagcttgatgccgctgtcgcttcgtcggtcagcaacgtcgccttcgagggggatgtgaaagtcgttgatcgcctggtggccgagcagcgcgccgtcgaaacgctcgagaccaccgcgccggtagtggcactggtggctgacggctccgacgatgtggaagcagcggctgccgcgccggttgaggtcgtcgccgaaggagctgtcgcgccccttgcgatcactgcgacccatgccggcgaggagggtggggcttccctcgccagcgccaaccgcgtggtgggtgtcggccgtggcctgacgagcaaggatcagctggccctggccgaagctttggcctcggcgctggatgctgaaatcgcctgcagcctttcgctgtgcgacgactaccgctggttcgagcatggccgcgtggtgggcacttctacccagcgcatcgccccgcgcctctacgtgtcggtgggtatttcgggtcagccccagcacatgaccggagtgcgcggtgccaagaccatcgtcgcgatcaacaacgatcccgaggcgcccattttccgcgcttgcgcctacggcatcgtcggcgacttgaacaaggtggttcctgcgctcacggcggcgctttcctaaatcagggcagtacggcatctcgtccggggatgccgacgcataagaaaagagaaggagaagagcatggcgttcgatactgagtacgacctggtcgtcgtcggcggcggggcttcggggaagtccgcggccctcgaggcggcccgcgctggcaagagcgtggtcatcctcgagaagatgcccgagacgggcggcctgtccatgttcgccgagggcactgctgccttcgagtcgagcgagcagaagaagctggggaagccggcccatcccgaccgtcatttccccaccaagcaggagggctatgacaagttcaacgcgtacagccactatcgcgcaaacttcgacgtggtgcgcgccttcgtggacaactccgccgataccatcgatttcctcaaggatctgggcgtggagtacaagacggtgaccatcgctgcctatgacgatcccaacgaggtgtggaccttccatctgcccgacggcctgggcgctcgcgtgcaggaactactgctgtcggccgtggagcacgccggtgtggacatcttcaccgagacgccggccaccgagcttatcatcgaggacggcaaggttgtgggcgtggtcgccgagtccgagggcgagcccctgcgcgtgggcggcaaggccgtggttctggccacgggcggcatgggctccaaccccgagctcatcgcgaagtattcctggttcgcgcccagcgcctacaacatgaacaccctcacgccgctgcagaacatgggcgacggcctgatgatggccctgtccgctggcgccgacgacaccaacatcgtcacctgccccattctggcggccggcgcccgcgacaaggccatggactcccacatcggcgccgctggcgtgcagccgggtgccatctggatcaacaagaccggccgccgcttcgccaacgagggcaccgccgagaacatcggcgatatcggcccgctgtacggcaagcagcccgacggcattgtgtggtcggtgctcgaccaggccaacatcgaccgtcttgctgagaacggctccgagatctccatcggcgagttcgtcgtgttcggccgcccgctcgatcgcctgcgtatggagctcgatcaggacgtggccgacggcgtggccttcgcggccaacactcccgaggagctggccgagaagatcggcgtgtccccggagaacttcgccgctaccgtggctacctacaacgaggcgtgcgctacgggtgacgacaaggcgttctttaagcaggagaagtacctgcgtccgctttctaccccgccgttctatgctgtggccctcgccacgggcaccatgggctccgctggcggtatccgcattaatggcaatatgcaggtagtcgacaaggactacgagcccatccccggtctgtacgccgtgggtctggacgcgacgggcctgtacggcgactcctacaacatggaggtgccgggcgcggctaacggcttcgctcacacctcgggccgtattgcgggtcgtcatttcgcggctcagctggcttaacccttagtacgtaaggccgcgcggccgatcccgcgtcgtgcggccttcgtgagagaagagattcgagaaaggaatcatcatggcaaacatccccaggatcgtcggcgctcccgatttcggcaagctcattgctccggaggagtctctgggcaagcgcctggaaggcaagcgcgtgctgctgaccggcaccactaagggcgtcggccgcgtgacccaggagctgctgtgcgcccagggtgccttcgtgtgcggttctggccgttccaagggcgtggccgctgaggtggccaacgagttggtggccaagggctacaaggccgcgggcttcgacgtggatctttccgactacgaggccgtgaagaagtgggtggctgagtgcgccgagctcatgggtggtattgatgtcgttatcaacaacgcctcgcatccgggcatggcccccttcggcgagatgacccccgacatctgggcttacggcatccagaacgagctcgatctggtgtacaacgtgtgcaactgcgcgtggccctatctgatcgaggctggcggcggctccatcgtcatcacctcgtccaccgtgggcctgcagggctctaactctccccaggcctgccatgcggctgccaagggagcttgcctggccctgtctcgccaactggctgctgagggcggtcccttcggtatccgctgcaactccatcacccctggtctggtgtggaccgaggccatggccaatatccccaaggagatggcccagggtctcatcgcggctcagactacccagcaggctatcgacccgctcgacatcgcctacgcctatctgttcctggcttccgacgagtcccgcttcatcacggcggtcaacctgccggtggacggtggctgctccggtgcggtgacgggtggcatgcagggcgaaatcgcttaatgaaacgccggcgcactggccaggggaatgagccggtgcgccttcacaaggcaacgcgaggagcttcgggaagctccttgagaggaggatagaatgaagggtcccattggattcggaagagttgtcaaccttgtcatgaacattattttgggcctgtgcatgtcgctggtcatgctgaccgcggcgggggttccgctgctgcccgaaattgtcatcgaggcttggttcgccagtttctgcatcggctacgccttcggcgacattattcccgtggcttcatgggggccgacgctgtgcgccaagctgaacctgcgtggcggtattgggttctacctgatcaactctgtgattctcggtgtgtacttcggcacgatcatctcgttcggcaacatgctgatcaataacctgccgacattgggctgggcggcggtgttcggcggctttgtcgcttcgtggccgttggttgccctgtcggcggtagtgctggtgatcatcttcctgtggcttgcccagaagatcgccaaggccgtgagtggattcgatcccgtggcggccgctcacgaggctcactagcccagcaaggtttcccgagcatcttatcgactcttatcacggtatcaatcagaagggattgagataatgaagaagaaccagcattttccgaagctgttcgagcgcggctatatcgccggtttggagatcaagaaccgcatcgtgcgccagcccatgggcaccgagctgggcaaccccgacggttctcccagctgggccacggtgaaggcctatgccgaggccgccgatggtggtgcgggcattgtgtatatggacaacgccggtgtgacccagttccatcatgtaggcctgtctatcgccagcgatccctacatcggcccgatgtccatcttggctaagacgctgaagcaccacggtgcggtgcccggcctgcagatcgtgcatcccggccgcgatgccgccttcgtggcaggcgacgatctcatctcgtcgtcgcgcgttatgtgggagccctggtacgagaacggcggcggcgtgccgcgcgaactgaccatcgaggagattcacgagttcgtggaggccttcggcgatgcggccgagcgtggccagcgcgccggttttgagatcatcgatgtgcattccgcttgcggtgtgctgctctccaacttcctgtcgccgctcaacaacacccgtaccgacatgtacggcggctcgctgcacaatcgcatgcgcttcctgatggaggtcattcgcaacatcaagcagaagacctcggtgccgctgtccattcgcctgtccggttgcgacttcgagcccggcggcatcaccatcgaggagaccattgaggtggccaaggcctgcgaacgtatgggcgccgacgttatcaacatcacctggggcagccacgccgaagtggtgaacgctgccggtctgctgtctccccatggcgcgaatcatgtggatatggccaagcgtatcaaggatgccgtgagcattccggtcatgctgtgcggcggcatctacactcctgagattggcgagcagctgctggaagacggcgtgtgcgactacgtgggcatcggcaaaccggccctggccgatccgttctgggccaagaaggccgaggaaggccgctctgacgacattcgcccctgcatcggctgcggtgtgggttgccacgaccgcggtatgctgtcgggcggtatggtgcagtgcgccgttaatcccacgctgtaccagttcgaccgcgagtacttcccgaaagccgatcgtccgaagaaggttgccattatcggtgccggccctgcgggcagcgcggcggccctgaccgccgccgagtgcggccacgacgtaaccctgttcgagggccgcgaggtgggcggcgtgctgaaggaggcctcggtgccggtgtacaaggaggacctgggccgtctgggcaagtactatcagcgccagatcgccaagtccaacgtcaagctggttgaggagaacgcgacgccggaaaccatcgccgcgggcgacttcgatgccgtgatcatcgccacgggtggcaaggtgcgcgagttgaacctgcccggcctggattccgacaacgtgatttatgctatggacctgatgaagcagagatgccagctggatgccgagaaggtggtcgttgtgggaggcggcatcgtgggtgccgaggtggctctcattctggccgaggacttcggcaaggatgtcaccatcacgacgcgccaagacaactttttcgtgcccggtgtgatgggcatcgcctacatgacgcgcctggccatggccggcgtgaaaacgaagacccgcgccaacctggttgaggtgaagggcggcaagccggtgttttccacgatgaatggcctggagacgatggatgtggacgcggtggtggtgtcgcccggcttcctgcccaccagccagatgcgcgacgacatcgagcagattgccgatgtggacacctacgtgatcggcgatgccaaggccccgcgtctggtgatggacgccgtgcatgagggctacaagacggccatcaacctgtaagcaagcagaaggggtgcccgcatatttggggcgccccttctggaagaacgatcaccgaaggaggtgctgcgtggaagagcgcgatttcgatatcatcgtcgtgggctgcggctgtgccggcgccattgcggcctacgtggcagccaagcagggcaagagcgtgctcatcgtggagcgcggcgagtcggctgggtcgaagaacatgaccggcggccgcatttacgctcactcgctgcgtaaggtttttgacaagtacgccgatggcgacgtcgaatgggacaacatccccttcgagcgcaagatcacccatgagcgcattgccctgatggatcccaccagtaacatgaccatcgatttcaccagcaaggagctgggcgaggcgggtagtgacagctacagtgttctgcgcgcccccttcgatgcctggatggctgagctgtgcgagaaggcgggttgcgagatcattgctggcattggtgtggaagagctggtaaaggacgagacgggcgcggtcatcggcatcaaggccggagacgatgagatcacctcccaggtcgtgattttggctgagggcgtgaactccctcttggccgagcgctgcctcggcgccccgcgtcccaagcgcaacgaaatggccgtgggtatcaaggagctcttcgagctgccggcccgcaccatcgaggaccgtttccttacgcccgagggcgagggcgcggccatgctgttcgtgggtgattgcacccatggcagcgtgggcggcggcttcctgtacaccaacaaggattccatcagcttgggcctcgtggccaccatcgaagagctttccacgagcggcaccaccatctaccaggccatggaagacttcaagcaccatccggccgtggcgcccatcattcgcgacgctaccatggtagagcattcgggacacatggtgtccgagggtggctacgacatgattcccgaatgcgtgtacgatggctgccttattgccggcgatgccgccatgctctgcatgaacctgggctatcaggtgcgcggcatggatctggccgtggcatcgggtcagttcgccgccgaggccgcttgcgccgctattgatggcggcaacgtaagcgcccaggccctggcgccctatcgcaccatgctcgaggatagcttcgtgatcaaggacatgaagaccttccgtgcgtggcctcagacgatggagcattgggatcgcatgttcacggagtatccgacgatggtcgccgaggtgttcaacgccatgttcgtcgtcgatggcgaaccgcagcagcatctgacgaagcgtattatcccggtggtgaagcagcgcggtctgctgcgcttggccaaggaagtgagaggagcgctgaaggccctatgagcaccttgccgaagatcacggtgaacgtcgatgagatgatcggcgtcaacaagtacagcgtcgacgagggcggatcgcacatcggcttcacggccgaggatgtagacgcgttggacgaggcggagttcctgaagctggtgaaggtgtgtccggcagctctgtacaaaatcggtcctgatggtcgcaagagctttgactatgcgggctgcctggaatgcggcacctgccgcatctgctgcgaggagaccatcgtgtcgcgctgggataatccggctccgatgatgggagtgcagtaccgcttcggctaggaagcgcttggttaccgttgtaaaccgagaggatgaaagactgattcgccgcgagcggcgatggcgcggaaccgatgtttccctcgaatatgagcatgggcacgcccgagatgtcgtcgatcgctcaaaggtaccgcgcgagacgggtgttaccagttggaaatactggacgcgctatcttgtatcagttgactctagacagggaaagagagagctatggggcgtttaacggtacaacccgcggcgaaagccgacgggcagatgggagcgttcgtcgaggcgttcacgcgtcgcgtcgaagccatgccgccggggcagtgtccggtggggatggtgctgggccagctgcaggcgagcatggctcagacctgcggcaagtgcacgccgtgcgctcagggcatgccgaagatcgcggcgctgctgcgcgacgtggccgagttccgcgccaccgagacgacggtcagcgagattcgcgccaaggccgcgctgctgcgcgacacggccgactgcgcggtgggctggcaagcgggccagatggtgctggaggggctcgacgcctttgccgacgagttcgccagccacgtggaagcgggcacctgcgccccgggcacgcgccagacggtgccctgcgtcacgctgtgtccggcccacgtgaacgtgccggcctatatcgcgctggccgaggaggggcgctttgccgaggcggtgaagatgatccgtaaggacaacccgttcccgacggcctgcgcgctggtgtgcgagcatccgtgcgaggagcgctgccgccgcaccatggtggatgcgcccgtgaacattcgcggcatcaagaagcacatcgtggacacggtggccgccgacacggtggagaccccgcagccgctgccggcgacgggcaagcgcgttgccgtggtgggcgccggtccctctggcctcacctgcgcctacttcctggctctgatgggccacgaagtggtggtgtacgaggcgcgcaagaagctcggcggcatgatgcgctacggcattcccgcctaccgcttcccgcgcgagcgcctggacgaggatattcgggccatcttgggcgccggatccatcgaggtgaagaccgagtgcgccgttgatgcggccgagatggcgaagctggccggctggtacgacgccgtgtacgtggccatcggcgcccagggcggcaagaccttggcgctggagggcgccgacgccgagggcgtgatgagcgctgtcgatctgctcggcatgatcggcgatggcaagcatccggacttcacgggcaagaaggtggtggtcatcggcggcggcaacgtggccatggactgcgcccgcacgagcgtgcgcctcggcgcagagtcggtgacggtggcctaccgccgccgcctggaggatatgaccgcgctgcccgccgaggtggagagcgctattgccgagggcgtcgagatgatgtgcctgcaggctcccgagcgcatcgaggtggacgccgagggccgggctgcggcgctcgtgtgccagccccagcgcattggcgcggtgaagcgcggacgtcccgcgccggtggcggccgacaagccggagctgcggctcgaggccgatatcgtgcttatcgccgtgggccaggccattgagagcgctcccttcgaggagtacggcatggaggccgaccgcacctatttcgtggccgaccagtacctgcgcgccatgggccaggagggcgtcttcgtgggcggcgactgccagtggggccccaagaccgtcatcatggccattgccgctggcaagacggccgcggccaacatcgaccacgagctcgggttccatcacgaactggattgcggcgccgctgtgccgccggcgcgtcccaacgatcggacggcctacggtcgcgtgcaggtggccgagcgtccggcgtgcgagcgcaagcacgatttcgagggcgtggaagttccgatgaccgacgaggaggcggctcaggagtgccgccgctgcctgcgatgcgatgtgtacggcataggcgcgctgaccggaagggggcttgaggcatggtaaccatcacgttgaacggccaggctgtggaggtggccgagggctccacgctgctcgaggccgccacggcggcgggcgttaacattcccacgctgtgctatttgaaggatctgaactgcatcggctcgtgccgggtgtgcctggtggacgtgggaggccagggcctggtggcggcgtgcaacaccgccgcggccgagggcatggtcgtgcgcaccgacaccccgcaggtagccgcggcgcgtcgggcgaacctgcaggccatcatggacgaccatcgggcgctctgcgccacctgcgtgcgccaggacacctgcgccctgcgcttcctttccagcaccttcaacctgcaggatgccggcgaggccctgccggtgccggagccgtgggatgccaccttcccgctgcagcgcgacagcagcaagtgcatcaagtgcatgcgctgcgtggccatctgcgacaaggtgcagcactgcggcgtgtgggacttcaccggcgcaggcccctcgatgaaggtgatcgtgcgcgacaacctgcccatcgccgacgccggctgcgcgctgtgcggccagtgcatcacccactgccccacgggcgcccttaccgcccgcgacgacgtgagccgcatcatggacgccattctggacccgaccgtggagaccgtggtgcaggtggccccggccgtgcgtgccgcctggggggagggtgtggggctttcccgcgacgaggccacgccgggacgcttggccgcggccctgcatgcggtgggcttcgacaaggtgttcgacactgacttcgccgccgacctcaccattatggaagagggcagcgagttcgtggagttcctgggctccgatgcgccccgccccatgtttaccagctgctgccccgggtgggtgcgtttcgtgaagcagcactatccacagttcacggcccagctatccagcgccaagtcgccgcaccagatgatgggcgccgtggtgaagaacacgcttgcggccgaggccgacgaggccggccgccggctgttcgtcgtgtccatcatgccctgcgtggcgaagaagtacgagtgcgacgtgcccgagctggctaccgaggccgatgccgacgtggatgccgtgctcacggtgcgcgagttcgaccgcctgctgcgcatggtgggcgtgaactgcgcggctttgcccgagactcccttcgacaacccgctggggctgtccaccggcgcggccaccatcttcggccgcaccggcggcgtgatggaggcggccctgcgctcggcggccttcctcatcaccggccagaaccccgacttcagcgtgtgcgacaccaccgacgccacacccgagaccccgtggatttcccgcgagctgaccgtgggcgacgccacggtgcgcatcgccgtggccagcggtttggagaacacggcgaagctgctggatgccctgaagtccggcgcggcggccttcgacttcgtcgagatcatggcctgccccggcggctgcgtgggcggcggtggccagcccatctcgttcaactgcgagctggcaagcgatcgcgcaggcgtgctgaaccgcctggacgccggcgacgccctgcgctattcccacgagaaccccgacatcgcgcagttgtatgccgactggatcggcgagccgctctcccacacggctcacgaatggctgcacaccgaccaggagacgtggcagatctagcaccgagggcggcatacccgctcgaggaggggcgggacggggagaaagaccagcgtcccgcccctcgttgttccagaaaggaggatgtcccatggcaggaaccatatcggcgctcatcgatggcctggcggctgggcgccccctttccgccgacgagtacgagcagctcgtcgctgcccgcacgcccgagctggccgccgagctggctggtcgggcccgcgaggcgtgcgagcgcgaatacggcgacgtcgtgttcgcccgggcgctcatcgagatcagcaacgtgtgccgcaacgattgctactactgcggcatccggcgcagcaaccgcagctgcgtgcgttatcgccttactcgcgagcagattctggcttgcgctgatgcgggctggcaggcaggcttccgcaccttcgtgttgcagggcggggaggatccggcggcgaccgacgagtggctggccggcatggtgggcgccttgaaggcggcccatccgggctgcgccgtcaccctgtcggtgggggagcgctcgcgggaaagctacgagcgcctgcgcgccgccggggccgaccgctacctgctgcgccacgagacggccacggacgcccattatcggcagttgcacccggcggccatgacgcttcagcgccgcatggcgtgcctgtccgacttgcgcgaggccgggtacgctgtgggcgccggcttcatggtgggctcccccttccagacgacggaacggctggcggccgaccttgcgttcatccagcggttccgccccgagatgtgcggtatcggcccctttgtgcctcaccgcgacacccccttcgccgccgaggcacccggcacggttgagctcacctgctacctgttgtccctcgttcgcctggtgcacccgacggtgctgctgccggccacgacggcgctggaggcgctggatcctcacggccgcgaaaagggcattctcgccggggccaacgtcgtgatgccgaacttgtcgccgcccgagcaccagggcgactacacactctacgatgggaagccccgctcgtcggccggcgcggctcgcaagtgggccgacctggcggcgcagcttgagcccttgggccgccgcctcgtggtagaccgtgggaaccctatgaaggagaaaacctatgattcgctatgatgtgcgctctccccgcgccgatgatttcatcaaccaccaggaaattctcgacaccctggcctatgccgccatgcatcggcacgacgccgccctggcgcgttccatcctggaaaaggcccgggcgaacctgacgccggcccacgaccacggcacgacgctcacccaccgcgaggcctcggtgcttctggcttgcgaggacccggaggtgaacgccgagatccgtcagctcgcccgcgacatcaagcaggcctactacggcaaccgcatcgtgctgttcgcgccgctgtacctttccaactattgcgtgaacgggtgcctttactgcccctaccatgcgaccaaccgcgacattccgcgccgcaagctcacgcagaaggagattcgcgctgaggtgatcgccctgcaggacatgggtcacaagaggttggccatcgaggcgggggaggatccggcccataacccgctcgactacattcttgaaagccttcagaccatctacaccacgaagcacgccaatggcgccatccgccgcgtgaacgtgaacatcgccgccacgacggaggacgcctaccgccagttgaaggccgcggaaatcggcacctacatcctgttccaggagacttaccaccgtgcccgctacgaagagctgcacccctcaggccccaaggccggctacgcctggcacactgaggcccacgaccgcgccatggccgccggcatcgacgacgtggggctcggcgtgctgttcggtttggaaggctatgcctacgagttcgccggccttctcatgcacgcggagcatttggaagccgtgttcggcgtaggcccgcacaccatctcggtgccgcgggtgaagccggcgagcgacatcgaccccgacgatttcgataacggcattcccgacgaaatgttcgagaagatcatcgcgctcatccgcatcgcggtgccctacacgggcatgatcatctccacccgcgagtctcaagaggtgcgcgcagcggcgctgcaactgggcgtctcgcagatctccggcggcagccgcaccagcgtgggcggctacgtggacgaggcacgcccccacgacaccgagcagttcgacgtgtccgaccagcgcaccctggacgaggtcatcggctggctcatggacgagggccatcttcccagcttctgcaccgcgtgctatcgcgccggccgcaccggcgaccgcttcatggagttctgcaagaacggtcagatcctggacttctgccagccgaacgccctgctgacgttgggcgagtacctgtgcgactacgccagccctgccgtggcggagaagggatggaagatgatcgatgccgagctcgcccgcgtccccgacgaccgccgccgcgccctcgccaccgactacctcgcccgcatccgcaccggcgcccgcgacttccggttctagccgctgtcccgaaggccgtcggaagtgtgccttccgtagggggcgacctcggtcgcccctcccaacaggaaaaacgcttttggtcgagaggggcgaccaaggtcgccccctacggaggcaaaccggcaacgaaaggagcctgcatgtccctgaacgataccccttccggcgagcgcgcgcacatcgtcttcttcggtgtgcgcaatgccggcaagtccagcctggtgaacgcgctgacgagccagaccgtctccgtagtgtccgatgtcgccggcaccaccaccgacccggtgcgcaaggccatggagctggcgtcggccggccccgtgctcgtcatcgacaccccgggcatcgacgacgccggcgacgtgggcgacctgcgcgtccagcgggccgaagccgccctgaacgaggccgacgtggccgtgctcgttgtggacgccacccgcggcatgacctccttcgacgaccgccttctcgccaccttccaaacgcgccgcatcccccacgtcatcgccgaaaacaaggccgacttgcttgtggaggaagagcgcgctggttcctcggatcagccttccctgtttgagccgggaaagatattgtgccctaccgctgcgccagagtcgagcgaatgtctctgcgcttcgttgcgagaagaagacggagcttccgagaggatcgtggaaggagttcaaggcaaccgcgatgcctccttgcctcttaacgctcgtgcccgtgaggagagagggggttgcggttcggaagctccggggagtgcttctctctgggccgtccgcgtgcgcgtatcggcgcggacaggggagggactggacgacttgaagcgcgccctcgccaccctggccgccgacacggcgggggagcggcggctcgtgggcgacttgctcgagcccggtgatgtggtcgtgctcgtcattccgctggactccgccgcccccaagggccgcatcatcctgccccagcagcaagtcatgcgcgacgcgctggaagccggcgccttcccttgcgccaccggcgtcgaagggctgcccgatctgctggccgccctcgctcggccgccgcgtctggtagtaaccgactcccaggtcttcgccgaggtagatgccttgctgccagccgaggtgccgcttacctcgttttcaatccttatggcccgctacaagggcgacctgcccgcccaactggaagcggtgcgcgctctggaaagcctgatcgacaacgataccgtgctcatcgccgagggttgcacccaccaccgtacctgcgaggacatcggcacggtgaagctgccccggctcatccgcgccatcagtggcaccgacccccggttcgccttcacctccggccgcgatttccccgatgatctttccccctacgccgccatcgtccactgcggcggctgcaccttgagcgcccgcgacatggcctcccgcatccagcgcgcccgcgcccagcagatccccctcaccaactacggcatgaccatcgcccgcgcccacaacatcctccctcgcgccctcgcccccttggacgcataggatgcccccgagttcccgtcgcatcgggcgtgcgggatgattcccggcgctctcgtcccgctggacgcatgggatggaattcgcagcagagctttcctgctggagaaacgttcagcttccgattcggagtcgttaagctgccgcgcaagatgctgcgaggaagacggtggtgtgaattttggaaaatgtgcttttttgcgcggcgcttcgctgcgggtggccgaactgttccaaaaaagcacattttccagaattgagcgtgcttacagtggtttggtgaatgaatgaggacggaacgagatgaaagcaacacgagggagcacggcaagtgctacaaaaatttcgtctcgcccagcttgcggagcacccagtcgttcaggcggatgacggggcggcgcaggacgaggccgaggatcagactcggcaccaagatggccgcgagcaggcccatctgcacgaggtactggtcgccgtagatgccggccatggctccttctaacgctggcatggaatgggcgaagggcagccacgggtaaatctcctggaacagcggggccgacagcatctgcaccggcatgaggccgccggcgccggccagttgcagcacgagcccgatgatggcgagcgccttgccgatgttgccaaaggacaccgtcagcgtgtacaccaggttcgtgaacaccaccgatgccaagcaacaggctgccagatacagccagaaatgctcgcactccacgccgaggaagaacacgttgccgagtcccacgatgagcgcttgggcgagccccagcaggcagaacaccccgtagcggccaaggtacagctcgcctggccgcggcgctcgcccgaacttcttcgtcagcgcggcctggcgcgcgggggagacggacacgctcatgagggccaccataaagatggccccgatccacagcgcgagggaggtgtagaagggactcatggcgctgccgttgtcggccatggggtacaccgcgtgacgttccaggtgcgtcggcgcggcgaggaactgggcgatggcggccgggttatcgccgatgatgcggcgcacttcgtcgatgtcgccggtgtccagggcgtgctgcaggtcgtcgcgggcctgggcgagctggctttccgccgtgcgcagggtttcggcggtcttgcgcagcgacgcctcggcggtggcgaggttcgcggccagagaatcggtgctggcgcccaggctgtccgcagtgtccttcagcgatccggctagggtctcggtgtcggcacccaccttctgcagactgttggccagcgatgtcagctcgtctttcagctggtcgttgtaggtgctcagcgagtcgtgcagacccgcgcgcgcttggttgatgctgtcagtcgccttggtgtgcatctcgtcgatggatgctgcgtcgctcccgatggcgctctcggcggtggcgaggttcgcctccagcgtgcccagctgggcgatgatgcggtcaagggcggcgacggccgggctgtccgggtcggctccggccagggtgtcgcgcatggtctggtaggcttgggcgagtccctgcacgtccgagcgacaggcggccagcacgccctgggccgcggctgggtcgtctttcatggtggcgaaggcttcatcggcggcgcgggccacggcgtcgtagctggcatcggccgctgcgagtgccttctcggctgcggtgctcgcggcggaaagcccgtcccggccgctcgtcaggccctcttgtgcctcgctcaccagaggagcggtagcgtcgggcgccttccccgcctccttcagaatgttcgctgtcgcgttcacaagcgaggtcgtggatcccacgagatcggcgtaggcctgggcctggtcggctgccgcgcccacttcgcccaccgcctcgccaaggcgcgaccccaaggtttgcgcgtaggtgagaatgccgtcgccgctcatgaacgaggtgaggctgcttgtggtgcccaaggccaccgacgccacggtttccgtgaacgtctcgtcgatggtctcctgcaaggtgctcgcgcccgtggccgtcacgcgctgggcgatggcgttctccttctcgttgtcgtagtagatgattttcggctcggtgatgtcgtcggagaacacggtcatgaggtcgcgcgagaactccttcgggatgaccagggctgcgtaatactcgcccgaccgcacaccttccacagccgcctcggcgccgacaaactgccaggcgaactggtcgttggcccgcagcttgccgatgatttgctcgccagcattgacgggcgtcggtatgaggtcggaggtgtagccggcgtcttccgaggccacggccaccttgatgttgccggtgttgtcgtagggatcccagaagccgagcgttgtaaaccaggcgtacatgggcggcacgagcgccagccccatcaccacaatggcagcaatgacgttccggaacaggttccgcacatcacccgagaaaatgtcccaaatcatcctcacgccgaatcaccaccaatctgcccactagcgcgtttctgcagctcctcggcgttcaggttcgccagggcaagctggtgcgcgaggttggtgtccaggtatgaaatcacgatgagatacgtatccaccacgatgatccccaccaccatggccatgagcatcatgacgcgcgtatccacgtcggcatgcaccagcaccataatggcgaaggtgcccagcggttgcgcgataagcgccacccagccgatgcgccgcagcaccgggtaggcgcggtggaaacgctcggctcgggcgatgagagcctggcggaaggcatcgatgttcagcagcgcgcggacgagcgtgcgcgtgcggtatcgggccggcgtctgccccgcggctttggcgctggccgtgaccggctcggccagaagcaggtcggtcgcccccagcttctcgtcgaacatgaggttcaaattgaaatcgcagcgcccgatgcccagtccgatggcgaaccccaggggcacgaatagaagtcccagcagcaacatgtcgtgcaggtagtccatcccgtagaagccgccgatggcctcgcgcatggcgtcgatggagtaggtgaagggcagaagcggatgaatgaactggaaaaagtccggcatcatctcgatggggaacatgcccgaagagccgggaatctgcacgatgagcagaatgaccgcgatggccttcccgatgtgcctaaacgcgtaggccagcgcgaacatgaggttcacatccacgaacaccgtgagcagtcccgcgccgatgaaggccgccgggctctcgcactgaatcccgagggccaaatcgcccacgcagcagacgagccccatggccagcccgcacaccatgtagaacagccagcgtccgaagtaggcctgcacggcggtgagcttcggcagcccctcaggatcgacgcgcaacttcaccatggccatgaggatgaaaccggccacccacagggccagattcgtgaagaagggggtgacgccgctgccgtagttcttcacggggtacaccagttgcgtgtccagggccacgggcgcggccatgaaggcgccgatcttctccgggtcggccttcaaataggtggccagatccttcacggtggcggagttctgcagcgcggtcaggtcggtgagcgactgctccaggttcgtctccatggtgcccagggaatcggaagtggtggaaagcgaggtctcggaagaggtcagcgtgtcgccgagttgctccaaaatggcccgtgcttcggcgagcgacggggtcagcccgcgcagggctccttccagggtgccgcaggcttccaccagggaatccaagctggtcgtgatgtccggcagcacgctgtcttggaaggtggccgctgtggtgcgaatagtttcggaggccgattgcgccgccgtgtccagagcgctcgcctcggcttccagggagtcggccgtggaagccaggtcgtccgaggccgtgcgtagagcgtctgtggtggtcgtcagccgctcgttggcgtcgcgggcttcggagagagcttgggcgatggccgggtcggcgccggccgctccggcctgggcagtgaggtcgctgatgagcaccttgttgtcggccagcagcccctcggccgtggcaagggccgtattggtggccgctttggccgctgcgacatcaccgctcacggtgcccagcgcgcgctgggcctgcgcggcggcgctcgacaactgcagcgccccatcggtggcgttcttggaaagcgccgtcccgtactcgttcacggtgctccgcgccttcgcgagcagctccttcgattgcccgatggcctccagcagatgcggcacgtcgtcttgaagccccgccagcgtgtcgtcggcgcgagcgacggacgtctgcgtgtcgtttacggtgccgacgagcccttccaaggttgtgcgggtttcgctgacagtttctttggcgctgcgaacgccggcggtgaggctgccctcggcggcgtcggctttcgtttgcgcctcggctcccaccttctgggtcgtttccaccaccttctccgacaccgtcttcacgaagttctcgttgacggccgcctcaacggcgttggccgccgcgtcggttaccttgggcgcgatggaggagggcttctcgttcacgtagtagtcgatggtcggctgggtgaagtcgccggtgaacacgctggcgaaatcggcgctgaaatccttcgggatgacgagcgccgcccagtagcgcccttcgtagacgccgtttatggccgcttcggcgtcggtgaattcccagcccatctcgtggttgtcgtgcaactgggccaccacctgcgcgcccacgtccaaatgccccgtctcagggctgtcggcgccggcgtcctcgttggccacggctaccaacatgccggtggtgttgctgtagggatcccagttggcgacgaccacgtaccaggcgtaagccgacggcatgacgatcatgcccaaggcaatgacgagcgcgactgggttgcgcagcacgcgtttcacgtcccgtgcgaaaatggcgaagatcactccaaggtatgtccgcattcgcttcagcatatgcgcctgcttgcgcctttctctgcccgtttgctgaccttgcttgtaatgagaaaagtttcccacatccagctcttcatgctacggacagcggtggattgtcgctatgctgaaacgggtgctgcgtctgacgataaagcgacgcgctccggtcgccgcttgcccccgccgaacttcgttcctgctctgcggcaagggggcgaagcctcaccgaagcggttgcccgcgctgcccgtttgtcgccgtgttgtggcttgagttgagatgccgttgctttacactacgggcaagcaacgaagcgccgaagaaggcgccccgtgatgcaggccgacgcgcaggaggttgcgccgcctgtgaacctgaaggaaaggaggccctccgtggccgatcgcaacattgagaacgcgagtaccgaggtgccggagatccccgacgagctggagcgcgtgctcgtcttcgccctggacgaggccaaagagaagatcgagggcggggaggacgtcatccccttcaccacgctcgtcgtgaaggacaacttgttcatcgagtcgcacccgggcgattccgccgaggagtgcttcgaggcggccgagaagaacgtgcgcggcgcccgcggggccgactgctacgccttctgctacgacggctacatcgagaccgacgacggcgtgaaggacgcgctcatcgccgagggcggtgtgccgggcgccgatgagggctacgccatcgcctatctgtacgaggtggatgacgagggcacctataccttcgaatccgaggccgcctacatcggcgaggccccgaacttcatggcggccctgaaagagccggtcgcctacgctgacgacgagatcgacgagcgctaccgcggcgaagaggccgacgctgagggtgacgaggtcgaagaggccgacgctgagggtggcgaggtcgaagaggacgatgccgaagaggtcgaggaagttgctgacacggtggaaaaggccgaagaggtcgtggaagacgccgagtaacccccgtcgggctgcacgcttcagcccggttcacggatctcgtccgcatccgcaaccctactcccccgagttttctgccttctcggtagagaaaagtgcgattgtgcgagtctgaatcgctgattcggggttgtcgtgcagagaaaagtgcgattgtgcgagttctagcttgcttaaagctcgcacgatcgcacttttctttacctcagcttctaaaaactgtttctggagctttcaaaagaaaagccggcggaactccgatccagttccaccggcttgtgccaacagggttggcgggttgctcatcgtcgcgagcacggcgcttgtttcaagggcagcgccaaaaaaagaagtgaggcggcaaggaggggtgcctcgccgcctcggaggagggggtagcggcatcgagtgccgcattctgctttcaaggggattgaagcagagcgatggaagcaggggaacttccaaatcgctgaaacgaattataggtcaagacttgttttggtcaccataatgtgcttcattttccacgaagaacggtgccaattcgacggtgagtagcacataaccccttgtcagagcccgtttacccgcgccagaagcccgttcgccctccgagaattttcttcacattcaataagaaagttttcagattgcccgtctcccacctttccgaaccttctgccttccttcgttgatgcagggccctcggcatcggaaagcgccttttgaatggacgaaacgatgcgcagaatgcacgacggcgttatggacgaataagaatgtcaccccctggttgtttgattttgtcgccctctaggtcgtaggatgcacggcggtcgcaaaagatcatttggaaggggttcatgtcgaaaaaggtttctcccgcgagcaatcttgtatcatggaaggcaacaaattcgtggaaaggaactcaccatggccgatctcgcgctgcgctttggcaaggacatgatcgtcgtttcgtcgccgattcaggaggccctgcgtcgggctggcatcgagtcggcgcgcgatcaggcgctcgcgcttttggtggagccggaaaccatcgaggaggcctaccgcatggaaacggtggccggcccgcagtgtatggtcacccccgtggccgatttcacgccggcgcgcttggtggccgttggtgccgagggcaaaggcgaggcgctggccgaggcggctcttgcggtcgtggcggagttcaaacctcagcacacgcttgtggaaatcgctccctgcggtctgccgctggatcccgactccaaggcgtcgcttgtggaaaatcgcgaccagtacgcccgcgcggcgcaattgttcgatggccgcgctttcgatgcgttctttttgaacgggttcacgacggccgatgatctgaagtgcgcgctcatgggtctgcgcaaggtgaccgatgctcctatcattgcgtcggtggacgtgcagggcgacggcgtgctgacgagcggccggggtacctggcgcgaggccgtggaagtgatggtggaatacggcgcggcggtggccggcttctcgacgctggccgcgccgagccaggcgcgcagcttggccgatacggcccgcgaggcgttggaggcccggggggcggacttgtgtcttgcggccacgctgcaggtgttccagcgcgacgccaagcaacagggccccacggccgagaacccctactacagccccgacaccatgatgcccgcggcccttgagctgcgcgcggccggcgtccagttcctgcgcgccgccggtcaggcgaccccggcttacaccggtgtgctggccgccaccgttgcgggcctcgatgtggcaccggtcctgtaaggttctcgccgagaagccgcgtcgcccatgagcaccctgccataccaaggccgttgcgcctttgcgtctctgcatcccgcggtgacgttcggcttcttcgcgggggctatcgtgctttccgtggtgctcgctaatccaatctgccaggcgatatccgtttttcttgcggctgtgtgctacctgacgttccgcggtcgcgaagcttggcgcttcatcggggggctcgcggtggtgctgcttgtggtgacgctgtcggctccgctgttcaacacccagggcgctacggtgctctttcgctggtggggcggccggccctatacgctggaagcgctggctttgggtgcctctacggggcttatgctcgtggctatgatgctgtggttcgcctcttatcacctagttatgacctcggataagttcacgtatctgttcggccgcgctattccggcgttgtcgctcacgctcatcatggtgctgcgccttgtgccgagctatcgccgcaaagccgacgccctcatgacggctcgcgcctgcattgggaaaggcccagcggaaggcgcctctgtggcagcgcgcgtgcgcgacggaggcagcgttctcttgttgctgtcggccgacgctttggaaggtgccgtcgtggctgccggctctatgacggcccgcggcttcgggctgcgggggcgcacccatttcgcgctcttccgttgggaggcgcgcgatacggtgctggtcggagtgatggtcgcgcttgccgctggggcggtggttgcgctcgtgcagggagggttcgcggtcacgtacttcccgacaatcgtatggccctctgcgagtgcggccgtgcttgttggggccgtttgctacggcgtctttctggctattccggcggttatcaattgcggagggagggcgttgtggcgctattcgctttcgaagagctgacgtttcgctacccggaagcgcctcgcgatgcccttcgcgatgtctctgtggccatcgagccgggccagtttgtgctggtatgtgggcagagcggctgtgggaagacaacgctcttgcgtcagttcaagtcggcgctcgctccccatgggaaccaaagcgggcgggtgctgttcgatggtgtgcctctcgctgatgtgcccgaacgcgagcaagtggcccgcatcggattcgtcatgcaagaccccgatgcgcagatcgtgaccgacaaagtgtggcacgagctggccttcgtcttggaaagcctcggctgcgacgagcgcaccatgcgcttgcgcgtggcggaaatggccagctacttcggcatccagcactggttccataagaacgtgggcgagctttcgggcggtcagaaacagctgctgaacttagcgtcggtcatggcggctcgacccgatgtgctggtcctggacgagcccacgagccagctggatcccattgccgccagcgactttctggctacggtgcaccggatcaatcgcgagctggggacgacggtggttatgagcgagcatcggctggaagaggtgtatgggctgaccgaccgcgtggtggtgctggaggaggggcgcgtcgtcgccgacggggagccgcgggctgtcgcgggccagctgcatcgtgcgggcagcccgatggcgctggcgctgccggcagcggcacggatcgcttggggtgtggaaggtcggccgggccgccgcagcggggagggggcgccgtgcgatcgaccgggttgcgccgacggggagggggcgccgtgcgatcggccgggccgccgcagtggggagggggcgccgtgctcaaacagcattgaagtgcagggctcttcgagggccactgacgtttctgtatgcacttcaatgaactgcgcgcggaccccctccccgctgcggcggccctactcttccatagttgaagagggagcggctttgcaggttgaaactcccctcacggtgcgggaggggcgggcttggctggcggacgaggtggcggcttttccgccgcgtcgttgggcgcttccggcgggggaggtttgcgactcggcgcccgcgcgggcggcggtggagctgcgggacgtgtggttccgctatgagcgtgatggcgccgatgtgctgcgggggacgacgttgaccgtgccggaggggtcgttgttcgcggtggtgggcggcaacggcacggggaagtcgacgatgctgcgcgccatctgcggcgtcgcgcggccctatcgcgggaagatcaccgtgtttgggcgacggctgaaggattggaagagggccgagctgttccgcggcggggtggctatgcttccgcaagatccactgaaccttatggtgaagaagaccgttcggggagatttggaagagatgctggacggtcgcggcctcacggcagagcagcgcacggcggcggtgagggaagtggcggcgctgacagacattgtgccgctgcttgacgctcatcccttcgacctgtccggtggcgaggtgcagcgggcggcgttggccaaggtgctgctgaacgagccgcggctgctgctgctcgatgagccgaccaagggactcgatgctttcttcaaggagaagctcgccgcgttgctgcgaagcttgactgctcggggcacgacggtgctcatggtgtcccacgacattgaattctgcgccagctatgccgaccggtgcgcgctgttcttcgacggagacgcggtgacgaccaacccgccccggcggttcttcgcgtcgaacagcttctacaccacggcggccaatcgtataagccgtgggctcttcgaaaacgccgttaccgtggaagaggtggtggagctgtgccaaagctgatcgaagacgcgcgtcatcgcgcctctgctccttcgcatgacggtgaaggagcttccccgcgccccactgagccctctcgcgcgcgttgccgcgcccgcgccaaaacgctgctgacgattctcgcggcgctggtgctcgccccgctgaccgtagtcgtgggcatgggcattccgggcaacggctactacctctccggcacgctcatcgttctgtacgccatcgtgcccttcttcgttgcctttgaagggcgtcgcccgacggcgcgcgagatcgccgtggtggccgtgctcacggcccttgccgtggcggcgcgcgcggcgttcgtctgggtgccacacttcaagcccatggccgctatcataatgatcgcaggcatcgccgctggcccccagaccggtttcctcgtgggctcggtggcggcgctcgccagtaacttcatcttcgggcaaggtccctggacgccctggcagatgctcgccttcggcgtggcggggcttgtggcggggctgcttgccgatgctcgtgtgttcccgcgggcgaacctttcctggccgcgccgcgttgcgttggcggtcacggggttcgtgcttatcgcggggcttgcgggccccattctggatacctccacgttcttctacctttccacggcccctacgccggagctggcggcaacggtgtacctcgccggtttgccggtgaacgcgatccacggggcggccacggctctcacgctgctggttgtggcgaatccgctgctcgaccagctcgatcgcgtgcgtgtgaaatacggcttgctcaatcggtcgcgttagcgcttcctaatgatgaccaggaagataattgaccgtacgtcgaaattaattctgttcttttccggtgccgaaaaacacatcttgttcgattgcgcccgaacagtttcgcgagtactatatgtatccgcccttggaactacaaaacacaatatattgtggttccaatggtgaataacctgtggaaagccggtgagcaaataaaggcgaaaagcgggtttacccccttggtaattgcgaaaggtggcagtggagaaaacatcgccgcgtttctgcatgttgtggttggcaaggccgcgatgagcggtgcgaatacggtgcgagagccgcgccgaagaaaggatgtaggaagttatggtgaagaccatcatcaagcgcgacggacgcacggcggaattccatccccagaagatcgccgatgcggtggagaaatccttccaggcgtgcgcggccatgcaggatcgcgccaccgccgagcagattgccgccacggtcgtcgagaagcttgagagcggcgccatcgagggcaccccgacggtcgagggcgtgcaggatctcgtggaggaaaccctcatcgagtccggcttcgtgcagaccgccaaggcctacatcctctatcgcgccgagcgcagccgcgtgcgtgatgtgaactcccgcctcatccaaacgctgaaggacatcaccttctccaaggccgccgattccgacatgaagcgcgagaacgccaacatcgatgccgataccgccatgggcaccatgctgaagtacggctccgaatcggccaagcagttctacgagatgtgcgtcatcgatccgcgtttcgccaaggcgcaccgcgagggcgatatccacattcacgacatggacttctacacgctgaccactacctgctgccagattgagctgcggaagctcttcaagggcggcttctccaccggccacggcgtgctgcgcgagcccaacgacatctccagctacgccgcgcttgcctgcatcgccatccagtcgaaccagaacgaccagcacggcggtcagtcggtgtgcgacttcgattacggcctggccgtgggcgtgggcaagacgtatcgccgtctgttcaagaagcacgtggccgaggctgtcgatcttttgaccgacatcgccgacgatcgctctttcgctgagaatctgcttgctcgtgtggaaagcgagaccggcacggttgccagcctcgagatggatccggagttccgcgctgccgtggtggccgggctcgttgagggcggcgtcgatgccgctacggccgagcgcgtggtggcctacgccgagaagaacgcctcccgcgacaccgaccgccagaccttccaggccatggaggcgctggtgcacaacttgaacaccatgcattcccgcgccggtgcgcagacgccgttcagctcggtgaactacggcatggacacctcccccgagggccgcatggtcatcaagaacatgctgctggccacggaagagggtctgggctccggcgagacgcccatcttccccgtgcagatcttccgcgtgaaggaaggcgtgaactacaacccggaggatccgaactacgacctgttcaagctggctatgcactgctcggccaagcgcctgttcccgaacttctccttcctggacgcgccgttcaacgcgcagtactacaagggcacgccggagaccgagatcgcgtatatgggctgccgcacccgcgtcatgggcaacgtgtacgatcccgatcgcgaggtgacgcccggccgcggcaacctgtccttcacgtccatcaacctgccgcgtctggccattcgcgccaagggcgacatcgacctgttcttcgacctgctcgactccaagctgcagctggtgaccggtcagctggatgagcgcttcgagattcaggctcgcaagcacgtgtacaacgcgccgttcctcatgggccagggcgtttggatcgattccgagaaactctcgcccaccgacgagcagcgcgaggtgctgaagcacggcacgctgaccacgggcttcatcggtctggccgagtgcttggtggcgctgaccggtcagcatcacggccagtcggccgaggcccagcgcctgggtctggagatcgtcggccacatgcgttcctactgcgaccgcgtgtcgaaggagcgtggcatgaactacacgctcatcgccacgccggccgaaggcctttccggccgcttcgttcgcatcgaccgcgcccgctacggcgttatccctggcgtgaccgaccgcgactactacaccaacggcttccatgtgccggtgtacttcgatatctccgcctacgacaagatcgccctggaggcgccctaccacgcgctcaccaacggcggccacatcagctacatcgagctggacggcgatccgtccgataacctggaggccttcgagagcgtcatccgctacatgaaggactgcggcatgggctacggttcggtgaaccatccggttgaccgtgatccggtgtgcggctacaacggcatcatcgaggacgtctgccccaagtgcggccgcaccgaggacgcccacaaccagcccttcgagcgcatccgccgcatcaccggctacctggtaggcacgctcgaccgcttcaacgacgccaagcgcgccgaagagcacgaccgcgtgaagcacgacgtgccgacagccgagtagagcatcgcgcctctgagcacccgagcacaccgagggccgtccctgcgacggcccttttttgtttcgggtttcaatgtcatgttcaagccatccggcaagtagggtgcaaggacgctcctccacgggcctgtcgtataatggggccgcgatggaaaggaggtgcggcgtgctgtttcagttgatgaacaaggacaaggtggtggccacctacgaggaagagaaaaggctggatgactatcggtataccgagatcgagcgccttgatggctatgtgccctatggcttcgtagacatcaacgactggatcgacggtcgtcagatcgccaaacaccgcacgtccatcgagaggctcatgcgcgaactgggccttaccacgcgtcacgactttatctccatggcgcgttgccttgcgctcaccgataccttttggatgaagcgcgccgatgaggatatctcttggaacgacgtgtcgctgtaccgcaatcctttcgacgacgttatcgctcgcattgccttcgacggcacgggcatgtacggccggcagaattctcccacgtctcccgagttcgctacctcgggctccttcgccaagtgctgggtgcgcgagggcgaccaggtatcgctgctcaagcgtggttccgaaggctacgccaacgcgggattcgagccctattcggaagtgctggccgcagaagtgttgcaggcagcgtctatcgaccatgtgccctataccatcgagaattttcacggcaaacttgcgagcaagtgcctgctgtttacttcggaaaaggtgggatttgtgtcggcccatcggttctttgacggtccttttgatgtggaagacgtgcttgccttctgcgacgcgcacggcggcgacgaatcgttccgtgaaatgatcgttatggatgcggttatggcaaacgtcgatcgccatgcgggtaactacgggtttctggtcgataacgaaacgggcgagattctgcgcatggcgccgctgttcgatcagaacatggcttgtcttcccatgatgatggagcatgacgatttcgacgagtacctcagcatgatcggcccgaagattggtgcgtcgttcgtcagcatcgcccgagcgctcatcacctcggatatccgcgcgaagctggtggctctgaaagacttcgagtacaccgacccaggcatgggctaccctgcttggaagctcgcggctgtcaatcgctgcaaagatcgcatgatcgccgacattctcgcatagtcgcaagtattgcggccgcaaatgccacttcgaccccgctttggtaaggccgacggtggaggcatgaacaaggccgagcgcatgggaggcccgtaccatccgtaccttcccgacgcacttgccgactatgagcttcttctcagcccctcctgcgcaagcgcggtggcggatgcccaggaggctctggcgaggcttgagctttcgggctcgcgcatcgataccgagccgttggcgcgcatgatgctgcgggccgaggccgtctcctcctcgcgcatcgagggtcttgagatgccggcgggtaaacttttggaatacgaggagctcgaccgcctcggcgtcgatcatcgccttgatggtacggaggcccagattctcggcaatcttcatacgctcgtcgatggtctggcgcgggcggtggcgggctctccgctcacggtcgaggaggtgtgcgagctcaatcgtgtgcttctgaccggcacgcgtctcgcagagaggggaggggtcatccgcgccgaacagaactggatcggcggcaatcgcgtcaacccggtcggcgccgcctacgtgcccccctctcccgatgccgtgccggctcttatggaagacctcgtcgccttcgccaatcacagcgagctccctcccatcgccaccgctgccatagctcatgctcagctcgagaccattcacccctttgcggacggcaacggacgtgcgggcagggcgcttgttcaccttattttgaagaagggtggcacgacgcgcgtcaccgtgccgccgatatcgctgctgttggccaccgatcgcgagcgctacatcgccaatctcgccgccttccgcttcgaaggcgatgacgagaccaagcggcgcgaggcggtgaacgggtgggtggagtacttcgctcggacgacctgcgaggcctgctcccgcgcctccgcgtttgaggaaacgttgctcgctatcagggagggatggcgcgcgaaggtgccgtttcgcgagggatcggcgggcgcccagcttctcgacatcctcttaggaacgccggtcatcagcatcaagaccgcccaagatctcacagggaagagctacccagcggcccgcacggctgtgggcgagctcgccgcggctggaattctgaggcagaatgcgaagaaccgcaagagcggtatattcgtggcaggggacgtcgtggaggccttcaatgcctacgagcgctcgctggccaccatctcgggtgatacggcagcagagaagccgaatgggcccgtgccgcagaggggtgtgcggatgccttaagggtttgccttaaggcattgtcgcacgagtcaaacgacagtgatatctctccagttcagaaggcactacatagttttaacgacacgattttccggttttccataagcttgcccgataacgttgacacggggccgccccctatgatgccctccgttgccggtcgcaggggtcggcaccattgccgaagcaatccgagcaggagaagcaatcatgggaatccgggacattcaatcgcgtcgttcgtttctgatgggcgctggcgtggctgcgggcaacgtcctctacaccgacaatgctgacaccttcctcacctacatgaaagaactccgcggcggattcgacgaagcttgactagtacaaggtctcgggatttccctatgcgaaaacgtggacaaacagggatttttcctatgcaaaaacgtggtatcttggtaaattatcctatgcaaaaacgtggaagtccaggagagattcagaatgaaacgccaggctatcaaagaactgcaacgatggaaagcgtctccgcgcagaaagccgctcattgtgagcggagcgcggcaggtggggaagacctggctcatgaaggagttcgggaatacgtgcttcgagaggttcgcctacgttaccttcgacgataatcctcagcttgtggcggcgttcgggggctctctctcgccccaacggcttcttcccatcctacaggccgaggcaggcgtccgcatcgatgggagcaccctgctcattctcgacgagattcaggagtctccgcgggccatccagtctctcaagtacttcaacgagcagatgccgcatctgcctgtcgtcgcgggcggctcggctttgggccttgcccttcgccgcggcaagagggcgcaggagaaagggaggccgagaccgtcgtttcccgtggggaaggtgagcttcctcgatctgtaccccttgaatttctcggagttcctcggcggtattggtgaggaactgctagtggaactggtagagacgcttgattgggaagctatcgcgccgtttcacgaccgcctgatcgagctgctgaagcagtacctgttcgtcggcggtatgccggaagccgtgctcgcttttgccgaaacggccgatcctgcggacgcgcggcgcgtgcacaacgagctcttgcgctcctataacgccgatttctcgaagtacgccgacgatgccctggcggagcgcattcgccgagtctggcgggcgattcctgcgaatttggccaaggagaatcgcaagttcatgttctccaagatacgggaatcggctcgcgcgcgggagtacgaggacgcgcttcagtggctgatcgacacttcgctcgcgattccctcgagctgcgtcagcttgcctctatcgccccttgcgtcgcacgaggatggggatgtgttcaaaatctatttgttggatgtggggctgctcggggcgatgaacaatctgggagcccgaacgatactcgacagcgaggccttgttcagctcgttcaagggatcgcttgcggagcagctcgtcgcccaggaaatgcttgcgaacggcttggccggcgacagtgcggagcccgacagcaagcttcactacttcgtgaacccttccacgcgcaccgagattgacttcatcatcgacgggggcaccgaggctgtccagccggtgccgattgaggtgaaatcgggcgtcaacttgaaggcgaagagcctcgccgccttcgtcaagaagtaccagccgcctctcgccgtgcgcacgtccctggcatctccttcccaagatggcgccattcgggatgtgccgctttacgcgtttgggacgtatttccggcagcgcattgcaggaaggtaagtcgtggatgctttcagcggctcggaattttagcagccgaattgaagctcgttggcgcagatgtctcgggcgcagcggtagagcgcctgcacggcaggggagtcgggctggttggtggaaagctccacgctcacgcggtcgtccacgccgggaggaggcgtgaagggaacatgggcgagggtctcgtaattcggcgccaccattcgaatgccgatccccacggtatcgctgtgctgcaaaagcatgatttgcggcgccgactgtttccgaaggtcatgacgacgtcgatcttgccctccaccagggctcgttcgaaatcttcgaaggtaacgaaatcggtgaataccaactcgatatcagggcgctcttccgtaaagcgggcagtaagccgcggcatcaaatgcaggttcgcgttgtggtacagcccgatatgcaaccgctgtttctcggctccggcgcgctggcggcagacgcttacggcctcgtcggttagggcgatgagacgctgggcatagtcgtaaagcgctcgccccgcatcgctagggaaaacaccctggggggtgcgggtgaggatctcgacaccgatctcgttttccaggttgttgatttgtttgcgcatggcctgcggcgtcatgaagaaactggccgccgccttcgataagctgccgtcgtctacgacgcgcttgaagtagcgtagctgctggatgtccatggcctctcccctcgacagctcggtattgtaagcggtggatgtgcttggttgcaactatgagttaccacgcctggaacttttcgagggccgcgctgaaccacgggctcctcttacactcaggctgcgcctcgaatgaggccaggaggttcttcgcaatgagagaaaagaggaggaacatggaggagaaaaacatttcgtgcgcatcgcatgaagcagttgccgcttcccagcaaaagcacgggcttacccgtcgcagcttcctgaagtgggccggtgtggccgccacggtgccgacgcttggacagctggtggcttgcgctccgcaagcgaagatggcagatacgggcagcgacgatgcccctgctccggctttggaagacgagggcgagtggaagccctatcgctgcttccgcctgaattgctcggctagctgcatcaattacgcgctggtgaaagacggccaggtcgtgcgcgtgaagaccgacgatcggaatcccgattccgaagatatgcctcagcagcgcggttgcctgcgtggccaggcgaagatgaatcatgtctatggccccgatcgcttgaagtaccccatgaagcgcaaaaactgggagcccggcggtgacccggccaagatcaacggcgagctgcgcggcaaggacgagtgggtgcgtatcagctgggacgaggcgctggacatcatcgccgacgagcttacgcgcatcattggcgcttacggcaatgaggctgtcatgcgggctgggttgtatccgaaccctgtgctgacggctcttggcggatcgcagggcggatgggtttatccctcctccatgatgacgggttatcagaatttggcgggctattacggtgcctacttgtacaacgatcgccttgatattctgaacgccaagctcatcgtgctggacggcaacaacccctcctggagcgctttgggctatcccaacaaggtgctgttggatgccaagcgtcgtggggcgaagatcgtcggcatcaacccattctataactccggcctcggcgccatcgctgatgagtggattcccattcgcccggccaccgatgcagcgctcttcattggctgtgcctaccacatgattgaaaacgacctgcaagaccaggcctttctcgacacttacaccgtgggcttcgatgccgaccacatgtccgagggcgccgatccgaaggacaacttcaaagattacgtgctcggtacctacgatggtgtgccgaagacgccggaatgggcgagcgagatttgcggtgtcgagcccgaagtgattcgctcccttgctacggatatggctacgattaagcccgcggctatcttctcgtgttcggccgtgacccgcggcttccgcggcgaacaggcagcccaggcgttcttcacggtgggctgaatgacgggcaacgtggacaagtccggcgccatggtgtccgacatgtcgggccagatggtctgcaacggcggtagcgctctggtggccgtcggcggggaagggcgttccgaatacgcgacgaccgacccggttgccaacacattcgccctcagtgctgctgtggtgcccaacgacggactgttcggcgttacctcgcagcagaagtggcacgcggtgtacgacggttcctaccataacggcaagtggggacagcgcgagatcgatatccgctgcatctgggatattggccgtggcaacaagctcaacagtgagccggacacgctgctgggaatcaaggccttccgcaaagtggaattcgtcgtgtcctgcgattgtttcctaaacacgacggcccaatatgccgacatcgtgctgcccatggtcatgcagtgggagcacccggccaacttcagccatacctcgaaccgcgaaacattgacctattgcgcccacgtgatcacccccttgttcgaggcccgaagcgattacgagatcaatcgcgccctggccgagcgtctcggtttcgatcccgacgagttggagatcaccgaggaagagatcttcgccaatcagattcagggagccacggtcatcaaggaaggcggcttcacaaagaaggtgggctcgggtgcggtaggccctggtggcgctacgacggaagatatggtggatcccgacttcgagaagctgctcaccatcacggctgaggactgggccgagttgggcttccccgatcgcgagccgcaggagggtcgcatcccgcttcggcaattcttgaaggacggtatctaccaggtgccgcgcaccgagggcgacaactgcggctacatcgccctggaggctttcgtggaagacccggtggcgaatccgctgaacactgagagcggcaaactggaaatctactgccgccagttggccgaggtcgtggacatttacggctcctacagcatctcgcccattcccaaatacgagccgccgcaagaaggttacgaggccaccttctcggatttcgagaatcgggtgaagggcccctatccgttgcagctggagtcgcctcattcgctgggccatcactccagccagctagacaactgccgctggatgcaggaggcccacgcgaacgtggcctacgtgaaccccctggatgcccaggagcgcggtctttctcaacacgatccggtgaagatttacaacggtcgcggcgctcttgttcgcgccataaagatcacgccgcgcgtggtgcccggggtagtgctggtggccgacggtggctggaccgattacgacgaggagctggaagtcgacttcggcggtaatccgggcgtgctcaccagttcggatccctgcggatgcgatattcagccgtggaacaccatcaatgtggaaatggagaagtgggacggtccgttcgatcacgatatcgatcgtccgctgcgcgtgattgagttgggggactaacatgacacagtacggatttttcttcgattccgaggcctgcatcgggtgcaagacgtgtcagatggcctgcaagaacaagaacaacctgcccgtgggcaacttgttccgtcgcgtgtacgaatgggagcacggcacctgggaagtgggcgagggcgacacgctgcctgctccgtcggatttgttcgcttacttcatcgccatggcctgcaaccattgcgagaacccggcttgtgtggcggtatgcccttcgggcgccatgcagaaagatcccgacaccggcatcgtgtggaccgatcacgatgtgtgcatcggctgccgttcctgcgagaaggcctgcccgtaccatgcgccgtctttcctcgaggaagagggctacatgggcaagtgcgatttctgcaaggatcagctggagcgcggcgaagacccctattgcgtccgcacctgtgcgctgcgtgccctgcgctacggcgacatcgatgagctgcgcgccgaatacggcgagggcgatgtggaagcggtaccgctgccggcgaacacgacgaatccgtcgctggttctcatcccgcatcctaagacagaaatcatggacgtgacgatgggtgaggatccctcgctggaatacgagttgtagcaatttgcatcggtcggcgcgtcttctctctcgcaggcgtgtcgaccgtccttgtttgaagcgacgccccggcttcccgtcccctccccgggtgctggggcgccgctattcactgatgagaagcggaggtgctttcctatggtcgagattatttatcgccccgtgtgtggtagtgatggggccgctttgcgactccgatggacgaagaggccactatcttgctgaagacaattcaggctatgttgcagacagtcggttacacgttggtggccgagccagacgcatcgttcatagagcgttttggagtagaaggattgtgagacgagctgccctttgcggacgcgagtcaagaggttcgcgaggccgcggatcacctgcgcttgtggcggcgctcggttcaggagcggccagaagaagtcatcgacgatttgaagacggcctggtttcggagccttgtggggccggcgcgtcctatggccgcgccgtgggaatcctactacctcgatgagaacaaccgcctgttcacggattccacgcgggaggtgcgggcggcatttcgcgcccatgggttggagttcgagaagaagaaccgcgagcccgacgaccatatcggtctcatgctcagcttcctggcggtgcttgccggccgcgaggcggaggcggttgaagccggcgacgaggaaacggcacgctcgctgcagaaggatcaggcggacttcatcgacaatcatgtgctcacttttgtggacgagtgggcggccgccatggccgagaagagcgacagtgacttttacgccggtatggcgcttctagcctgcggcctggtgaaggagcgccgcgcccagttggaggagaagctgagcggcagcgaagatgctggtgcgacctctggtgctgacggcgaatgttgcaaggaggccgtctcatgcgcctgctaatcacgttggttgtcgtggccgttctgtcctgggcgctggcccggccgctgtgcagccattcgatgctcttttacctggcagcagtagcgcttgcgggcgcgggtgcgtaccttaccatagcgccgccggccgtgctgccgctgcgcgaggtcgccttcgtggtgcagaaggggtatgtggccttcgccctgttcgcggtggtcatgatgatgggtgtgctggacaagcgctcggccgtgcgccggcgcctgcagcccgtccgggcgcagctttccttgctgggaacgattctcatagccggtcacatcgggttctacgccgtggtttaccttgagattctgggaagcgtcggtgcgtccaaccccttcgccgttgccggtttcacgagtgccgtggctctggtggttctgctggttccgctggcggtcacctccatcgacgtcgtacggcgacgcctgggcgccatgccgtggaagcgcctgcagcggctcgcctatccgttcttcgcgctcattctcgtgcatgccggttgctacttggccaagccggtgctgggtggttctgcggacgcctccctcaacctggccgtgtacgctctgctgctcgcgacctacggtgttctccgcgttcgccgagccttggccgaccgccgcgcctccgagccggccgccagtgaagattcaacatcgggtgcagagccgcttctcgagtctgaatatgctgccattgcctagccgatattgaagggaatgaaagagagcgaccacctcttttaagttggtctatcgtaaagcacccagagggccgtctttgttgcggcccttattttgtttccgtcgcgcaaatgccacttcgaccccgaaatggtaaggccgaacgggggcgctcagccataattgccctcaactggcatttttctgccacttcaggccagtaatggcagaggcgtcacgggcccaccgaccatttcggccctcaactggcatttactcgtggaaaggggaaatgctcagcgtttggaagagtgcgcaggcagctatccggagcagctgctcggagcagccattgccatacgagtcaaatgacagtcaagtaagcgcttcgggcgttcggcgctggggttttaccaaaacttttcggaactgacggtggctctttacggatgttgctcagttcttttacggagcggggccatcatgaatgcacggaagcgacgttcccttgtgggtcgctttcgcgagttgaatggcccttgcgggtggtggttctgggatgccgacccgcgcgtttgaaaggaacgacgacatgaaagcattttcggtatcttctcgtttgccgcggcggttgcggcggctggcggcgcttgttggggcggcggctctgtgcggggcgctggcagtggcgcttgcgggttgcgcgggcgcatcggccggcgatacggccgcagcgggcgactcggccagcgcatctggcggcagcggcgcatccgctaacgctcccatctcggtgtactcccgcgaggacggctccggcacccgcggcgccttcgttgagctgttcggcatcgagcagaaggacgccaacggcgacaaggtggacatgaccactcccgcggccgccatcaccaactccacggcggtcatgatgacgtcggtggccgtcgaccccaacgccatcggctatatctccttgggctcgctggacgacacggtgaaggcggtgtccatcgatggcgttgcgcccaccgccgcggccgtgaaggacggctcctatgccatcgcgcgtcccttcaacatcgtgacgaagggcgagctcgccgcgccggccgccgacttcctcgcgttcatcatgagcaccgaggggcaggccgtggtgagcgacaacaattacatcgccatcgacgatgcagccgcccccttcgcctccaacggcgccagtgggaaggtggttgtggccggatcctcctcggtcacgccggtcatggagaagctggccgaggccttccaggcagctaatccccaggtgaccctggaagtgcagcagtccgattccaccacgggcgtgaacatggcgctcgatggcacctgcgatatcggcatggcttcccgcgacctgaaagactccgagaccggtgctggcgccgagggcatccccatcgctctggacggcatcgcggtcatcgtggcgcccacctcgtcggtgagcgacctgacgagccagcaggtgtgcgacatctataccggcgcggctaccagctgggccgacgttgcctaggcggcccggactatgctgttctccctgctgaacgtgccgccagcaagtgcatcgacggccgccggctccgggagcgccggagcgcccggagccggcgcaggtctcgcagctgccggtgcccctgcggccgcccgcgtgcccaagcgccgcccgcgtgccctacgcgaagcggccgcccgcgctctctttgccgcggccgcggctctctccatcgccgccgtggcgctgatctgcctgtttctgctggccaacggcgtgccggccatggccgagatcgggctgccggaattcctcttcggcaccacgtggcgcccggccaacgacctctacggcatcttccccatgatcgtgggcagcctgtacgtgacggccggtgccatgatcgtgggcgtgccgggcggcctgctcacggcgttgtacctctcgcggttcgctcgcggccgcacgggctccttcctgcgcagcggcgtggagctgctggccggcattccatcggtggtctacggcttcttcgggctggtcatcatcatgcccttcgtgcgtctgctcgggccgggcacggggctttcggtgctgacagccagccttatcttaggcattatgatcctgcctaccgtcatcaccgtggcccaaagcgctttggacgccgtgcccgctcgctactatgaaggtgccctggctctcggcgtcgatcacgagcacgccgtgttcaaggtggtggccccggcggccgcctccggcatcatggccgccatcgtgctggggctgggacgggccatcggcgagaccatggccgtggtcatggtggccggaaacatgcccatcattcccgactcgctgctgtccggcgtgcgcaccatgacggccaacatcgtgttggaaatgggctacgccgccgacctgcaccgcgaggccctcatcgctaccggtgtggttctgttcgtgttcatcctgctgatcacgatgctgctcaacgttattcggaagagaggtgaggcgcgatgagcgatggcttcaacctgcgcttgcgtcgcccgcggccctcggtggtcgcctgctcgccgaccttgggagccctgggtgccgtcaatctgatgcccgcttgcttcgccaaggaagatgccttggaggcccgcatcgcccgctcgtcccgtcggcgccgcgcggtgtcggtgctgctgcgctggctcacctatgccgccgcaacggtaaccgccgccgtgctgctgtttgtggtgggctacatcctggtgcgaggcgtgcccgcgcttacccccgatctgttccagtgggaatacacctccgagaacgtgtcgcttctgccggcgctcgcctcgacggtcatcatggcgctgctggctttggcgctggcggtgcccgtgggcgttggtgcggctatctacctggtggagtacgcccgccgcggcagccgctttgtgcgcctggtgcgcgtgaccgccgagacgctgcagggcattccctccatcatctacggcctgttcggcatgctgttcttcgtgacggcttgcggctggggcctctcgctgctgtccggcgcctgcactctggccatcatggtgctgccggtcatcatgcgcaccaccgaggaggcgctcatggcggtgcccgattcctaccgcgagggcggcttcggcctcggcgccgggcggttgcgcacggtggcccgctgcgtgctgccctcggcggtgcccggcatcctgggcggcgttattttggccctcggccgttgcgtgggcgaggtggcggccttgctgttcaccgccggcaccgtggcccaaatccccgacttcggcggccagggcatcttcgccctcttcgactcctgccgcaccctggccgtgcacatgtacaccctggcctgcgagggcctgcacgtgaacgaggcctacgccacctcggtggtgctgctgatcctcgttcttctgctgaacgccgccatgcgcgtggtggcacagaaaatggaagtgagcaagaaatgacgagctttttgaaagaactcgcgaaagagacgagcgtccccgcggcagctgaggttccagaggccgcatccgctcctgcgaagatggccgtcgagcacctcaacctgttctacggcgacttccaaggcctgcgcaatatcaacctcaccttcccggagaaccaggtgacgacgctcatcggcccctccggttgcggcaaatccacgctgctgaagacgctgaaccgcatgaatgatctggtggagggctgtcgcgtggaaggttcggtgctgctggatggtgccgatgcctaccgcaccctggatgccaccgatctgcgccggcgcgtgggcatggtgttccagcagccgaaccccttccctatgagcatctacgacaatgttgcctttggcccgcgcagccatggggtgcgcgccaaggccgatctggacatcatcgtagaggagtcgctgcgcgcggccgccatctgggacgagctgaaagatcgcctgaagaagaacgcgctcggcctgtccggcggccagcagcagcgcctgtgcatcgcccgcgccctggcggtgcagccggaggtgctgctgctcgacgagtccacgagcgccctggaccccatttccacggcgaagattgaggagctcatcggccagctgaaggagcgctacacggtgattatggtgacccacaatatgctgcaggccctgcgcatctccgacaagacggcgttcttcctgctgggcgaggtggtggaagccggcgacaccgacaccatcttctccgcccccaccgacccccgcaccgccgattacgtcgctggccgttttgggtagcggcatttccgtttccataggggctgaccttggtcagccctcgcgggtgggttgcgcccgcatggcaaaagaggggcgaccaaggtcagcccctacggagggttgggcttaacggtcggtagcgccgcacgattttacattcattttacgtggctcttacggcggctgctcaatggggcttcatactccttccctgctgagacgagcgcgggccgcaagggtgcgactcgtcaacgaacgcggctcgcaaggggcgggtcgccgtgagaaggagacgcataggtggaagaactgctgcaaatcgggctgggactgttcggcggtctggccctgttcctgtacggcatgaacctcatgagcagcaacctgcaggaggcggctggcgaacgcatgcgtgccattctggccgccgtgacgaagaacccctttttcggtgttctggctggtgcactggccacggcggtgctgcaaagctccagcgccaccacggtcatggccatcggtttcgtggcggccggtctcatggggctgcgtcaggccatccccatcatcatgggcgcgaatatcggcaccaccatcacggcgcagatcatcgccttcaaactgtccgattacgtgctcggcatcgtgctcgtgggcttcctcatcatgcagctcgccaagcagggacagatgaagtacgtcggcaccgccgtcttcggcttcggacttttgttcctcggcatcgacaccatgggcgctgtcatgaagcccttggccgagaaccccgtgttcaccgacctgattgcccaggtgacgggcgtgccggtgctcggcgttttggtgggcaccctcatgacgctcgtggtgcaaagctccagcgccaccatcgccgtgctgcagaacttcgcttccacgccgggcgccgatggagcgagcatcatcggcctcgacggcgccatccccatccttctcggcgacaacctgggcaccaccatcacggcgctgctcgccgccatcggccagtctcgcgacgccaagcgcgtggccctgtcccactgcatcttcaacctgtcgggctgcctcttgttcgtgtggctcgtcgggcccttcgcgtcagtggtggcggccattcccccggccggccccgaggtggaagttatcgcccggcagatcgccaacgcccacacgctgttcaacgtgaccatgaccgctttgtggctaccgctggtctcggtgatggtgaagatcgtcatggcgattctccccgagaagccgcgtcgtccgcgcgacccgctggtggacaccctggagacgccgttggcccccgacgcagcggccgcctaagccgcccttgcgaccgacggcgctatcccgcaccgtcggtcactttcgcgctggtttccggttgcgcggaggtgtcgctggggcggcactgggcggcactgaggcggcgctggggcggcactgcctgttcggccggccccacggctctttgacgccttgccgcccatctctgcgtcgcgcggctgttgcgctacaatgaccgcgcacctgttccagaaaggattcccatgagcaaagctccgctcatctattacgtggaagacgacgagcatatccgcgacctgactgcctatgcgctgcatcaagcgggtatggaagtgcgtgcgttccacgatggcgacggtcttgttgagcggtgcgcggtcgagccgcccgatgcggtgctgctggacattatgctgcccggcgacgatggcctcgttctgctgcaggccctgcgcggtaatgcggcgacggagaaccttcccgtcatgatgctcacggccaagggcaccgagttcgacaaagtagtggggctcgatgccggtgccgacgactatctggcgaaacccttcggcatgatggaactcatctcgcgagtaaacgcgctgctgcggcgcgcgagccgtccgagccaaggcgccgcagaagaggtggcggagcccagtgaccttatggccgtcggcgcgatcaagctgtcgccgtccgcccgcaccgtggtggcgaatggccgggaagtcaacctcacacgcaaggagttcgaccttctgcgcacgctcatggagaacaagggccgtgtgcttacccgcgagcagctgctcgagcaggtgtggggcgtaagcttcgtcggcgagacgcgcacggtggacatgcacgtgaagacgctgcggcgcaagctggccgaggcggcccccggctccgaagaggctgttgccaccgtgcgcggcgtgggctatcgcttgaagaagaacgcctcatgagtgccaccaacgcatcgcgcaacggctgcgaggccgaaactgctgaagtgccggtagccgcgcctgaggtagaggctgacaagccggcgcgctcgagatcggccctcgcgcgcaacgaagagctggctcgcgccgagaagatgcgccgcgaattctcggccaacgtctcccatgagatgaaaacgcccctgcaggtgatctccggttatgcggagctgatggccaacggcctggtgccccctgaggacgtgccgcgtttcgcgcagctcatctacgaggagtcacaagccatgcgcgcgctcatcgacgatgtgcttattctttcgcgtctcgacgagatggcgccgggcgacaacgaaaccgaggcagtgaatctggaagaggtggccagtcgggtggtggggcgcttgaccaagctggccgccgatgcgggagtgaccgttggcctcaaggccgaaccggtcatcattcggggcaatgaaaccctgctcaagcagatgatctacaacttggtcgagaacgctatccgctacaatcgcgaaaatggtcgcgtgttcgtggaggtgtacgcggaggacgttgccggtgcggaggatgcgtctggtagggggtttgtgcacggcgttgtgccgggcgaaggcgatgctgaggagggggtcaaggcggctgctccgatgcgcataggcgtcatccgcgtgaacgacacgggcgcgggtattcccgccgacaagctggagaaaatcttcgagcgcttttatcgcttggagaaaagtcgctccaaagagctgggcggcacggggctgggcctcgctattgtcaagcacgctgctctctaccacggcggcgaggtatccgtagagagcgaagaagacgtcggcacccgtttcaccgtgcggctgcccatcggatgacaaagatttccaaaaaagtggtgaccaaaaacgcgaaaacttttgtcggtcatggctccaaaaggtgctcgcctaccagttggagggcttttccagcgagaacgaggtgggctgccattccacgacagagccggtgcgtcgggtggctggcacatcgatcaggcgctggttggaggagccgcaccacttcagctcgagggacttgcgcgactccacgaaggggccatctacgagcacgtcgatggaatccagcaggtctcccacggccaagtcgtcggcgatgtcggcgagagccccactgaccatcgcttcctcagggttctcgtggagcgcctcgccgccgagtgccccgatccggcgatcgcgctcggcgcgggctttgttggctcgtttcgccagatcttcatagaggtaaccggaataactccagactccgtaaccattgcgtttcagctcggccgccaaggctgcgcaggccttcggctgttcgaagggctcgccgccggagagggtgacgtcgtgcacgaggccgttggcacgaatatcggccagaagggccgcgagggtcgtttcggtgcctccctcggccggttggctttcggggttgtggcaaccaggacaaccgtggctgcacccctgcacgaacacggcgtagcgcaagccaggtccgtccacgatggagtcgggcacagtaccgtacaacgagatggtggtgttttcgaagtcgttttccatagccgccattgtagcgcaccccggcccgggcagccgtcgcctgcgcttctgtcataaagttggcacgaccgtaaagcccattcattggatcccaggcagatgagtgactttatcgacaagcccgatcgggccgtttaggggaatattgttacgaatacagaatttgtaacctttatactcatgtatttcactcaaatgtgttattttttcccaacacgtaacacgaaagagtggaggttgctatgcgtcgcacttcacagcgcgcatgccgcgatgaggcctttaaggcgcatgtaattgagtattggaacgagcgcgcaacaacgtactcaaatggaatttgggatgagctggaaggcgcgcagcatcatgcttggattgacgtgctgcacaacaagctggcgcttgatttcttaggcgctgagggagaagccccaaaggtgctcgatctcggttgcggaccaggtttcttctctatccttctttcggctatgggctgtaccgtacatgccgttgatgagagcgagcaaatgctgcgccacgcgcaagagaacgtggcgcgcgccggtcgccccgagcgcgttgcgtttattcggagcgatgtctcgtcgcttccgcttccgtcggatacctatgatgcggtggtgctgcgcaatgtgacctggctcatgcgcgatcccgtagctgcgtatcgcgaatggcagcgagtgctgaagccaggcggaaagctcgtggtcttcgatgccaattggtacacctatctcgccgatgccgctcttgacgaactgcgtcgatcgcaccaggaggatcgggcggttctcggctggagtgaaaacgcatttgcgagcgccaagcaggaagaccgttgtgaggccctcgcggcgcaactgccgttgacttatgagaatcgtcccgcttgggacgtcgaggccctctcttccatcggcttcaaatccgtggccgccgacgaagaggtgtggcggtcggtgtggacaaaaggagagcaggcattttatgccacgtctccgctgttctctgtcgaggcagtcaagtagtgcttgcgatgcggcagacagaagaaggcttcccgcgctccagcattcttgcggcgcgcgccaaacgctcgcttcaggcgcttggcggggccgtggtggttatctttctcgtgactcttcttgccttcgtgctctcctatctttctcccacggatgctgctgtgcattcatttgcggaaatgggagtggctcccaccgaggagcagctggctgccaagcgcgcggaactaggtcttgaccagcccttcatcatgcagttcacttcctggctctcccgggtgcttcagggcgatttgggcacatcctatcgaacgggtgccgaagtttcggctatgcttatgtctgctatcccctacacgctggtgctttcatttacgtccattgcgctcactcttgttctttcggtgccgctgggcctcgtgtgcgcgtatcggcgcaacggagcgcttgaccatgtcatgcgcgtcgtcacctatgtgttcaactcgctgccctcgtttttcgtcgcgctcttgcttctctatgtgttctcggtgcgcttgcatctgttcgatgtcatggcaacgcgcgattttgcgggtgtccttatgccgacgctggccatggcgctgcctctttccgcatggttcatgcggcaggtgcgtgcttgcgccattgaacagctgggacttccttatgttgatggattgcgggcgcgcggggtgagtgatgctcgtattctgtgggtgcacgtgctgcggaatatgggcgtgcctttgctcacgctgattggcgtgtcgttcggtcttttgttgggcggatcggctatcgtggaatccattttcaattggccaggcgtgggtttggcttctatcgaggcagtgagcgcccgcgactatccgtttatcggtgcgtatgctcttgtcatggccattttgtatttgatcctcaatgcattgatcgatgcctcctaccagctgatcgatcgacgtctgaggaagaagagctgtcatgcgtagaggttctgcgcgtacgcgtttttttgtcatggtgggcgtgatgctttcgtatgtcgcagtgctcatcctgcttcctcttgctattccctttgatgtgaacgctacggaactgtcggcttccctgacaccgccaggtagcgaggggcatgtgctcggatgcgattcgatgggccgcgatgttctggctcgcacgctggcgggtggatcagaatcggttcttctgggccttgccatcatggcggtggcagttttggtgggctgcgcggttgggttggcagccggattttttggcggcgcggtcgactacgtgctctctcgcgttatcacggcatttcaggcatttcccagctttgtgctggcggtggccattgcgggcatcttggggcaaggcacaatcaacatgatcattgccattgccgctgtgtactggacgcaatatgcgcgcctgactcgcagtatcgccattgccttcaaacaatcggaatgcgtgagcgctgctcgtatgtgcggcgcgcgggcaggagccctcatgatgcgttacttcgttcccgaaatggcggggcaggttgcggtgttgtccgctgtctcgatgagcgacatcgtgctcaccatggcggggctttcgtttatcggactcggaccggcgcggcctaccaacgaatggggcgccatgatgtccgaggcccaggccacgttccagtatgcgctatggtgcatgctggtgcctatggcggcgctgtttataactgttgttcttttcaatttacttggcgataccttgcgtgatgcgctcgatgtgcgcactcaggcggtttcgaagcgccgttttctcagacggcgcgataaaagtgcgaattccgagcaagggacaagtgctgttcgatcagagtgtttatcgggaaaacagggtaaacacgaggatgaggaaaggaagtaaaggttcatgaagaaaagacacagttggaaaaggaagctggttgccggcgtatgcgccgtggctcttgctgcgggcatgaccggctgctctgcctcggacacccagggcgaagagagcgccgctaacagctcaactgcggccaatgatgctgcagcgactccggcgaccaaagagctgcatgctggctctaccacctatttctatgccgaaagcatggatccggcagccgactgggatagctggtatctgtgctactacggcatcgcggaaaccctgttcaaggtgagcgacgatttgacggccgagccgtggctggccgagagcattgagggagatgacggccagcactggacgttgaagattcgcgaaggcgtcacgttctctaacggcgagccggtggatgctgcagcggttaaggcggcatgggagcgcacctataccgagaacagccgaggcgccgagacgttggcaattgacgaaatgactgccgatggccagacgctttcgttggtgacttccgaaaaagttcccggcatcgagaatattctgtgcgacccgctactgtgcgtgtactacgtgggcgatggcatagactatgcgaacgacacgccctgcacgggcccctacaagaaggtcgaatttgttgccgaagatcatatcgtcatggagcccaacgagacgtactgggacggcacgccgaagctcgatcgcgtgacgctcacctccttcaccgacgacaacacgcttaccatggcaatgcagaacggtgaaatcgatgctatcgctatgccgtcggcgtctgcgcgggcaactttggcgcagggcgattaccaggtgttcagccgtaccacctcgcgtgccgacttcatccgcatgaacatgcagcatgaggttattcaaaacgatgccgtgcgcacggccgtggcctactgcatcgatcgcgacggctacgcgaaggtcatctgccaggattcatctgttccttcgtggggcgtctacagtgccacgctgccgttcggaggcaccgaaggcctgaaggtgaacgtaagcgagtgcagcgttgaggctgcggcgcagacgctcgaagatgccggcatcaccgacggcgacggcgacggcgtgcgtgagctgaatggcaagccgattgaaatcaacctgtacacgtgcaccaactacgagcgcttcactcagctggccgatgacatgcaatctaagctgggtcaggcaggcattaagctgaacattgtgccgatcgactacttcattgaagacgccgagaccttcgcgaaagatgatcctgatatggttttcaacagcatggccatggctcctactggggatgctgcgtactttgccaaacagtgcttcgccaccgatgcctcgagcaacctcggaaagtactcgaatccgcaggttgatgcgctgatcgaccagctgaatgccacgtacgacatcgacgagcgcaatgagcttgcgcgccagatcgcccaaatcgtgctggatgatgtgccctgtatcttcttcgcgaacaccgatgcgtccgttatcgctgatcccggcgtatcgggcttggatgcctcgccttccgagtactattttgtgacggttgatgctgacgttgcgtaacggcaccgacatagcgttggacgtgcaggacctgagtgtttccttcgggggcgctcaggccttgcgcggcgtttctcttgcggtgtgcgcggggcagatcgtgggcattgtgggagaaagcggctcgggaaagagcacgctactgcgggcggtcgcgcatctgctttcgccgacggctgccgttgagggcggctctattgtgttcgaaggcgtcgatatcacccatgctcggcgcaagcagatgaaccggttgcgtgggacgaagctggcgtacctgttccaaaacggcgagcagtcgcttgatccgctgttcactgtcaaacagcagttcgacgaagtgctgcgtgctcatttcgggtgcgtgaacgaggtgctcgagcgcacgcttctgcgccgtatgggctttgacgacatcgaacgagttttaggggcgctgccctctgaactttcggggggtatgtgccagcgtgtggccttggcttttgccttggcaggttctccatcgcttcttctagcagatgagccgacgagcgcgctcgacggggacgcccagacgcgggtggtgaacctcttgcgagacttgaacgaacgcgagggcttggcgattctgcttgtcagccacgatatagatgtggtggcctcgcttgccagctatatggtggtcatgcggcagggagtcattcgcgaagaaggcccggttgaccaggtgatgaatcaccctcaagatccctacacgcgcgagctcatagcggctattcccgctatgccagaaggcaagggggatgtatgcttcttgtagcaaggggtttgaataagacatttgcgcaaaagggcgaagcggttttgcgtgacgtttcgcttgaaatcgacgccggcgagaaggtgggtatcgtcggacgtagcggcagcgggaagagcacgcttgcgcgcatcatcgctgggcttgagacagccgactctggtacggttgccttcaacggggttacacgagtgcagcacgagagcacgacgcgtgcccagaagcgtgctgcctatcgtgcgtggctgagcatgcagatggttttccagaatcctgaggcgtcgttttcgtctcatatgaacattggccgtgccgtagcggagggcattgcgtatcacccccaattcgaaaaggttgatcgcaagatgctggtggacaaggcgctatgcgaagtggggctcgatcccgccgtggcgagcaagcgtgcttttgagctgtctggcggccagtgccagcgtgcagctatcgcgcgagccatcattagcaatccgaaactcatcatttgcgatgaatgcacgagcgctttggatgtaaccgtgcaagcgcgcataatggacttgcttgagcgcttgcaacgcgattacggcatggccttcatgttcatcagccataatcgcgcgcttgtgcagaacttctgtgatcgtgtgtattcttttgatcgcgcagacggcgaaggcgcttaggccaacgatcttttcgcgggtaccacaaggcgcattcctcagcttgcacaaggatgggttgctagctcggtcgctagctcacgtagacccagcgaacagcatcgccctcgtggaggatgtagttgcttgcggccgtcatgggcatggtgccgttaacagtgtaggtccacccgctggtgccgcccatcatcttctcggccaggccatttacggccgacacataggaggatgagccctccagggaaagccccgtggccgcgagggcgtcgtcggccgtggcgccctcgggcagcttcagcgtggcggaagccatagtggcgggaaagcccaggctcgcggcagcggagctgtcgacgacgacggacacggcgatagaggccggggcaggggaggggcttgcgtctgatgagcccaacgcacccgaagaggaggaaggtgaggaggctgaaggcgcgtcggccgaacctccggagttgcggtcgtctccggctcctgcactgcttccggaggaggatccattggcggcgttggcgctccctgcagaggcgcgcgaatcgccgcgcccgttgccctcggagctgttgtctgcggctgcaccatttgcagaaggcgcagctgttgaggcgtcggcggtgcctgctccatcggaggtagccccggtctcatcattgacggacgcggcgtctccgaaggcgccctcggtgcctgcaccgtctctgtccgcgccgtcttcgccgccgaaccctccggcgaagaggctctgggtggaagacgcctcaccttcgggaaaagcgccccctgtgcccggcagaatcccaggtgcgaccagcaagagcaacgagagcgtcaggccagccaaggagatggcgcccagggcggctccggcaaaaagccgccgtcgagatcgagtttctcgtgtgcattcttctctggctccgtcggccatcgcggcgccgggctggccgaccgcgctcgtgggccgggtgtctggggacgaggtcggctcgagcgaagctgcgagaggggtgctgcccagggtcccgcgcccattggaagcggatgggcgcggggttgtgttggtagatttatcaggcatgatcgccgtcttcctcccggcgcttgcgggcgcttagaacgaggtagagcgctgcggccaggccggcggtggaaagcagcgcgagcgtggcggcgggaacctggttggtgcttgcggcgtcgggctcgctgccgacggttgcacctgtatcggtgtccgtgcggttgacattcatgccgctgacgtcggtcaggggtaccggactgtccgccacggtttcggccgcctcggttgcaggagttgcgccgaccgccgcatcggtttcctctaccgcgtcggtacgggccgacccaagggagagggtggtgctgaagggcgcgcggcttgaggtgcttcctttcgggcgaatgcccgatccggcgccgctgccgcttccttggccgttgccggtgctcgtgctgttgctggttcccggtttgacggggttctccgactttgtcgggttgtctggcgtttcagggtttgtgggcttgtcacccggccgctgtggaagcggctggtcggacaagtccagggcgaacaaggtgcccgaatcgtttacgtaatagaacgtgcccgcgccgccataggccaccgaggccatggcgtagttgtgcagtcccgctggtgggtcgtacaccagctgcgcctcagcgttgcccagccggtaggcgtacacgccgcctcccgaagtgtagttcggccattcgccgcccgcgccgttgcaggtgaacagcgccaccacgccattttcgtcacgcaagagaagaggagtgctcttcacctcgccgggcaatggagctccatctgcggcggttacagtagccaacacgttcagcgaatcggcatcgatggcggcgagcagcccttggtgcgcgcgacttccacccacgtacaacacgccattggcaaaggtgggcgtagaagttgagtagtcgccaaacgatacggcccctacctgtgtcagcgctccattggccccgaccgacaccttgtgcagagtgccgttggccgtgaccacgtaggcgaacccgtcgacggtcaccacggtcgaacgcacgggggcacccagcgcgagagtcgccgccggctctccgtctgtcgaagcagccgaaacggctcgcagcacgccatcgtcccctgccaccactaggtaatcgcccactgaagccgctcccgaccagtagtagccagcatcggcgttctgcctcatccagcggatggcgccggtgcttgcgttcacgcacagcgcccagccctcgtaggtttgcgaccagtcggctgctgccgtgaaggcgtacaggtagtcgccgctcacggtgagggtggaaagcccctgctgatcataggtgaccgatgcagccccgccttcaggccccgaggccacctcctgcaccgctgccggcagcgcctcggtgagccaccgcgtctgcaacgtgagggccgaaagcgcctgcaagcgcccgttgttcagtggcaccaccaccagacccttcgcgtaaatgggccggcacccgtaggccgtgccgtctgctagcggcgcttcggccaccaccgcgcccgtgcttgcgtcaagcttcaggagccgcgaaccggtagcgaagaacacgaacccgccggccaccaccggctccgaccacgaggcatagccgccctgggcaaaatcgtacgtccaccgcgacggcaagctgcccagcgtggaatcaaccgctatcggcgctcccgtagctgcgccgaaggatccccaatccgctgcccattccgctgcgggcgcgttgggcttcaccgcgatgtcgggtgctgcggcagctcccgttgcatctacataaaccaactccagcacatctccgtcttgaggatggtgcccgctggccataacgtcagcatattctccgttgataaggaacgaccagtacgaccagggcgcactagcgctcatagccagggtttggctgcggtcgggggtcgtgatcgagtaagggcaacctccgtcaagactatagaagtaccccgcttcgtcgagaaggtcggcaaagatgtcccacgcggaagtcttcgtgctatccgccacgacatactcgcgagaaggcacccaatccaccatttgataagtatctcccacagcgtgtggtgagacgccgacaatccgagcagtcaccgtagccgacttcgtctcatctggctggggcggcgtggggtcaacggactcaacggcttcgccttgggctacggccttgcgcatggggccggcttccagagtgttgaagccggcggaaaccagacatttcaggtgtttccccacataggaatcgggaatgacgaaagaggccttatgcacgttctcgtcggcgacctcgacatattctccgtcccaagcgtcggcgatgtaccaggtataggtaagctggtcgggtgatagatacgcgccggcagtgccagcagcggaggtctcgcgcgccgttacgccaatggtgcgcccggaccagaaaatgaagttgtcgtcttctggcgtctggtcgagggcggcatagtacagttcgcgcgctccggcctttcggaagggaccggcagctgacgtgttcgcggaggccaccgtgttgtcgcccgcgcacgccgtcaccgatacccaacagccttcgagggagtcgggtacggtgaagctcgattccgttgcgccttcgatgacgtgccagctgctgtcgctgaagccggcgccacccggcttttcagccgaccagcgccaggtgtattcaacgcccgtgttaagaggagcgttgttccaatagtcgcccttataggcctgggcctgcagcgtgcatccaacttctttcgaaggcgacgcattcaggatgctcactcggtaaagcgtcgccacgccttgcggcaggacttttcctggttcagtttcacaggtgctgctgccaggaacgccgttcttcgctgtagcaacgaccttgagatagcgcccgacgaagtcttctgcaacaacgaacgacgccccttgggccacttcttcgaaggtgccgtacggcgaatcgcttacctgccaggagaagacaacatccgaagctccataaagagtataaggatcctcgaagctgtaagcgcaggcttcgagtgtatctccctcattgcaatcgggaacgctttccagttcgttgccaaacccgctcccattccatgaaagcagaacgtaatcgagcttgatctgtttaacgggggcctccggggctatgattgggccgcaggccgtgtccgaagtgtactttgtcgccttcttgggcccgctgatgaccgtttcgtttgaggtgatttggacgcgcagatattttccctcgtattccgagcagaggttgttagtgagggtgagcgccgattccgtggcgccttcaaggggaatgaaggaatctagatcgatgctagagccgttcttgtccccgacaaaccattggtagctccaggaatcaccaggttgcagaagagcattcttgtctgcccatgctgttgcatgcaaggtcagtccgggtttcataccattgttgaccgaataggggttgggcttggtgggcgcgctgtctttcgtaattgtcacgaaagacgaatcgctgaaggtggctccttcgtcgctcgcttgcggctccgtttcgggtgcttcgcttgtcgtggcgctgtctgcaaacgccttggacgcgagggcttccgtcggcgcgtcgccggtctcgtcgccccaggccggcaagggcgtgagggtgagggcgagcgctaaggcaaggaacagggataagagtcgccgtgaccacggctgaggggcgtacgccgagcgcacgcgggggtttccgaccatgcggaatcacctacttccagggctgtcgtgcgatgagcaggtgttccgacttcgcgtcttctgggccatttggcgtgcccgccatcgccttctcgcgccgcgttgcccgagcctgtagaaggcgtgggaccggtttcgaaggcgagcgaatgccccatcggcttttacggttcctggtagagcaggggagtcacacccctattcccctcagccgcgcgtcttcggcaacggcgactggcgcggtgccccgcgcaacccatcaatgccaatgccgccattgtagcatcatcgctgagcgtcccgctaagcatttctcggatcgagcggtttggtgccgcgcggggcgatcgccccttccgctggcaaaatgaggtggtttggtaccgcacggggccgtcgcgcccctgtcgctgacaaaagaggcggtttggttccccgtttcaagccaacttcgccgatttggtacccacgggccgaagaaaccccaggtcacaaaaacgacaacgcgctttctcggataccaaaccgccgatcttgctaaaggccgggtaccaaatcggccatcttgccacgaaaagataccaaagcccgctattctgccagcaaatgcgcgccgtcgggtaccaaacctcgcgttctgcccaaaggagcgccgtcgggtaccaaacctcgcgttctgcccaaaggagcgccgtcgggtaccaaacctcgcgttttgctagtaaatgcgtgatatggggtgttcgcgcgagggtgctttcgattgtgcaccggtcgtttatcatgatagtccaatatgctatactcccaaaggagtataggagggaagtactacgatgaaaacgctgtaccatgggtcgaaggacatcatcgagcatccgcgttacggagcgggaaagccctacaacgactacgggctcgggttctattgcacagaatcgctcgatcttgcgaaggaatgggcggtgtccgtcgaccggggcgggttcgccaactgctatgaattcgactgcgcagacctcgccatcctcgatttgaacggggaggactacgggctcctccactggctggcgctcctgctgaggtttcgcgagttcgacgcgtcgggccctctggccctcgaggccaagcagtatcttctggaaaactttgccatcgacctcgccccctatgacgccatcgtgggctaccgggccgacgacagctacttctccttcgcccaggatttcatctcgggcgccatctcctaccagcagttgggccgcgccatgcatctgggcaggctcggtcagcagttcgtgctgaagagcgagcgcgccttcgaccggctgcgcttcaccggttacgagggggcctcgcgcgacgagtggtacgagcgcaagatgagccgcgaccgggcggcgcgccgcgagtatttggacgaggagcgaaaccggcgccagccaggcgatctgttcataacgaccatcatggacgagggaatggggggcggcgatgagcgcctacgatgaggtctacctgcaaccggcccgcgcgaatatgggccgtatgttggatgtggccgtgggcagcatgggcttcgggctgggggagttctatgggctgttcctcgcttccggcctcgcccgccgcttcggggccggagactacgctctcattacgggatgctcggggacggagctggccttccgcgtcgcggtagaggtacaggcagaggagccgccgcgtccccgggtgcgttaccgctacgaccgcagccctgagtactggtgcggttgggcgcttgcccgctaccagtgggagacggcgatgaccttcgacatgatcaaccgcatcacgcccatcgaggacgtccgaaagatgtacgacgcctaccacgagatggacatccgccatttcgaggatgcgttgaatgaacgccgcgcccgcttcttccggccgcctctgcgcatgcggcgcatggctgcgaagctgagccaggcccagctggccgtcatctccggcgtgccggtgcgcagcatccagcagtacgagcagcgccgcaaggacctgaacaaggccgccgccgaaaccgtggccgccctggcccgcgccctgttctgctcggtggaggatctgctggaatagcgtccagtagcgattcgctggaacatacggttccttaatccgagggctgcgggcgccagcgtgcctgcagccctcgggcaacgtttacccaacagcttatgttgcggcggatgtcaagactttcctgtcatcgggttttgcgtatactagaggcaagtcctgttcccgccatatactgcgatggaccgacgtattatgacgagggagctctagaagcggtcggaacggagattcgcatccgttgatgcgaaagccgggattcccgatgcgagcacccaccttttgaggtgggttcatcctctggcgtggggcagggctatttttgtgcctcgatttcggccgaagtgccttcctcgtccttcacgggcacgagcgacccggtggcgtcggtaagtttctgcccggttaggtcgcccatggcctcctcgataagatggttgtgcacgtagggggcgacggctcggatagcggcatcggtggcagaggaggctttggaagcctcggcgatggtgaagctcagcgaacctttgaacccgtagtcggtgatggacgagaacgatacgctgggccgcttcttcagcttgctcacacgggcgacggccttctcggcggcgtcctcaatgtgatgggccgtggcggtgaggcgctcgctgttggtggtgaccaccaggggaatggaaatctcattcaagggcgacagcttgcagacggccgtggaagtcatgagcgagttggggatgttggtgatggtgcccgaactgtctttgatggaggtgtagcgccaggtgacgtcctgcacgacgccagtgacgccggatggtcccatgcggatgttgtcgccgggttccacggtgcgcgacacgctgacggtcaggccgccgatgaggttcgaaagcgtgtcctgaaaacccaacgacaccgcgataccgacgacgccaaggccggtgaccatggcggagatgttcacgttgaagcacatcgacagcacgcagcagatgccgatgacccacacgatgatgcgcacgagattgatgaagatggagctggaaggcaaaagggtcgtcttgttcagcacgcggcgcataaaagccacggtgatgcgcgcgacgacgaaggtgatcgcgcagatgatcacgacgccgagcagggtgttgaaccaatcggcgtggatgaacttatcgaatatgtcgagcagattaggcatggtcccattatagaggggcgcctccatcccgaaggaggaggcgcccggttttcacggtttcgttatgcgaccctagttggtggaaggggtggtggtgccggtgtcgccgccctggttgcccgggtcggtggtgccgggatcggtcgtgccaccaggattgttggtgccggggtcggtcgtgccggggttggtgggctgctccggcttggggtcgggctcgggttcgggctccgggcccttcgaaatggtgatctgcacggtagcgccaggcttcaccttgtcgttcagcggatcctgcttcatgacgcggccctcgccctgcttgtcgctgtactcgcgggccttcacgtcggcaccgaagccctcagactgcagcttgtcgatggccccctcctcggtcatgccgatgacgttgggcacggtcgtcagctcgcttccgcgggaggtgacgacctcgatggtggtgccgggcttcaccgggtcgccggcggcggggctttgcgaaatgatcttgccctcggcgacatcttccgagtatttgctctcggcttccacaaccttaaggccggcgtcctcggccgcctggcgcgccgcggccatggtcatgttcttgaagttgggcgcgtccacggtatcgggccccacggcaatggtgagggtgatggtcgtacccttcggctgcttggtgccgccggccgggtcttgctgcagcacggtgccctcatcgacggactcgtcttccttaggagtggtagttacttggaagcccgcttgctccaaggtgaatgtcgcctcgtccaaggtattgcccaccacgctgggcacctcgatgggctcgtcggcaggggcagccggcttgaagccgccggacacggcgaaggcgatgccggccaccagcgcgatggccaaaatggcgcagaggacgatgataacgggcttcttgctcttcttcgtgttggcgtcgtggaagttcgtcgcttggaaattgcccgtggaactcggcgacatggccgccgtgccgccggcaaccgtcggcataacctgggtgctcgtgatgcccggcacgggagcgggcacggcgcccatcatgcgggtctgggcctcggtgaacgacgagctcatggcgccggccggcagggtgacggggcgtccggccaggtagtcgttcagtgcgatgcgcatgtcgttggccgtggcgaagcggcgcgccggatccttcgagagggccaccatgatgatgtcctcgaggtcggggtcgatgttcgggttgatggaagagggcgcggcaggctcgtccttcacctgctgcatggctaccgatacggcgtccgggccatcgaaggggagcttgcccgtggtggcctcgtacagcacgatgcccagcgagtagatgtcgctggcggccgtgagatctttgccctgggcctgttccggcgagatgtagtgggcggtgcccagcacagcggacgttttgtcgttcacggaattcttcgcccgggcgatgccgaagtccatcaccttcacgttgccatcgggctgcaccatgatgttctgcggtttgatgtcgcggtggatgatgtcctggttgtgggcgacggtgagggcctggcacacctgggcgccgatttcggcggccttgcgctggttgatggcgccgcgctgctggatggcggtcttcaggtcggacccgcgcacgaactccatgacgatgtaataggtgtcgtcgtcttggccccagtcgtacacgttcacgatgtaggggctctgcaggtttgcagccgcggcggcttcctggcggaagcgctgggtgaaagaggggtcagcggcgaattggggcagcatcaccttcacggcgacgacgcggcccagcgtgctatcttgggcgcggtacacctcggccatgccgccgatgccgatgcgatcctttatctcgtagcggccgccgaagaccttgcccgtcattgttccctgtccggtcaccttgatactccttaaagttccatgtacgagtgcgtttgcggtttaagtatgcgaactctggtgagtcttgccattgtactacagcgcccccgtcacttcgagagccgtttccagaacgtcgtgggcggcgctggcgccagcccccgattcgcccttctcgatgacgacggccaccacgaccttggggtcggcggcgggggccattcccacgaaccagctgtcgtcgctgccgtcaccgcgctcgtgggtgccggtcttgccggccacggccacatcgtccagggccgccttgccgccggtgccttcggtgacgacacccttcatgatgtcgatctcagcggcggcggtgtcggcatccatggcctgcttgagcttcacgggaatgggcgagaagctgcgctcgccgttggcgttgtagatgccgtcgaccaggtagggctgcatgatggctccctcgttggcgatggcggcgcccaccagcgccatctgcagcacggtggcctggggtccggcggggctctcgtgctcgcccacgggctcgccgcaggcggcccaggcggtttcccaggtggtcatttcctcggggtcgggcatgagggacgtggccaggggcaaatcgaaggggatgccttcgttgaacccgaagctgcacgccatctgcacgagcaaatcgctgccgagctgcacgcccacctggccgaacacggtgttcgacgagtaccacatggcctgttccagggtgatcttgccgtaggagcgcttcttcacgttggtcacgggcgcgttgccgatgtccatctcgccgggggagtcgtaggtggtgtccgccgtggcgatgtgatcctgcagcgcggcggccagggtcaccatcttgaaggtggagccgggcgcgtacagtgcctgggtggcgcggttgaacagctcggaggaatcgctgccgccgtctgcggcggcggtgagcagctcctcgtagttggcggcgtcgaaggtgggggaggaggccagagcgtacacggcgccggtctcggggttcagggccaccacggcgcctacctggccggccagcgcgtcttgcgccgcctgctggatgcgggaatcgatggaaagcacgacgtcgttgcccttggtctggatgcccgcgagcgagttcaccacatcggtaaagctggcgaagttctgctcgccgcgcagggtgtcgttgtaggcggcttcgatgccggcggtgccgaagcgctcagaggtgtagcccacgatgtgcgccgccagctcgccggcagggtattcgcgcttataggagccgtcctcttggcgcaccgatgtggcgagcaccgtgccgtcggcggtggagatggtgccccgctccatgcgggcctctttcgcgatggtgtggttgttagacggcatgctctggtattccggcgccttgatgaccatgaggtaggtgaggttggccacgagcactgcgaacagcaccgagaagacgatcatggtgccggtgagtcgcttgcccaacgccacgcgtcccagcacggcgtccgacccgtgggcgccgatggccccggtctggcgcatttcggagtcgaccccggtgccctcgtctccgcagcgcagcaggcagccgacgatgatgaagctggcgatgagcgacgagccgccctggctgatgaagggcagtgtgatgccggtgaggggaatgagacgtgtgacaccgccgacgatgataaacgcctgcagcacgatgatggaggtgaggcccacggcggtgaacgagctgacgtcggatttcgcccgggccgccgtgacgatgccgcgaatggcgaagcacaaatacagcagcagcacgccggccgcgccgagcaggcccgtctcctcggcgatgaccgggaagatgaagtcgctctcggcgacggggatgccgccttgtgctacaggctcgccgcccatgccccgcccgatgccggtgccgaacaggtcgccgtcggcgatggaatagaggctctgcactagctggaagccgccgccctgagcctcggcgaagggatcctgccagatggcgacgcgggtctgcacgtggcccatcatgccgtaaagggccacagccgcaatggccgcaagcccaatggacaccacgaggtagagcttcttccccgtggccacatacagcatgatgacgaacacggagaacagtaccagggcgaggccgaggtccttctccaacacgacgacgatgaaggcgagcgcccacatgacgatgagcgggagcagggtggcgaggctcggcagccacagcggccccaccttccacgtgaacaccgagagcatctcgcggttggcggccaggtaggcggcgatgaagaacacgatgagaatcttcgccagctcgccgggctggaagctgaagccgccgatgcgcagccacagttggccgccgccggactcatagccgatgaccggcagcatgggcgagagcaaaagcaagatgcccacgatcatgagcgtgtatttatagttggcgagcttgtccaagttgcgcacgacggcgagggtggcaatcatggccgcgatgccgatgaacagccacagcagctggttcacggccaaatcgggcacaatgcgggtcacaaacgcgataccgatgcccgacagcgcgaacgaaatgggcagaatagctgggtcggccgcaggcgcgagcaggcgcacggcaatgtgagccacgaggaatgcggcgaagatgccgagcggcacgcccagggtgttgaaggacagctcctggccgccggtgaccaccatcatggcgaagagcacgatgacgatgggcgaggcgatgagcaggagcatcagctctatgttgcgccgggtcatcggttggttcctcccgcagcgccgccttgtgcgtcgcggctcgtgccagcgcctgtgttgccggagctcgcgtcgctcgtgccggagccagcgcccgatgaaggcgacgcactttgcgagccgcccgtcgtgccttgtgcgtccgtgccgccctgcgcgccgctggccgtgctgccgccagcaccttccgcacccttcgcgggttcctcaggctggttggcctcggccgctgcccgagccgcttcctcttcggcggccttgcggtcggcgatctccttctcgtattccgcgacgaggctgttggcggcttccaaagaatccaccttgatgccctcctcgctcaggcgattggcggtgcccggctgcaagtcgtctaacgccacgtcggtcacgcggtcgaggtgattgaacgagaatccgaagatgtcgcctggaacgccctggtacacggcgactttcccatcctgagccaccagataggcggcgttggacgccagatagttgaacccataggcgcacccggcgatgatggccaccagcaaaagcgccagcatgatggccgtcgcgcggctcttgcgcgtcagcttgcggcggtgctgctcggccagacccgtgacgtccacgacgatgacggtgacgttgtcgtagccgccccggcccacggcctcgttcaccagctgagccgcgcaacgctggggctcgctgtggttggcgaggatcttggcgatctggtcgtcttccaacatcgtggaaaggccatcggagcacagaagcagacggtcgccggcttccacggtgatttcgaagagatccggctgggtgcgcgggtcgctgcccaaagcgcgggtgatgaccgagcgctgggggtgcacccgggcctcggcctcggtaatttgcccggcctcgataaggtcggccacaagcgagtggtcgcgggtgagctgctgcatctgccctttgtgaaggagataggcccgtgagtcgcccacctgggcaatgacgagcttatccttctcaagcatggcggcggtgcaggtgcagcccatgccggcgcggccgacgccttcgcgggcggcgcggatgatggcgaggttcgcctcttccacggcctggccgagcgccgaggcatcggggtgtgccggtgcgcggtcgcagatgacgtccacggcgatttcggacgccacttccccggcggcgtggccgcccatgccgtcgcacaccacgtacagcggcggggcgacggccagcgagtcttcgttgtgctcgcgcacgcagccgacgtcggtgcgactgccgaaagttgcgccgctcttcttgcgctttgcccgggccattattggttcctcacgcggatgtcgacgtcgccgatggtaacgagatccttgttgcgcagggctaccgggtcatggacggggcgtccgttcacggcggtgccgttcttcgaacccaaatcttccacgaagaggttctggcccatcagctggaagcgggcatgacggccggacacgtagccggcgccgatgacgatgtcggccccgggcgagcggcccacgatgacgggcccgtgcacggcgatggagacgccgcgcagctccttggggccgcgttccaccgacaccgtccagccgcgctccttcttacgggagcctttgaccatgccgatgccggtgcgcatgatggcgaacagaaacagatagagcagcgccacgaacaacaggcgcgcgatgagcagaacgagatcgatcaccgatagcctcctttggctcgctgaggtgcgggcgggctagatgagctggaactcgaggttggtggtgcccacgatgatgcggtcggcgtcgtgcaacgcggtggatttgatctggcgcccgttcacgaaggtgccgttggtggagccgaggtcggtgagaatccaggcgccggactcgtcctggcggatttccgcgtgcacgcgcgagacgttgatgtcggggatgacgatgtcgttcttcgactcgcgcccgatggtctcggcctggccgggcagcgtgaaggcgcggtcgttggtgatgtcgtagatataagcttggcgcggctcgtcgtcctcgtagtagtcgtcttccacgtactcgtcgacgggagcggcctggtagtcgtagccgccggcgggtgcgggtgctggcgccggagcgggagcgggctgctggtagccgtagcccgcttgcggggcggccgcgcgggccggaccgccgccgggacggatgccgtagcgggcgtactcttcctgacgtagctgctcaaccagcggggaagccaccatctcggcgatgacgtcgaacttgccgtggcgcaaatcatcgtcgacgatgaagcgcacaaggggctggccgtccatgacgaggccctgctcggcggctttggcggaaaggtaggtttcggtctcgccagccagggtggggtagtagcccagaaggcggcggtcatcgtcggcgttgacgagcacggtataaagcgtgggagcgtactgcttgcctgcgccgaccatcttctcgcggcgcatctgcttctcggccttcttggcaatctgcacgggagacagcggggccgcgcccatgcgatcggcggcgccttccacggtgtcttccatcttgccttcgaattttgagaggagtcccatgtgcttctccttgttcttgcgtgtttaagctgcgttcttcttgtgtggttacgctgcgctttcagtgcagcgttcagtagcacagcagcttattttgccataaaacctatgcacacacctcatcgaccaaccattttacttaattgccacagtgacaattttgttcgattggccgggaaacagcttgatgccaggtgaattgatgaggagatcgcttctcatttcgcacgataccatgggctttccagaaaggaggagcgcccatggccacgttcgaggagttcatgaaggtcgccgagatttccatcaaggacaagacctctcacaagcgcatgaacgagattgtgcgcatcatgcggcagtacaaggtgctgcacgggcttacccccgagcaggccgtggaagtactgcaggcgctcggccccacgtacgtgaaaatcggccagctggcctcgaaccgttccgatcttctgcccaaggcctactgcgacgccttcgaaaaactgcgcgatgacgcgaatccaatgccgttcgatgtggtgatcgagcagatcgaccgtgcgtacgggaagtcgtggcacgaggtgttcgcctccatcgaccccgtgcctttgggcgcggcctccatcgcccaggtgcacaaggcgacgctgctcgacggcacaacggtggcggtgaaggtacgccggccgggtgtggccgaatccatggccgaggacatcatgctcatgaagcacctgttggctttgggggagttcgcttccaattcccatcgcagcatcctgctgtcgcttgagggcttcgtcgaggaaatcgagcgcacgacggccagcgaggtgaatttcacctccgagctgcacaatctcatgcgcttccacgacgagctggccgacgagcagggcgtgacctcgcccgtggcctacccgcaatattcttgcgagtcggtgctcgtcatggagttcgtccagggcaccgaaatctcccacaccgaagagctgtgccagcagggcgtcgacatgaacgcgctcgcgcgtcgcgtgtgccaaagctacgtgacccaggtgctcgacgacgggttcttccacgccgacccgcatccgggcaacattctcgtgcgtgacggagacgtggtgtggatcgatctgggcatggtgggcacgctgacggtgtcggagcggatgctcgtcgggaaggtgttcacggcggtggccaccgacaacgcctatctcttgaaggaagcggtgatgggcctcgtgcatgtgctggggccggtggatcacggggcactgctggaggcactttcgcggttgctcgccgagtacagcaccgccgagatgaaggagatcaacgtgggcaccgtgctcaccgaggtcatcgaggtgctgcgcggccagaacatgatgatgacctcgtcggtgaccatgcttgcccgcggattcgtgaccatcgagggggtcatggcccaagtggcgcccgatatcagcgtcatcgagatcgtgtcgaagcacgtcatcgcccagcacgccgacccgaagtttttggcgacgcagctgatcgatctcgccacgacgagcgccgcttcggccgaggccttggcgaagctgccgacccagctgtcgaacacgttggagatgctcgaccgcgggcagatcaaggtgaacggcgacatcgaggtgtcctcgcgcatccttgccaccgcctacgcctcggtgggtcgcatatcgttggcgctgctgtcggcggggctgttcctggggtcgtctatcctgtgcaccacggctatgcagccgcaactgctcggcgtgcccctgctcggcgtgctgggctatgtcggcgccttcgtgctgggtgcctacacggtgttccacatcctggtctcccgccatcgccttctcaacaacgaggagccgcggtaggggtgtgtaacgtcgtgtctacaggtgggcggcggcggggaaacggaaaaggaccgtggtaaaatggcagttgctcattaggatgagccacaaggtaagcattttccggcgatgctagagcatgcgagctgctttcggtggccgagctgtggttcgtaggcgtcgtcgcttgaggtgccgcgagggtaaggaggcccccatgtacaagaagattctcgttccctacgataagtccgacccggcgaaaaacgccctgggggctgcgctcgatctggcggccggtgtgcccggcgcccagatcaccgtgctgtcggtggtcgactggcacgacttcaacgccgagacgttcaagattgcctcgcgcatgtccggcgtcatgggcgacaccatggatatggatgtgatctccgaagtggagaacgaggccatcaaggccgacatggacgccattgccgagaacatcgcgcctttggtgggcgacgccgagggcatcggtatcgcggtggtgaacggctcgccgcatgattccatcacggcctatgccgacgagggcggctacgactgcatcgtcatgggccaccgtggtctgggtgccgtgcgtgggatgctcggcagcgtgtgctactccgtgctgcacaagaccaacgtgcccgtgctcattgtgaaataggttcgaggccatgggacgatcgggcggaggcggcggcttctcgggaggcggcggcttcggcggaggctttggaagtagcggcggcggattcggcggcgggttttccggcggctcgggatcgggcggtcgctcggctggccacggcggctctggtttcggcggcgggtaccatggcggtggctactacggcggaggcttcgggggcggcagcttctggggcggtttcctcggtggcctgatgggctcgagccgaggaggcggtggtggctcgatgccgccgcagatgccccagcagccgagcggcccgcagcagcccgggtcgggcggcggcccgggtggccccggcggcccgaatgcgccgcagcctggttcgccccagggcaagtcctccaacagcggatgcggcacggtgttcgtcatcgtggccgctgtgctgctggtgctgctcctcgtggtggccctgggtggcggcagctgctcgagcgcgaacgtgcccgcgtctaccgtggagcgcacggcccttcctgctggttccgtaaacgagaccggatacttcaccgacgaggacggcgactggattcacgatccggcgaagctcgagcgcggcctgcgccatttctacgaggaaacgggcgtgcagccctacgtgtacatcttgccgaacggatcggtgcgctcctaccaggagctgcagtccattgcccaggaaaagtacgacgagctgttcaccgaccaggcgcacttcgtccttgtgttttgcgacgatggcaacgggcgcttcaacgccgcctactgggccggtgcgatgacgggatcggtgctcgacgatgaggccatcaacatcttcaaagcatacctcagccagaactacgacgatatgagcctgtcggaagaggagatcttctccgacgcctttgccgacacggccgaccgtatcatgacggtgacgccttcgccgctgccgatcatcgcggtatgcgcggcagtgataatagtggccgtcgtcgtgttcctcatcgtgcgcaaccgccgtctggcgaagcagcgcgaggcagagcgcatgcaggagattctgaacacgccgctggagtcgctggccgacgctgagctggcggatttggaaaagaagtacgcgcaggcaggcgcttcggatgcgccgccggtgcagccgacgaagccgcgaccctaggtggtgctgcggtattcaacccggccttcgggccagataggagactgacatgggaatcctcgatcgcttcacttccatcgtgaaggcgaacatcaacgagcttctggacaaggcggaagatcccgagaaaatggtcgaccagtacctgcgcgagatgaccgagtcgctcgccgaggtgcgcgaggccaccgctggcgtcatggctgaggagaagcgctgcaagaagctcctcgacgagaatcgcgaggaaacggagaagtacgaggagctggcccgcaaggcgctcgccgccggcaacgaggccgacgctcgcgtgttcctcgcgaagaagcaggagctggcggggcgcgccgagggcctcacggtggcctacgagggcgcgaaggccaacgccgacaaaatgcgccagatgcacgacaagctggtggccgacatcgaggagttgaacgcacggaaggcgaccatcaaggcgaaggccgccgtggcgaaaacgcagtccaaggtgaacgagatgacctcagccggcgatcgtgccgagggtgctcgcagcgctttcgaccgcatggaggccaaggctgatgagatgctcgaccgtgccaacgccgtggccgagctgtccgagaagccggccgatcccaccgaggagctcgcgaagaagtacgccgccgccggtgccgaagccgccgtcgacgacgacctcgcccgcctgaagaaggagatgggtctggagtagccctggcgattcccaacgaagccgaaggcccccgaccgcgtgcgagcgctcgggggccttgttgtatcgcggaccggggaggggaggcccgcgcggggataacgggaagtggcggcccgggcggtgcgcaccgcgctgccggctgggccgcgccggccgggcgctaggccacggcttcggcggcgtacatgccggccatgcggccgccgctgtaggcgcacatgagggagaagccctcgtagtcgcagtagggggcgctcatgagggtgccgttgtcggcgccggccacgtacaggcccgggatggcgatgccggcgtcgtcgatggcctgcaggcggtcgttggtgcggatgccgccgatggtcacccaggcgctcggctcgtactgcatggcgtagaaggggccttccgcaacgggctgcaggaagcaggccggcttgtagaattgctcgtccttgcccgcggcgcagtagccgttgtactcctccagggtcgtcaccagctcgggggcgccgatggcctcggccagggcctccacggtgtcggccttgaagatccagcccgcgtccacgccggcgtcgatgttggcctgcacgtcctcgagcggcttgtccttcagggtcatcatgccggtgcgccagttcacttcgtcggcaccgcagagcgtccacgggtcggtgccgccggccagcccatccacgtaggcctggtccacgacggcgtagtactggccgcccacgagcgagatcgccccgccgagggccaggggcagattcgcgaacttgccctcgttgctgaagcggcggccctggttgttcacgagcagcgtgccgtagataccgatggagaaggcggcgttgcccttgccccacaggccgtcggcgttctggttggagccggagaactcgttgccggcgatgccccactgggtggacacctggccgccgaccgcctgcaccatctcgatgccctcgcccacggacaggatggagccgagggggttcacgaaggtgccgaagcgctcggtcatcatatcgacgttgccgaggaagccgcccgtggccacaatgacggccttggccctcacgtccagcacgccgtcgccctcgcactggatgcccacgcaggtgccgtcctccatgatgaggcgcttgccggcggtgttgaacacgaactcgccgccgttggcctcgatgaactgctggagcgggcccatgcggtcgacgcccttggcctgggtcttggagtctttcgggtcggactggaagttgcagcgcacggaatcgtggcccgcgccgtagttgtcggggcgcaggcccgtggccacgccgaactcgtcggtgaactggtcgacggtgctgccggacagctccaccgcccgcttcacggccgcggcgttcgtggaccagtgggagtactccatgatgtggttgaaggcctcttccacggtgaaggtgatgccggcgttctgctggagcttcgagcccaccatgaacgggccgccggcgatggagccgttggagacgcccacgtcgacgcccttctcgatgacgatgacggacttgccggcccgcacggcctccacggccgcccacatgccggcgccgccggcgcccacgatggcgatgtcgcactccttggtctcgtcggcggtctgcatggccgaagcggccgcggtgtcgccctcgccggtgtcggcgagcttggccgcagacggggcctgcggggcgcacccggccagggccgcgccggcgccgagggcggccaagccgcccagggtcaggaagctgcgacgggaaacggtggtatgactcatggttctctccctccaagagttggactcggtgccgctgtccggcggcgcgggcccggtgcagtgtcggacccggggccgctctcctcggcggctggggccatcatggggcggctgccggcgtttgtcgcgggtgaagtcgccgcgatcgcaggtgattgcgggctcacccctcctctcaccccgacgttttccctggtacaatgggcgcacacaagcagggaagagcggagggccaagggcatgggaacaagggaagcgatgcgcgctgcggcgcagaccgtggccgagacgaccgttgaaggggctgcgggcatgggcctcggggaggctgcggcctcgcaagatggtctttcgggcgggatcggcactgcgggatcggcgcggttcttcccctggcggttcctcggcatggggcttctgatcgcctggctgtgctgcacccacatcacggcggtgttccccggatccgggttcgacctggagccgcgccacaccttcgactacgccatgcgcatcggcgacgtgggtatgctgttgctgctgggtgtggccgccccgcgcttggggcggctgagccggcaccgagtgctggctgccgtgctcgtgggattgacgggtctcggcacgctggccggcggcctcgcgctcattccggaagcagcgccgacggcgccccttgccgtggtcggtgcggttacggctttgggcggcgcggtgctgttctgcctgtgggccgagatttactcccaaatgggcatgacgcgcaccatcatgtacggggccttctcctgcctggtggccggcggcgcggcgttcctcgtgtgcaccatgaggccgccctacgccatcctggccaccgcggtgctgccggggctttccctcgggtgcgcgtggctgagcctgcgggcgcttccgggcgagccggtgcgccggccgagcacccgctacgctgtgccgtggaagctcgtggccattatggctgtggccgggctgctgtcggggtcgtcgggcctggtgctcggcggcgtggaaggcgtgggcgcgatgttccgcgtgctggccaccgtgctggcggccgtggtgatcctcgcggtgatgttcgtgcgccgcgaccgcatggacgtgcggttcctcgcgaaggtggcgctgcccttggccgtgatcgctctggcgcttctgcccttcgcccacagcgccatcgcctatctggtggcgttcctgctgaagttcgcctacgtgtggttcacgttcttcgtgctgctggtgctcgcgggcatctgctaccgctacgaggtgccgagtctgcgcgtcttcgccatcgcccgcgcctccagcgaggcggccatcctcttcggcatcgtgctgcgccgcggcttccagggcaacgggtacatggacagcgaggcctttgccgtggccttcgccgtggcgggcatcgcgctcgtgggggcctgcgtgctcgtgtgggcgagcgagaagtccgtcaacggcgactggggcgcggccggggtggcgcccgagacgaacctgcacgtggccggcccgcgcgagcggttcatggcccgctgcgaccgcgtggccgccgacgccgggctcacggcccgggaagccgagatcatggcccttgtcgcccagggcctcacccgccgcgagatcgaacgcgagctgttcctctccgagaacaccgtgaagacccacgtccgccacctccacgcgaagctgggcacgtcatcgaaggccgaggtcatcgccctggtaggagagccgggggagtaggggaagcgcgttcagggcagcaaagcgagccttcggtcgcatgggagcaaccgagggttctgttgtgaggagaacaggggatcgcaccagggagctgtgcgctctggccgaaaatctcccagtcaagctcctctactccccggcgaggtagttccagaaggcttgggcggcgggggacaggggctcgcctttgcgcttgacggcgtaggtgccgaaggagacgtccggccgcaggtcgacgggcacgagggggtagtcgggaatggggtccacgttttcattcggcggcaggccgaacatgagggcctcgttctgcagggcgcagctcgtgagcaggtcgacgttggaggtggtcatgagtacgttcggctcgatgcccagatcagcgcaggtgtccatgaagaagcggtgcaggtggtcgcgcttcccgaaggtgacgaagggctggccgtccaggtcgtgggcgccgagccgctcgcgccgtgaaagcgggttggccacgggcacgtgcacgtaggtgcccgtttccacgagttgcagagcgtcgaagtcggtcaggtactgcggtgccgaaccgacgataccgatgtccgactcgcccgtcttcaccatggccagggccatatcggtgggcgagctttccacggagagtagcaggttcggatgctcgtcggcgaagcggtcgatgatggtgcgcggtaaggtgagggccgctcccggcacgagggacaccgacagcaggggcatgcgctcgccgcgggccgcttctcccaggtagcgccgctccagggcgcggtagacgtccacgaccggctgggcgtcggccatgagcgtccgcccggtttcagtgggctccagcgtgccgtcgcgctgggcgatgagcgtttccccgagttcctgctccaggttgtgcacggccttgctgagcgcctggcgcgtgatgaacaactcgtcggcggctttggtatagctgcgcaggcgtgcgacggcgataaagtactccagttggcgaatgtccacggctccccttcctgtcggtcgtggcatgcgggcctttgcgcccgcccgttattcttaccgcaactgcccttcgcagcgcaagcaaaaaaacagttgcgggcgggcaaagggaaggtgcttggccgccccggggcggcgcccctatcatcggtggcgtccgcaagacacttccaaggagggagagtttcatgaccaagaaccaattctcacgccgcgacttcttcaagctcggtgccgtgggcgccgccggtgccgctgctgcaggcctggcgggatgcgccccggccgccgacaaggccgcggccggatccgatgccgccggtgccgccgatgcgagcgccgaaggtgccgtcagcaccaacgacgtcgtcatcaagctgggcgacacgctgccgaagtggtccttcatggtgcctccggcgcccatcccggaggatgagatcaccgagaccatcgagaacgatatcatcgtcgtgggtgccggcatgtccggcctcaccacggcggtggcggcggccgagcagggcggtaaggtgacgctgttctccgcttccagcgcccccatcagccgcggcggttccaacttcgcccgcaactccaaggtgatggaggagctgaaagtggagcccttcgcgcccagccccttctactaccatgagatgcgcgccgcctccttcgctgttgaccaggccaagtggatgaagggctacaacaactccgaagaggccatgaactggatgatcgacatcgccaacgaggccggcctccaggtcatcttggagcgcgacaacaacttcgacctcggcccccactacgcccatgcgttctccaccctcggcgactcctccatggtgtccacgggccagcagggcgccgtggaggccctcgagaagaaggccctcgagtacggcgtgcagatcatctacgatatgaaggccgagcagcttatccgcgagggcgacaacgccggccgcgtgaccggcgtggtggcctcgcacaccgacggcaccgagggctacaccctgttcaacggcacctacatcgtgctggctacgggcgactattccaccgataaggagatgctcgcctgctactgccctgaggccctgcagtacgtgggcttcgagcagaccgagaccgactacaacacgagcttccagatgggcggcatctacggcggcgacggccagaagatgggcctgtgggccggcgcggcctggcagcacgccgaggcggcccccatgtatcagggcggctggggcggcggccacgagccctgcggcttccactggggcctcaacgtgaacgcccgcaccgagcgctaccagcgcgaggacgtgtcggcgccctacacggcccactacctgctctcgcagccggacaacatcgcctacggcatctggacgaagaactacccgcagaccatcatcgaccgcggccaggaatggttcctgttcggttccgactacacgctgcccccgaagacggctgaggaaatgatcgccatctgggacgccggtgtcgaggaaggtgcctactggaaggccgacacgctggatgaactggccgaccagctcggccttgacgcggcgaagctgaaggacgtcgtggcccgctacaacgagctgtgcaagaagggcgtcgacgaggacttctacaaggatcccacctaccttgtggagatcgaggagaccggcccctactacgccgccaagaacacctgcacgttcatgaccatcatgggcggcctgcgcaccagtgtgaacatggaggtgtgcgacgagaacgacgagcccatccccggtctgttcaacgtcggctgcatggtgggcgacatgtacgccaacgagtacaacttcgccattccgggcaacagctacggcatcaactgcctcaccttcggctatatgctcggccacgacctggccgctggtaagttcgagtagccggtttcgcgggtaccttccgcggctgtctcccgacatttatttctggacaggcccatttcccgcctcccctgcgcggacgccaccctcccggcgtccgcgcttttttctacaggctccactccagcaggcggctgaggaagcgttgcagctcggaagtctacgtacggctgggactttgttgcatcgagagttaaaatgaaacctggaaaaaagttaaaatgaaacctggaaaaaagttaaaatgaaacctggaaaaaagttaaaataaccaggtggaggccggggccatggaaacgctgaaaatacccaattacattccccgcattgctgataaaaccattgcggaaaacatggaggctttcggtgccgtggtcatcgaggggccaaagtggtgcggcaagacttcgacagcgaagaaccatgcggtctcggaaatcagcatggccgacccgctgggcgactttcaaaaccgacgtctggctgagctagagccggccattgcccttgagggtgtccggccgcgtctgattgatgaatggcaggacgttcccaagttgtgggatgccgtgcgattcgagtgcgatagggccacggagaaggggcagtttgtgctcacgggctcctcgactccccgcaggaagcagaatccccatgccgatcggcctcgacatagcggggccgggcgcatcgttcgcgttcccatgagcaccatgacccagtacgagctcggccaatcaaatggcaaggtgtcgctgagaggtttgtttgagggagagcgctacgcgtcggtttcgcagctgtcccttgaacgcattgcggaacttgtggtggcgggtggctggcccgacgccattggttcccccacggcgaaagcggtgcgcatcgccaagggctacttgcaggcggtcatcaacgaggacattcatgaggttgacggggtggagcgcgaccgggagaaagtgcggcgcttgattgtgtcccttgcccgtaacgaggccaccctggcaacgggaaagaccattctgaaagatacccaaggtcgcaccgaagatgctgcggctatcacggcacccaccatgaacgattacctcgatgcgttgcggcgcatctacttcgtgcaggacattccggcctgggcccccgaactgcgctcgtcggccaagattcggtcggccgcaaagcgacacctggccgatccgtccctggccgccgccgcgctcggtgccacggcggcaaagctcatgggcgacctcaagacgctcggatttctctttgagtcgctcgttgcccacgacctcatcgtctacgcggaggccatgggggcttcggtataccactatcatgatgcggccgatctggaggcggacctcgtcatcgagcatcccgacggaacgtggatcccggtggaggtgaagctcggggcggcccaggtggacgacgccgctaagaacctcgtggcgctgaaggagaagatgatgcgcggcggctaccaggctcccgttgccatgctcgctgtcatcggcgtcgggggtgtcgcaacgtgccgagaggacggcgtgcaagtagcgcccctggatacgttgggggtatagggtctgacttcccgggccttttcgccttacatgctccactccaagaggcggctgaggaaacgcttgagttcgggggtgcggggattgtcgaagaggcgctcgcttgggccgtgctccagcaggcggccgccgtagaggaaggccacggtgtcgcaggcgtggcgggcgaaacccatctcgtgggtgacgatgatgaagcgggtgccggcttccttcaggtcgcgcaccacgtcgagcacctcggtggtgaattccgggtccagggcgctcgtgggctcgtcgagcagcagcaggcgcggccgggccgcgagcgcccgggctatggcgacgcgctgcttctggccgccggacagctgagccggccgcttggccgcggaatcggccaggccgaggcgttccagcagatcgtgggcgcggtcggacgcttcggcatcttccacgccgtgcaccacgcgcaggggcagcgccacgttctcctgggcggtgaggtggtgaaacaggccgccgtcctggaagacgaagccgagggtcgcgcggtagtcgcgcagcgccgcctcgccggtgggcacggggacgccgtccacggccagggtgccgcccgtgggcactagcaggccgccgataatgcgcaaaagcgtggacttcccgccgcccgacggcccgataatggccagggccgacacctcttcgtcgaaggtgatgtcgtgcagcacctcggtgccgtcgaaggccatggagagatgagagagctcaacgcgcatggtggctcaccgcccgggacgacggccgcgcgggaagcgggcggcaatggcggcaatggcggcaatgctcacgcataggagagcctcttctcgaagtggcggctcacggccatgatgggcagggtgagcaccaggtacagcgcccccagcaacaggaagccgccgaagaagttgtagttcgtggccgtgatctcgcgtatggtctgggtcagctcgatgacggcgatgaccgacagtagcgacgaatccttgatgatggaggccacctggcccgtgagcgccggcagcgtgcgggccacgagttgcggcgccactacgtagcgtaaggtttgggcacgggtgaagccgacggcccgggctgcctccatttgccccgcgtccaacgacagcaggctgccgcgcacgatttcggcgatgtaggcgcccgagaatagcgacaggatgatgatgccggcgagcacccggttgtcgatgccccaggccgtgccgatgatgtagtagaagaagtacacttgcacgatgagcggcgtgccgcggatgattttcacgtagaagtcgcacagatagcgcagcggcaggaagcgcacgccctggcccgcggccaccaaaaccccgagcaccaggctcagcacgagggacgccacggaaatgcccacggtcatgcagaagccgtcccagatgcgcacgcggtactgggccacgaaatcgaagttcagcgagatgcccgccgcagccagcgatgcccaaaccacagcgatcaccgccacacacacagccagatagttcagggccgccttcgccgggcgcacgggcgcacctgcggcggcggtgaagggacgagtgatggtggtgaggcgtttcatgggactagattactcgaaatcgaagaaccacttgaagccgtactggtcgaaggccttcttttcgtccgcgaggtacttctcggtgaggcgatcgaactcgccgtcggttttcgactgcgcgatgaaggcgttcagctggtcgagcagctccgtgtcgcccttcttcacagcgatgccccactcctcggcgtcctggaaggggatgaaaacggcctcggtggtatcggggttcgcctgatggttgcggtagatggtcagctggtcgtacaggaagccgtcggccttgtcctgcaccacttcggtcacgcacgcgctctcgtcggccaggcgcacgatctccgcattggttaggttcttcgtggcgtacacgtcgccggtggagccggtcttcacggccaccttcttgccgggctggttcaagtcgtcgatggacgccacgccggaatccgcgttcgccagaatggccagctgggccatggcgtaggcatcggagaagtccacggactgcttgcgctcgtcggtgatagtcatggaactgataaccagatcggccttatccgattgcagcgagggaataaggccgtcccaggcggtgttctcaatctgcacgtcgtagccgtaggcggcgccgaagtcgcggatgaagtcgacggcgaggccctccgggttgccggcgtcgtctttcgtttcgaagggcgggtaggccagctccatggccacgcgcagagtcttgccgtcggtgctggcagaggtgttgtcggcatcggcactgctgctgccggtgccgcccgacgcgcagccggccaaactgcaggtgagggcgacgacgcaggcgatgacggcggcagcaagggccgccttcgcgatggggaagctgcgggatagggaaaggttcattggcggtctcctcgggtctcgggcgtaggctcagaaccggatgggggttccgattcgtgttcggtcaggatgcttgcgcgctcttgcatgatcacaatggtacggcagctggtcgttggattggcggggaaacatgatctgttagcatcgcgataagctcggtggatgcttaactcgcgatcagcttatgagtggtcgcttcaggcgaagagcttaaattctacgattgtgcgagactaagattgggttacaatgagggtcggtgccccgtcacgtccgggcggcttcgggaaaggagctaccctatggacacgcaaactgtcattgccctgtgcgatctcatgcttgtgtttatcggaatcatcgggcttttcctggtgaggaaggagtgacggacggtgttggcaaagaagaagccgggccccatgctaaagtagacccggcttagtcattaaccagtgccgcccggctaagcggggcaccgattgcttgcattatagcatggttcttggcgtctgtgcagaaggtgttgcgggaagggaggagtccgtgggcagcaagaagcgctcggcgtggcagaagcagaaggcggaattcgctgcatccctcggcggcatggacgacctgttcgccagcgagaacgcgcgcagccagcgccacgacgaggaacgcgcggccgcccgacgccacaaggcctgcgagcgcaagaaccgctacgccagccgctacgaggccgagctcaccgctgccgaatgcgccgagcacggcgccccgcccctgcacgtctaccgctgcccctactgcaacggctggcacctcacttcgaagggggagtagggctgcgggcaccgccgggtctttcgcagagtttcgcaactttcgcaaaggggagaggggggatgctgcaccgcaattccctttttcggacagcgtggcgggcttagcgtttggcgcgtcggttcatgatgaaggcgatggcacccgctgccgctgctcctaaagcgatgctcgcaatgatggcgaggggcacaaggtctcccgtctgggccaacttctcgccctctttcaggccggtctcgtagacgttcttcacgtagtcggcgtcggatttgctcacggggttctcgatcatctcttcggtgatctccgtcttgtcttgtgcgtcgcccgattcgatgaagtcttttaccacctcgtccttcacgtcgtcaggcagcacgctttcgatttcgtctttgtcgaaggtggtatcgttcggcaggctcggtgtagcgcttccgtcggtgctcggcgtgtcggcgggcttgtcggcgctggaatcatccgctggtttgtcggctccggagccatcggcgggttggtcggcgctgttgtcgccgtttccgctgtcgtcgggcggcgtcgtgtcgtccggctgggtcgcatcgcttggcggcgttgtgtcggtgggcacttcaatatcgtcgggcagattcgcggaatcgggcacgtaaagcacgttgatgacgttgtcgtcggggttgacgcccacgcgtatctcggacgggtaggtgtccaccacgtaggtgccgtcgattttgtactcgtaggcgtcgcccttgacgagctggtcgaagcgctggttggtgaaggtctccgatcccatcttaacgaactccacgtcatcgggcgccagtgcgtccttccagttgtcggcggtcagatcggcgttttccatgaggtaatagttcacggtgtactcgttgttccacagcttgaagtagaagaggttgatgacgttgtcggaagggttgtcggtcagcgtgagattttgcggccagccgtcccagaagaaatgcccggggatgtcgaccacgtaattccacgcattcagcgtctgccctacgtgcacgtcggtgagctcgtagctgcctagcagcacccggccattctcgtcgggctcggtgtcaccgtcgtcgtagctgacgttctcgtagtacatgattgtcgcggtggtggggatctcggccgctgtggcgggggtctcagccgctgtggcgggcgtttcggctgccgcggtgggcgtctcggtggcatccgcctcttccgtggcgctcgttgttgcctcggtgccctcgtcgccgttcgttgcggccaaggcgctgtaggcgcaggaggtgagagacgcagccaggcacaaggcgagaacgaaagccgcgaaggagcgagtggttcgttttgcgggggtggtcatggtggtctcctcgtctcgatggcagcattgttttctgagcaaaagcatcgaggtaagtgtagaggggttgaggaggccttttctttccatctgcgacctgtcattcgtctttctttgagttgttgtctatcggaaaaataccgagagctgttcaggcttggcgcttcttatcttcgcgataactgcgatttcggaaataaacgcgagtttcgagcgcgtctgcggaaataaacgcgagtttcgagcatgaaacgggctctggagcgcttaattcgttccgaaaatgctcgaaactcccgtctacttccctgtttcgtatggccagctgctcgaaactcccatctatttccgaaaaagggtgccggcttggcaaaggagttcggcaaaggcgtcatgtcatgggaaatcgcgcgcgaaagttactcaaggtcataggaggcacgcttgttgcgcgcgcgcttttgggggcggtgacaattcgcttcgtctttggcaaggcctccggtacataaggatatatgggggtaggttcggcgcgttccttaggaagtggggaaggaatacacgtagctgccgccgaagaacttgccgagcaggtataagttgctggccgactcattcgcgaggtacacctggccatcgtgggtgtcgatgccctcggccatgggtggcacggtcagcgtctgcatgagcgtcgcgtcgtcgagaaaataaagcgggcagtgatggccttccaccatgtagctgccgccgcggtgcgcccgggcggggtcgtagatgcgaatctccgcatcgccgaagccccaggccaagctgagcgcgatattgccgtcgggcgtgacgcacagcccctgcacatttccggggatggaatacaccgccgccggatgctccccaaatccgaaggggccgtggtcgtgggtcgcgtaggcgaacgcgagcgctgggttggtctcgccggaaggacagcgtagccagtggcttttcggggtggggtagaagatccggtgctggaattcgccgatgtagagcatgcccttctgcacgttcatgaacgcgggcaaaagggggatcgcgcggtgcccggtggcctgcaggatgtcgccgtcggctgcatcggcgagggtcgcgcggtcgatggccacaaatccgtcgcgaaccgtgagaaagacgaaggggcccgcggcggtgatggcggctccgtggccgcggtaaagggagccgctgggaaaaagcacctcgtggcgccgcacgtgcccgtcctcgctcacttggaagatcggcgacggtttccggttagcctcgtagccgctgaacagccaggttttttcgtcgtccagatagaagagatcctggggcacgaatccctcgttcaatccggggatcttgaagcagcgggtggccccgctgtagaacggcttgcaggttgcgcgcacacgctggcgcttgacgagcatgccgagggcaacggtggcggcaacggtgcccacgccggcggcggttttcgcaatggcgctcggcggaatggttttcttcatgagatgcctcccgtgcaagatagagcagcatggttggtcgtgcctgctgctattcggctctctccattgtcggcaatgggcttcaggggcgggacggtgaatatcgcttgttacgggcgagaaagcaatctgaagcctgggagacgcacctcggtgttgctgcattgtgaggttgcggcattgctgcaaaaatgctgcacttggccctctgcaggatgcggtttttgttcttgtccttacttgccgatgacccctagttgcgtcattgcccgtgagaagtgattgaacagaaaatgaaaaacgccctccggagagggcgttcgtttcaaatggtgcgggcgagaggacttgaacctccatggggttgcccccatacggacctgaaccgtacgcgtctgccaattccgccacgcccgcaggtgctatttcagctttgccaaaagagcgaagttgataatacccgacttggtgcgcgggcgcaagaagttttttcgggaatcgcctattctccgcgcaagatggtgtcggcggtttcggtgagggcggcatcggtttcgtcttgctggcggcgctcggccttttcctcatgggcaatttcgtcgccgatgacgtcatggaacccgtgggtctcgcgctcttcgcgctctttgaccttgcgaatctcgtcgccgatgtggtctttgatgtgcttctcctgctgctctacgtggtcgcggtaagtttccgtgctcatgggggcctccttttccaaagtatggttgagcgggggtttgggccgtgcggttgttgttcattgtgcggcaggtaaggcacttttctttttcgccgcgctaaccgtcaacgaactgcgacagccccgaaagatcacgtcctctccgtgcaggcgcagaaggagaagcaatgtgtctaaagcatctcccttttaatgaaggcgccaaggcgtggcacgataaaggcgagctctccccgcgcaggtgaataaataacgcctgcatctatcaggcgtcgccgataagactgcacatgcccctgggagacgccgagccgttcttgcaaatctgcgacgcgcgaaacgcgatcgtcttgggacattgcttccagaaaggtcatgtccgcgcgcgaaagaggtcgaagcatggcgccgaggacgtcgtggtcgaagtcgtagagcgctgcatcaattgcggattcgagctcatcgggcttgactggctctccttcggggcagtattccacgaggtaatagccaagaagttggagaagatagggaaagccttgggtcgcttcggcggccctgtctaaaagagcatcgtccagcgagcgattcgctcgcatgaaggcagaatgatagtaagcgcgcaccgatggtatggacagagggcctagctcgactttcgttgctctgtgcaggaaggtgagcgtggcctcgtcgagaacttccgaaacaatggcaggcaaaccggccataaccacggcgatattggctccttctccggcaagttcttggtaagtggtggcgaggagtcgcatctcgggcagctcggggcgcacttcatcaatgagaagcagaacgcccttttccgcttcggccaatcgttcgcaaatcatctcaagttttacgcggaatccgtagctttcgcgcacttcgtcagtaaaggtgagtccgaaagaaaatcctaaagctccagcactgaagcctttcaccggctgccttttctccgacacgaaggggcttccattgcgctgcagaaggtcgaggatgttgtctagcattgaagggccgcaggtggttcgcgccgtaacgaactcgttggcgtgagcgcgatcggccatttccagcaggagcgctgttttgcccatgcctcgctggcctatcaagagccgtgctcgctcgcgacttcctgggtggcgggataggccgcgagcgaaatcctcgatgacgttttcgcgccctactatgcgatcagggcgatttccaaaagaggggcgaaagatggattggtcgctcacgggtttcctccctgcggtcgaagaggttataagcttccgttattctccgttaagttccgttattctccgttaagttccgttattctccgttaaatctctcgaaaaggagaaggccgtttgctggaaacggaatatccagcctatcgagttatgcgagcgtgtcgctataatagttgcgatgagaagcgcaaagcgataaggcgcaacggtgcgacaacgcagggtgcaaaaagcatgacgctgtgagcgagacggtctggcgtgcgagccagtataggaaaggacgcgaacatgagcgaggcaacgccggtagtcggcatcattatgggatcggaatcggacatgccggccatggagccgtgtatggcccagttagacgccatgggcgtgccctacgaggtgaaggtggcgagcgcccaccgcaagccggccgtggtgcacgagtgggcggaaacggctcacgaccgcggcatcaaagtcatcatcgccgctgcgggcaaggcggcgcacctgggtggggtcgtggcggccttcacgccgctgccggttatcgccgtgcccatgaagacgagcgacttgggtggtctggactcgctgctttccatggtacagatgccctcgggcgtgccggtggcttgcgtggccatcaacggtgcgaagaacgccgccattctggccgtgcagatgatgggcacgaacgacgaggccatgctgcagaaggtggtcgacctgaaggcggagatggcctcctaggcgttctcgtcttgtaatgggtgcggtctgcgccacgcaatttgctcgacggtttgcgtggcagaggcggccttgttcgtggttgcaggcgattcggtctccggtttttcccaaaaattgcgtttgttagcatccgcagtggagctgcgggaaatctaaggggcgaaaatgacgccaatgagggcaaatggttcaatttcggggcagaaaatggacatgaggcgaggtcttccgtctcgaatgtctgcagaaaatgctaacaaccgcaatttttggcgaaaagccgataggcaaattgtcccagtagattggtcggcgggtaggtagtaagttgataccgacggaaagagcgtccgttaggctgacgccaacggacaggttgttccaacaggttgacgagagtggcggaacgaatatggcgaagaaacttctgatgggaaacgaggcgtttgcccacgcggctttggaggccggggtgaacgtggtggcggggtatcccggcacgccatcgtccgagctggtggaaaccgtggcgaagctgcacgcggcgggagcggcccaggacgtgcatgtggaatggtccaccaacgagaaggcggcgctcgagatgctggccggcgcgtcctactgcggcgcgcgggtgctgttcacctgcaagcaggtggggctcaatgtcgcttctgatgcgctcatgtcgctgaactacgtgggcacgggcggcggctgcgtgctgttcgtggccgacgatcccggtcccatttcctcccagaccgagcaggacacgcgccggttcggctccttcgcgaaggtgccggtgctcgatccggctacgcccgagcagggcttcgccatgatgcgggccgccttcgatctgtccgagcgctaccacacgccggtcatcgtgcgtcccacgacgcgtatcaaccatgcttccacgttcttcgaggtggccgaggaaactcacggtcgcccgctgcctgaagaaggtttccagaaggatccgaagtgggtcattttccccaaacgggctttcgaggcgcacggtgagatcaatcgccggttggcccaaatagcttgggactacactcacgaccccgcattcgcgcagttcaacgaggtgttcgaagggggcggggaaggtgagggcgcttgcgctcagaatggcgtcgaaggtgctggagcgtctgctcctgcggtgggtatcgtggctggcggcgtatcggcagcctatgctcgcgaggcgctgacgctcatcacgtctcaggccgctcgtgccggcatccccgtgccgcgctaccgcttcatagctgtggggacgccgtatcctttcccgactgagacggcggcggcctttgccgaggggctgaccgatgtgatcatcttcgaagaactcgattccgtgctggaagaggagatgctgaagctggccggggcgcgccatctgccgctgcgggcgcacggcaagctgaccggcgaggctaacgaccgcggcgagaacacgacggagaacatcgccggccgcttggggaggttcttcgatcgcacccaccgctccaatgggctcgccgccctggtggcgtccaccatcggcgccaacgatctcagctacgagggcccgttacccgtgcggccgccggtgctgtgcgcgggctgccctcaccgcggcagcttctatgccgtgaagcaggcgcttcgcggccgtgaggctgtgctgtgcggggacatcggctgctacacgcttggcaacgcccagccgctcgatgcggtggacacctgcctgtgcatgggcgcgggcatcaccatggcccagggctttgccgtggccgagccggacaagaagcaagtggctttcgtgggcgactccacgttcttcgccagcgctatgaccggtatcgcgaatgcagtgtacaacggccacgacgtcaccttcgctatcctggacaatgccaccacggccatgacgggcagtcagccccacccgggtacgggcgtcacgctcatgggcgagcggcgccgccccatcgtcattgaggaagtgctgcacggcctcggcatccagcacatcgggttcgcgaatcctcacagtctggaaagctccgtggcggcggcccgcgcggccatcgactacgaggggccctcggccatcatcttccgtgcgccgtgcattcagctgaagaagcccgatgctccagtgacgatcgatgccgacaagtgcgccggctgcaagaagtgtattacctccatcgggtgccctggcatcggcttcgatgaggggctgcgcggtccgaagtcgggcacgcgtggtcaagcttttgtggatacgagcttgtgcgatggctgcgcgctctgcgtgcaggtgtgccccttcgacgctatccaggatgccgtgggttttggcggcgcggtgccgacagagccggccatctacgccccgaaccccgatccgttccaaacggggccgatccctcgtgtactgactgatgaggtgaatgacttccaggaaacggagatagcaggcgagtcgaacgagacgcctggtgaggtgttgggggcagtcgaaggggtgccagtggcagaacgcatcgtgcattccgaagggccgactggccccttggcgggattgccgctgtcggaggaaggaggcgcgcgatgatcgacattttgcttgcaggcgtgggtggccagggtacggtgctggccgcgaaggtgctggcccaggcggcgcagagcaagggttggcaggtgcgcacggccgagactatcggcatggcccaacgtggcggtaatgtgacgagccacgtgcgcatggggtcgaacggggaggcgatttactcgccgctcatcacgccgggtacggccgacatggtcatcgctctggagccgggtgaggcggcccgcgcgctgccctatctggcgccgggtggtgtgctggtgacggccacgacggccatccacccggtgacggcggccctggcgagccagccctatcgtgccggcgacgtggtggcagctttggcgaactccctgcaggcggaggcgtcccgcgagcaagcggccgaatcgatcgttgcgccgaacaccgtgactgctgaccaggacgccagcaccgatggcgtggaaggctacccggtgcccctgttcatccccgtggacgacgaggccctcgtgcgcgaggccggtgccggctcccgcaagtccctcaacatgatgctgctcgccgtggccgtggcccagggccgtgtgccgctcaccgtcgacgagctgaaagatgcggtgcgcgcctgcgtgaagccccagttcgtcgccatgaacctcgccgccattgacaccgccgtcgccaacttcggataacagagggcctcggataatttgctctagctgaataacatgcaagagttctcatagacgtgttgcttgatttgtcaattaaagcatctataattaataccataattatggtaatgaaagtaggtgccttatgacagccgctgtggcagcgcttccgcttattcgacctatcactgatttgcgcacgcagttcaatgacgtgtgcgctcaggcgacggagagccaggaacccatcatcctcacgaaaaacggtgtgccggcctatgtgctggaagactgcgccgcttatgaggccgccgctcagcgcaaccgcatgttcctcgccttgcgtgaggcggaaattgaagagcgctaccgcccggaggcgctcacagcggaggaatccgacgcgcgcatggccgaaatcttcaaggtatgggggctcgactatgcttgatcttgcatggcgttcgcgggcgcagctcgatcgggagtccatcgccatctacctcggcctcgagcggggaatgccccaggcggccctcgatgcgataaagggtatcgatgcggctttggaaaccgtgcgaacctttccggacgtcggcggccactttaccgacgaccatctcgagcacgagtaccgcacgacgcttgcgggcccctacatcatctactaccgctacaacgccaccacgcttacggtgtaccgcatcatgcatcagcgtcaatccatcgacacctatagcctgattgagtattaacactcaatccagaatcagtataggttgccaaggtacaatccgaaaacagttgacctcaatcaaccctcaaccgatcaaattcggaaaaacatgaatcaaaaactcggaaaaccatgaatcaaaaactcggaaaaccatgaatagtttgatagtatagggtcgatgcaaagaagccgctcgtagagaaaaggttgcgtgggccatgcctcggaaaacgcttgtaaagaatggatatctgccgcgtcttgtggacgagcaaatagagcgctatctcgaggtcttcggggccgtagaggtggctggtacgaagtggtgcggaaagacgtggacggctttggcccacgcgcaaagcgtcagctatgtggatgaagagttggacatggctcgtgccgacccaaaactcatgctcataggcgatcgcccccacgttatagacgaatggcagcttgcgcctgcgatttggaatgcagttcgtcatgccatagatgacgagcgggggttaaggggagcgtggctgctgactgggtcgtccaccccgatctcgtccgatgaccaagagggccagagcaggcatagtggtgcgggtcggattggctctgtgaggatgtatcccttcagcttggccgagtctggggagtctgagcgttctgtctcgctccgcggtctattcgctcaccggtttcagccagcgaaagttgaaaacgatacgcgtcagctagctgagttgatctgccgtgggggatggcccgaagccctcgatctttccgctgaaaacggtcagctcgttgcaagagaatatctgcgtcttgttttcgaaaagagtgctcctaaacatggcaagagtggagaggtggcccgtcggttgtgcttgtcgattgcccgcaatttgggacagtctccaacctacaagaccatcatcagcgatatgtacggcggagaggacaatccatcatccctcgtaaccgagcagacgctcgcctcgtatctggagtttcttcgctcgatctaccttgtcgaggaggtgccgggctgggtgccgccaaagcgctcaaaaaagcgcctagcgacgaagccgaagcgctacttcgccgatccgtcgttggccgccgccctgctattgctttcgccggattccctcctcgcggatgggcagaccttcggtcttgttttcgagaatctttgcattcgcgatctcaaggtatacgcccaggcgatggatccttcgatgccggcggctgtttactactatcgggacgattcggggttagaggccgatgctgtcatagagaccctggatggtagatgggccgccttcgagttcaagctcagcgaagagaaggttcccgatgcggtgaaatctctcaggcggctgcggaagaaagttgcagaaaacccacgagcgcaggggcgtcctccagagttcctctgtgtgataaccggcattggctcgtatgctagagaagtggaagagggcatttacgtcgtgcccctcagggcgctggcagactgatacggtgtaccgcatcatgcaccagcgccaatccatcgacacctacagcctggtcgagtattaaaggactccaagcgggatttaccgcttggagtgaaagaattctcttccatgatagcttctaagttcctctaagtttgcaaggggttccctgcaaagacctattagaactacggaggggaggagtacgggtaattctgatttgggagaaaaattcgtggaacaatctcccgtagcggagatttttcaagcagagaggattatctgcaatcgctctaagaacgcttggcttcgaggcaattaataattcggaaagaaagattgcggatggcggtaatggctattggggtctggttctcgtactcttgtagacacgttgaggagaacgtgcttctgagtaagggagaagaggaggatctatggctcgcaatgaagagacgctccaagccgattcgcgtgcgacgattcgaggcgctgcgcatcttactcgccgcagctttattaaagccactacggctgctacggctttggccgcggttagctcgctgactgcttgcgctccggctacgagcgatttggccgctacgggtgaagatgctgaagctgcccatccggtcggtcgcgatatcgtgtcaggcgagtggaagacggcggcctgctggcacaactgcggtggtcgctgcctgaacaaggtgcttgtgcaagacggtgttgtcgtgcgccagaagaccgacgacacccacgaggacagtccggactatccgcagcagcgcgggtgcctgcgcggccgcagccagcgcaagcaggtgttcgccgaggatcgcatcaagtatccgctcaagcgcgccggctggagcctggacgctcccaatggcgagttgcgcggcaaggacgagtgggagcgtgtgagctgggacgaggcactcgatctggtggctcagggcctgactcgcgccaaggagcagtatggcaaccgctccatcctgctcctgaagggttggaatcccgagatgacccgcaccatgggcgccttcggcggcttcacgaacttctgggacaccaactcctatggctcctggtcgaagactccgttcgtcatcgggttccatcacgacaacatgcaggaccagactatcaacgaccgttacgacctgcgcaactgcgagaccatcgtcatgatggctatgaacccggcctggagcgctgcgggcagccaaatgtggaactactggcaggccaaggccgccggcgcgaagttcatcgtcgttgatcccatgtacagcgagacggcggccaccttggatgcggagtggattcccattcgcccggccaccgacatggccttcctgctcggcgtggcctacgccatgctggaggccgacgaggctgagggcctcattgactgggacttcctgaaccgctgcaccgtgggcttcgatgccgagcatatgccgtccgatgctaaacagcagacgaacttcaaggactacgtgcagggcgcctacgacaacacgccgaaaacgccggaatgggccagcgaaatctgcggcgcctcgcccgaggccatccgcaatctggcccgcgctatgggcaaggatcacaaggtgggcttccttgtgtcggctgcctcggcccgcgtcaacaacaccgacaacctgccccagctcgtcatgaccgtgggcgccatgggcggccatatgggcaagtcgggccacatgacgggttccaccatgcatgtgacttcgggtaacggcgggccggctctcattaaggccggcaaggacggtctgcccgagatcaagaaccccgtggatgaccacatcaatggcaacgaggtgtgggatgctgtcatcgatggcacttatactttcacgggcacgaagcactacgacccggccgagaagcgcgatatcgacatccacgtcatctaccactccagcggcaacaaactgcagaccaacgtgggcatggcccgcgccatcgaggcccatcgcaaggtggacatggtggtggcccatgcccagttctttacctcggccgcccgctacgccgacatcatcctgcccctcaccaccgagtgggagcgcttcgacggcctgttcggcggcacgctcgtccataagtcgaaccgcgagatgatggtggcctatcagcagatcgtcgaccccttgtacgaggcaaagtccgaccaggacattgcctgcgagctagccgagaagctgggcatcgcgcgcgctgatgtgtaccccttcgatgtgaagcagcagtatttcaatcagctggcttccatggaggtgtgcgacgaggacggcaaaacctatgtgccggccgtgggcatcacccaggaagacatcgacgagctgggcgtggaaggcgagccccaggagggcaagctggcctatcaggagctcaagcagctcggcgtgtatcaggtcaagcgcactcccgacgacaactacggctatattgctttcaaggacttcgtggaagaccccgaggctaatccgctggaaacgccctccggtaagctggagatatacagccagacgcttgcggacacgttctcggccatgggttgggacacggtgacccccattcccacctatgtgaaggtgaccaacggctacgaggacgcctccgcgtctggggctgagtatcccctgcaggtgatgaacccccactatctgcgtcgtgctcactcggtgttcgacaatatcggctggctgcgcgaggcgtggacgaacccggtgttcatcagcactgccgacgccgaggcggccggggtgtccgacggcgacacggtgctcgtctcgagcccctacggccagtgcgtgcgcaacgcctgcgtgtatgcgggcctcatgcccggcgtggtggccctgcctcacggcgcgtgggtggccgtggacgaagagactggtatcgatgcggccggcgccgacaactacctgacgggccccgcccccaacggtcagggcgtgtcgggctacaattccgcgctctgcaagattgagaagtacacgggcgaggctttggctcccgatgccgagcagccgcttcgcattgtctgcaaggatggtgagtaacctatggccgacgtgaaagagaacaagaacccgcagggcttctatttcaaccagcaggcttgcatcggctgccgtacgtgccaggtggcctgcaaagacaagaatgatctcgaggtaggctatctgttccgccgagtggaaagcttcgaagtgggagaatttcccaagcccgccacttttcactactccggtgcctgcaaccactgccataccccggcctgcgtggaagtgtgccctgccggtgctacctatatcaatgaggaagacggcacggtgcagcacgatgacgaggcgtgcatcggctgcggctactgcgtgaaggcttgtccctacggccacccggtgcttattgaggagctcaacgtggtgcatcgttgtgatggatgcatcgatctccgtgcggcaggggagaagccggcttgcgtggcagcttgtcccatgcgtgctttggattttgggcccattgaagagctgcgggccgctcatcccgatggcgtgaatgtggtctcggtgctgcccgagcccaccaccgatccctcggtggttatcgatgcccgtcaatcggctctttccggcgagccgaagcagctcgttctgtagccatcttcccgctgagccgggccgtgcgaccccccctcccgtcgcacggcccggctttccgcgctacactggtcgaaggtggaaggcggcgcgccgatgaagctgaaaaccaaatttctctgcctgatcgccgtgctgttggcggtgtcgctcggcgcgaacctggtttggacttccgcaaacaagcatagccaaatggaaaacgaactgcgagagcaggcgcgcgccctcgctcagcaaatggatgccgtctgggagttcatggtggccaatcaagatcgcctggcccaagtggccttcacggaagatggcgtgtaccaggggcttcactgcgccattgccggtcgcattatcggtcagtctttcacgatgcattccgattacacgacgcggttcgtgaatttcaacccacgcaataaggctggcgagcccgacgactacgaggcggccgcgctctccgcgttccacgacgatgcaagtcgtgccgactactatggctttaccgactatgagggccgccaggtctttcgctatgtggctcccatgaccatagaagaggcctgcctgcagtgtcacggcgaaccagccggcgagctggacgtcactggcgctcccaaggaaggctggaagatgggggacgtgggcggtgccatcagcatcatcatgccgcttgacgtgtaccaggccaacgagcgagagtccgtcgcccaagacgttttattcttcgccatcatgctggcggtgtgtctggtggcggtgtatgtggcgctgacctatttggtaacacggcctttgggtaagattcgcgctggcgtggacgaagtgtccgagggcaatcttgacgtgcgtctcagctatagcgaatcgtcccaggagatgagttcgctcacgacggccttcaacgacatggcccacgaacttgctgatgtttacgcagggcttgaagacgaggtggccgatcggacggcgcagctgcagcaggctaacgaggtgctcgagcagcagcgtcgccagttggaagcggttaacgctcagctggtggatgagaaccagtacaagagcgacttcctttctacggtgagccatgagttgcgcacgccgctcacttccattgtggcctttgccgatctgctgagcaagcatcgcgcaggagccgacgagaacgaggctaaggccttggcgggcatcgaggccaactcccaggcgctcatgctgatgatcaacgacattttggaaatgagccgtcttgatgccggccgcgtgaaactgagtcttgaagtggtggacatcggcgatgtggtgggtatcgtgcgtgccacggtagggcccctggcggctaaggagcatttggaatttacaagtgaggtggcgccggatgtgccgctggtacgaggcgatttcgacaagctcgtccatgtgctgcagaatctgtgcggcaacgcggtgaagttcacccctgacgggggtaccgtgcatcttaaggccgctttccatcctgccagttcaaaaagcgttgccgatgaggtatggcttacggtggccgatagcggcatcggcatagataccgcagatcaggaacgtatctttgagaagtttgtacaggtggattcgtcatccactcggcgctacaacggtacgggattgggactcgccatcgtgcgcgagtacgccgagatgcacggaggctcagtgagcgtggaaagcgaactgggccagggagcctcttttgttgtgcgcatccctgtatccggaccggtttcacgtgaagcagcagagaaggacgacaaatctgatagcgagcctagcggcgaagatctcccgaagggggaacaatcatgaatcgacccattaaggtaatgctcatcgacgacgatccgggcatccatgagagcctgcgggccgtgatcgaggaggcgggctacgagttctgcggggctcttggcgggcgagaggggcttcggctgttggatgatgagcgccccgacctgttgcttctcgatgtgatgatgcctggcatgaatggcttcgatgtctgccaacaaatgcgcgaggaaggacgtcgtattcccgttatctttctcacggcgaaaaatgacatcgtagacaaaagcacgggcttcaaggccggtgccgatgactacgtgaccaagcccttcatcgccgacgagctgttgctgcgcatcgacgcccacgtgcggcgtcatcgcggcgacatcgaacatgcgcgcaaaaattcaaccgatgtcagtgagctggtgcgccgcgaaccgtgccgcataggagatctggaagtgttcttcgatcgctacgaagtgcatttgcacggcgagacagttcctctgacggccaaggaattcgaaatacttgcgcttttggccgaaagtcccggagaggtgttcacgcgacgccgcatctatgagcacctgtggggcgaaacggcggaggtggacgagaattccatcacggtattcatgcgcaagattcgcgaaaagattgagaacaaccccagcgagccgcgatatctgctcaccgtctggcgcgttggctacaagctggcggcagaatagaggatcgtggagagagggcgtcatcgcactccgagtagttaacttacttaagttaaaggctaagtttgcccatttgcaatttttccaatgtcgccttcgcttgcgggcaagattttcgagttgttagacgtcttatgttgcgcgatgttcgatttcggcttggtttgcggggttttgcgccgaaaagagccggaaatcgtcggttgggcttcaaattgagattccccgaagtctaacaactcgaaaaaagcgtccgaaaacgagcgctagatttgccgggggcaagttgtagtcggcatgccctctcgcctcgcgcagaagggcccccgtcgattagatgggcgataaagtcatctttccagccaccacctcgccttttccctgcgcgattgtcgtgattcacgagtgcgagttgttgcccatttgttagaatggggcatactcgcaataaatgtgcacgaaggagagatgcgcgcccatggaaatgacgaaagagcagcttgagcttatcaccaatcagctggccaccattaaggagcggtcgccgttctacgcgaagaagttcgagggcatcgatgtgacggacgtgcgcacccaggccgacttcgaaaagctgcccttctctgagaaagatgacctacgcgcggtgtatccgctggggctgcaggcggtgcccgacgaggaagtcgtgcgcatccacagctcctcgggcaccacgggcacgccggttatcatcccctacacccagcaggacgtcatcgactgggccacgcagttcgcccgctgctacgagatggcgggcatcaccccgctcgaccgcatccaaatcaccccgggctacggcctgtggacggccggcatcggtttccagctgggcgccgagcgcctaggcgccatggccattcccatggggccgggcaacaccgagaagcagctgaagatgatgcaggatttgaagtccacggtcatctgcgccaccagctcctacgcgctgcttctcgccgaggagatcaccaagcgcaacctgcgcgacaagattcacctgaagaagggcgtcatcggctccgagcgctggggcgagaagatgcgcaaccgcattcaggacgagctgggcatcgagatttacgacatttacggcctcaccgaggtgtacggcccgggcatcggcatttcctgcgacgctcacgacggcatgcacatctgggacgacttcgtctacatcgagatcgtcgatcccgaaaccggcgaggtgctgcccgacggccaggagggcgagctcgtgctcaccacgctgcgcaagcagggcgcgccgctcatccgctaccgcacccacgacctcacgcgcatcgtgcccggcacctgcgcctgcggcagccgccatccgcgcatcgccacgctcaccgggcgcaccgacgatatgttcaaggtgaagggctgcaacatgttcccggcccaggtggaggaggtcatcaaggccaccgacggcaccagctccgaataccaggtgatgatcgaggccgtcgatggccacgacgtgctcaccgtgctgttcgagacgccgcttgaaggcgaggcgctggcgcgctgcgaggaggagctcgcgctcatcttcaaggcgaagctcggctgcacgccggaggcgaagggcgtgcccatgggcgagctgccgcgttccgagaagaagaccaagcgcatcttcgacagccgctactaagcgcgtcgcattcgaaagggggcgagagccatcattacgagcttgagtgagaagcagacgatcctcatcgttgatgactcgatgctgaatcgcgcactgcttgccgacatgatcggcgatgcctaccgcatcatcgaggcggaggacggcaagcaggccgtggcggcgttgcagaaagagggcgcgggcatatcgctcgtgctgctcgattatgtcatgccgcagatgaacgacttcgacgtgctggaggtcatgaataaaaacggctggatcaaggacatcccggtcatcatggtgtccgccgagtccgacgccgcctatatcgaacgcgcctacgagctgggcgtgaccgacttcatcaaccgcccctacgacgtgaacatcgtccgccgccgcgtcatgaacacgctcatgctgtaccagaagcagcgcacgctcatgggcatggtggccgaccaggtgtacgagcgcgagaagtccaacaacctcatggtgtacatcttgtcgcacatcgtggagttccgcaacggcgaaagcggcatgcacgtgctgaatgtgcaggccatgaccgagatgatcttgacgcagctcatgcgcctgaccgatcagtatccgctgaccgccgaggacatctcgcttatcacgatggcctccagcttgcacgacatcggcaagatcgccatccccgaggagattctgaacaagccgggccgtttcaccgacgaagagttcgccatcatgaagacccactccgccgtgggctccgatatgctggacgatctggagctgtacaaggacgagaagctagtgaaggtcgcgcgggacatctgccgctgacaccatgagcgctgggacggccgggggtaccccgatggcctcgtgggtgacgacattcccatatcggcccaggtagttgccctggccgatgtgtacgacgcccttacgagtcgccgcgtttacaagccgccgttcagccacgaagaggccctgcgcatgattcgcgaaggggagtgcggcgcgttcaacccgcttattctggaatgcctgacggcggtggcgggtgatttggagaagcgcctgaaccacggcatcacgggccgcgagatttcgattgactcgttgcatttgtccgaggcgacgctggataacggcgacgccgaggcctcgagccgcactctcgagctgctcgactacgagcgcatgaagtaccatttcttcgcttccatgagcaacgaagtgcagttcgagttcaccgaagagccgccgatgatcgtgctgtccgactggagcgatcacaagctcgatctgcccgaaattgtcatggatccctacaacgacgaggccttctgcgcgacgttcggcaaggagaacctggagaagctcagccgtcttcttcgtgccaccaccattgatgatccggtgatcgatatggagatggaagccaccgtgggcgacgagctgcgttggttccatgtgctggcccgcgcgctgtggtcggggccgtccgatccggtttacctgggctcgatcggcaagctcatcgatgtcgacgatcgccaggccgagctgatcgacctgcagttcaaagcctatcacgatccgctgacggaagtggtcaacggcgccttcgcccgcaagatcatcgccgagcgcttgggctcgggggaggcgtgcgaccgtcatcgcgaccgccatgtgctggcgctgtgcgacctggatttcttcaagcaggccaacgacacctacggccaccaattcggcgatcgcgtgctgaagcacttcgcggagcgcctgcaggaaagcgtgcgcggcgaggacgtcgtggcccgtgtggggggcgatgagttcctcttgtgcatggaatgtcccgtcgatccgcgtccgctgatcgaccgcatccatcggtcgctcgagggcgacttcgagggcttcccgttgtcggtttccatgggcgtggccattgccggcagcgatgtgcgcgactacgatgagctgttccgccgggccgatgtggcgctgtaccacaagaagcgcggcggccgcagcgggtacgtgttttacagcgatttagacgaggaagagcgagatttgttgcttgaaggggcgcatacggcgctctcgggcatcgacagagacgaatccgaccagtagactgtcacccaagggataaaaggagaccgagatgtcgttggagattgcttacgctgccatgggcggcgatttggaaaccgtgcgcggacgcttgcttaccgacgagcgcatcgagaagttcgcgaagatctttttgcaggacacatcgatgcagacgttggaaagcgctcttgaggcgggcgaccttcccgaggcctatcgcggagcccacacgctgaagggcgtgagccgcgacttgggcttcacgcccctgttcgaggccgccgccgcgctgtccgacgcgctgcgtttggatgacgccggcgtgccggccaacatggaagcggttcccgagcttatgccggccgtgcgcgacgcttacgccacggtcgtcgacgccatcgctatcatttaacaaaggaacacagcgaatgactgaaacagacaacaaaacgaggtacggccgcattgccgtgattcttatcgcgctggccatagtcatcgccgcgttcgtttcgtttatcgcgatgaacaacgagcgcatctacgagcagaacaccaagtaccttcagggctccaccgagcagtcggcgcggcgcatcagcgagtggatgaccgactctcagactgagatcaagctcctgtcctccatgtacgagagcacgcttgcgagcgtggacgagattagcgctgccggtatcgagcagttggcgaactacacgaagttcgattacacgacgatttctctcagcgatggcctcaccatcgatgacaagggccaggaggccgacgcgagcgatcgcgaatacttcgcgcggggcatggaaggcgagtcgggcgtctgcgcggtcgagaattcgctgttctacaacgacctctccgtcattttctacacgccgctttacttcaaggacgaggtggttggcgtcatttgcggcgcgtatcgggaagattccatggagaagttcctgcgcacctatattttcaacgagcagaccaacacctacttgctcgaccgcgccggcgacgtgatggcccattcgtccatcacctataccagcggggtgaaaaacgccgtcgatctgtatctcgaggacgaatcctcgggcaatatctcgcgcaccgagcaggaggcgtctttggaaagcggcgtgtccgtcaccttcaactacaagggggattcgggcgcgggcacggcgtacgtcatgcccatcgagaactacgactggctcatcatgcgcaccttccccagctctatcaccgacggcatgcagagcagggcgaatgcggccggtctcatgttggtggccctcgttggtggcgcgttggccctggtggcgggcttcctgctcgtgcagaccatgcgccagcgccgtaagctcttaagcgagagcgcccatgtgacgagcatcgtgaactcttcgctggcgctcttccagcgcttcgcggtgatcgatctggtcgctaacacctacgagtatctgaaggacgagggcatcaaggacgacctgccgcgcaacggcgaataccatatgttccgctactactggcagacgcgcttctgcgacgacgaggaagccgagcgcatgaagaccgagctcacgccggagcacattcgcgaacatctgacgccggacacgacgtatctgcacttcgagtatcgcctgaaggatcccgacacgggcgaggttcgctggttgcaggcctccatgctgccgctgcagcgcgacgcctccgaccaggtgacgagcgtgctgctttcggtgcaggatgtcaccgacgtgaaagagcgcgagattgcgaaccacaacgcgctggaagacgcgttccgcgaggccgagcgcgcgagccgtgccaagaccgacttcctcaattccatgagccacgacattcgcacacccatgaactccatcatgggattgaccgccatcgcctcgatgtatctggacgacccggagcgcgtgaaggactgcctcacgaagatcaccacctcgagccgtcacttgctcgggctcatcaacgaggtgctcgacatggcgaagatcgagagcgggaacttggggctgtcggaggaggacttcgatctgccggagacggtggaaagcctcatgtccatcatgaccccccagatcaacgacaagaagctgaacctgaaggtagagatcgccgacatccagcacgagcatgtggtgggcgacccgatgcgcctgcagcaggtgttcgtgaacatcatgggcaactcggtgaagttcacgcccgaaggcggtaccgtgagcctgcgcatcaaggagctgccgagccgcgtgaagggctcgggctgctacgagttcacgttctccgacacgggctgcggcatgtccgaggacttcgtgaagacggtgttcgagccgttcacgcgcgccaacgattcgcgcgtcacgaaggtggagggcactggccttggcatgtccatcgtgcgctcggtggtgaacctcatgaacggcaccatcgacgtgaagagcaagctcggcgagggcaccaccttcacggtgacggtgtacatgaagctgcgcgacggcgacgaccaggatctgacgcctttggagggcctgcgggtgctggtggccgacgacgaggaggctgccgccgaaagcgcttgcgaggtgctgaagtccatcggcatggagcccgactacgtgttgtcgggcgaggacgccgttgaggcggtgcgccattcggtcgaggatgagcgcagctacgtagccgttattcttgactggaagatgccgggcaaaagcggcatcgaggcggcccgcgagattcgcgagattgtctccgatgacatgcccatcatcatcctgtcggcctacgactggacggccgtcgagcaggaggcccgttcggtgggcgtggacgccttcattgccaagccgctgttcaagagccgtctcgtgcatgtgatgaagggcctgctcacgtccgaagaggagagcgagccgaccagcgagtacgaggtgctcaagcagagcgacttcagcgggcatcgcgtgcttttgaccgaggacaattccatcgccgccgccattgccctggacatcatgggcatgacgggcttggaagtggatcatgctgagaacggccgcattgcggtggagaagctgctcgacgcggagccgggctactacgacctggtgtttatggacattcagatgcccgtgatgaacggctacgagtcggcaagcgctattcgcgccgccgccgagggcaagggcctcgacgatacgacgattacgccgcgtcccgatctgggcgaaattcccatcgtggcgctgacggccgatgcctttgccgatgacgtggcccgtgctcgtgccgccggcatgaacgcccatatgtccaagcctatggaaatcgagcttctggtgaagaccctgaaggagtggctgtagcggtttggcgcgcagactgacataccgccgtgcggcgaccgtcgttgccgtggccctgatgctggcgtgtgcggccctgctggtggcctgcggcggctcgtcgggaagctcggggggctcgggcggatccggcattcccggaggctcgggcgacccgaacagtggcgagagcactacttcgggcccggcctactccgtgcccggttcggtggctctggtcgccttcaacgagggcgccgcccagaccggcaacgagtgcgccatcgacacctcgcagctggcccagggcgtcgtgggcgcttccgcgagaaacgatgcgcgcctgaagttccaggtggtcaagggcgagatgagctacaactacgatttgcccggcgacggcacgcccatcatcgtgcccatcaacatgggcgatggcccctacacctttcgcgttatgcagaacacctcaggtaacaactacgtggagctgttcagcgtcatcgagaacgtgaacctttccagtgagacggcgcccttcctcgtgccgaacatgttcgtgaattacaacgagtcctccgccgtggtggcgaaggcgcgcgagctggcccagggcgctgccaatcagggcgatgtcgtgcgtaacatctaccagtgggtggtggacaacatcacctacgatcacgacaaggccgcccagttggcctcggccacaggatacgtgcccgatccggacgcaacgttggcctcggggacgggcatctgcttcgactacgcatcgctgggcgcggccatgctgcgcagccttggcattccctgccaagtgattaccggctacgtttctcctgatgatgtgtaccatgcatggaacatggtatatattgacggagaatggataagcgtcgagataagcattaagccgaacagctggacgcgcgtagatttgacctttgccgccagtggcgccgcaagcaccattggcgacggcacgagctataccgatcgttacacctactagaagaagggcaggggacgccatggccaaaccaaaactcgatagcgcaggcatcagcctcttctgcgagagcgttgccatgatgctggcggcgggcatccagactgacgaggccgtgggaatgctctccgaggacattggggatgtggctctgcaggcgacctgcgagagcgtttacgggcgcctgtgcgccggggatacgctggcggtcgccatgaaggcgtccggcgccttcccccgctacgccgtggatatggtgggcgtgggcgaggcctcgggccgcctggaggaagtgctgcgctccctcggcgtctactacgacgaggaggaccgcctcttcgcgaagattcgctcgtcggtgggctatccggcggcgcttctgtgcatcatgagcatcatcttggccttcacggtcatcatcatcctgccggtgttcgaggacgtgtacgtttccatggccggctcgctcaccgacggctcctcgggggccgtgggcgtgtcggtagctatcggctgggtggccctcggcatcacgctcatctgcgccattgtggccgtgggtgctgccatcgcctgccgctcggaagcggggcgcatcgcggtgatgcaccttatggagaagttcccggccacccgtcccgccatggagcagctggccgtgtcccggttcgcctcggcgctggccgcctacaccgcctcgggtatcaacaccgacgaggccatgcggcgcgccatcgatgtggtggagcacgagggacttaaggcgaaggccacggccgcctacgggctgatgattgacgcggaaagcccgcgctcgctcgcccaggccatcagcgaggccgaggtgttcgagcagattcacgcgcgcctgctcaccatcggcacgcgctctggctcgctggacgcggcgctcgaccgcctgtcggccaacttcttcgacgacgccattctgcagattgatgccgccatcgacaacatcgagccggctttggccgccttcctcaccattgccgtgggggccacgctcatctcggtcatgctgccgttgatcggcatcatgggttcgatcggctagccatcatgattcacggtaagacagcccagatgcagcagcggcgcacccggcgggtggttgccgtcatcgcggccgtggtgctggccgtgctgctgtggtttgcctgggatatgacgagcgcccagaccgaggcccaatcggcggcttcggtgcgcacggcggtgctggatgcggccatgcagtgcgcggcggtggaaggggcctatccggcgcgcctcagctatttggaagagcattacgggctcattgtgaaccaccaggattacgcggtcacctatgaggccttcgcctccaacgtgccgcccagcgtggtggtggtgccgcgatgaccgagaagctgaaaggggcgacccggctcgcctcgtcgagcaagacctacggggccggcggtgtgcggcgtcagcgcgagcgcgatttcgggcgcgtgttcacagggcttctgttcgcgctgttcgtggcgacgctgctgatggccatcctggccggcaccgacgtgtatcgcgggctgaaccgcgagggagacgcggccgacaaccagcggctttcgcttacgctgcttgccaacgatgtgcgggccaacgaccagattgatgcggtggcctgcgcttgggtgaccgaagatgcggttgatatggtcgtcgcccaaggtcgcgaggagctggggctgcccgaagcagccggcgccagcgacgcgcgttgccttttggacggcccggccctggtgctgcgcgagacgttgccctccggggtgtacgagacgcgcctgtaccgctacgacggcgtcatcatggaggagtacgccctggccgacgccccctacgacccgtcgaaggccacggccatcgtgcggtcgtccgtcttcgacttctcctacgggggaggattgctgaccatcgtcaccgatgccggacagacgtcggtggctctgcgcgcggcgggaggtgatgcgtgatggccggaggatctgagagtcgtcgctccatggcgtccgcttctgtggccgcccatagggccgaggcgaatgtcgccgacgcgcgcctggcccgttacaacgaccgcatcggacgcgtacgcaaggagcgggccgtgtggcccggtgccgccttcatcgtggaggcgctgcttctgctcgtgtttctgacgggctcgctggcggtgctcatgaacctgaacgccgaggccgaccgcataggtcacgagagcgccgatctgatggacgggctcgtgctggcctcgaatgtggccgaggagttcgccgccgatccgattgccttcaaggaagcctacgaggccgaccccatggccgatcgctggttgtcgcagccggcgcacgaggtagagaacggctccgacctcttgtccaccgagtgcacgtttcgcaccgaggacaccgaagccgggacgatgcactatctgacgcttgaggtgtggaaggtgcgggtcctcaatgattcggccaaggcggccgaggaaggcattggatttgccccgggcggtctttgcttcgagaagtgggaagagagccccgcgtacacgctggagacgtcgcgctacgtgcccgccgacggtgcccgtaccgcccgttcggctgccggtgcggccgacgatgcggcgtggtcggtcgtgctggatgatcctgcggcgccgcccgtggtgggcgcgaccggcggttcggccgtcgatggcgcggacgcggctccaaccgaaggggaggtgtcccatggctaagccccacggctccgtgcgcatcggtcctatcagcctgttcaccctcattattgtgctgtgcctggccgtgctcacggtgctttccgttacgacgtcgctggcggagctttccaccaccgagcgccaagcggccaccactactgaaacctaccagttggaatccgtcggccagcagttcgtcgccgacgtggacgccgcgttggctgaaggcacattggaggacgttttgcagcgctacagcgattcgactgtccgcgacggcgagctcatctcggctacgttctcgatggaaagcggtcgcacgctggccatcgtgctgcggattcaaaacaatacctacaccattgagcaatggaaagtcacaacggaatggatcgacgacggcacaggcgagaacctgtggctcggctagacagataaggagagcttctatggaactgaaggcactgctgcaggaaatgatcgacaagaaggcctcggatgtcttcatcgtcgcgggcctgccgctgacctacaccgccgacggccgtcaggtgcgcatggacatggcgccgctcatgcccgccgatactaaggagctggtggacgccatctacgagctgtccggccgcgacgagcggatcttcatggacggccacaaccatgacgatgacttctccttcgccgtgccgggcatggggcgcttccgtgtgaatgtgttccgccagcgcgggtctttgggcgccgtcatccgcgtgatccccttcacgctgcccaaccccgccgactaccacatccccgacgacgtcatggcctgcgccgacttccagaagggcctcgtgctggtcaccggtcctgcaggcgccggcaagtccacgacgcttgcctgcatcatcgacaagctgaacaaggcgcgcacggggcacatcatcaccatggaagaccccatcgagtacgtgcatcgtcacgagggctgcatcgtcacccagcgcgagattccctccgatgtcgctacctacgccgaggcgctgcgtagcgcgatgcgcgaggcgccggacgtcatcctgctcggcgagatgcgcgatcaggagaccatcggcacggccatgaccgccgccgagatggcgcagcttttgttctccacgctgcacaccaccggggcctcttccacggtggatcgtatcatcgacgccttctcggccaaccagcagcgccagattcgcatgcagctgtcgctcgtgctgcaggccgtggtgagccagcagctcgtgcccacggtggatggcgatatcgtgccggtcttcgagatcatgaccgccacaccggctatccgcaacctcattcgcgaggagaagacccaccagatcgactcggtcatcgcttcgtcggccggtgccggcatgcgcaccatggaccaaagcctgcatcgcctggtgaaggagggcacgatctccaaggaagtggccttgcagcacgccatccaccaggaagccctgaagaagcgcttcgaaacagaagggatgtagcgttccgttcgcccttcgggacgaacggaccggccgacgctgcggttccgactggcacctgcccttgccattcagcgctttccctcacggcccgaaggccgctcggccgcgcttcaaggcaattgcaggcaccagtcgaaacctcgctgacattgcgaacgaccagtgagataaggagtaggaattaatgggtaaatatgagtggagggtcggtaaagagtaccgcgagattcgttatgagttgtgcgatggggtggcgaagatctccattaatcggcccgagcggcgcaacgcgttcacgccgctgacggtgatggagatgtacgacgctttctccgaggcgcgcgacgatgcgtccgtaggtgtcattctgctgaccggtgtgaaccacggcggccgccacgaggacgaggcgttctgctccggcggcgaccagaagaagcgcggcaacggggggtacgtgggcgaggacaacatcccgcgcctgaatgtgctcgatttgcagcggctcatccgcgtcgtgcccaagcccgtcatcgctatggtgaacggctacgccatcggcggagggcatgtgctctctattctgtgcgacctcaccattgcggccgagacggcgaagtttggccagaccgggcctaaggtgggctctttcgacgccggctatggcgcggggtatctggctgccatcgtgggccagaagaaggcccgtgagatctggtacctctgccgccagtacacggccgaagaggcgttggaaatgggcctcgtgaacaaggtcgtgcccttcgacgatttggaagacgagtgcatggcctgggctgccgagatgatgcagttttcccccacggctctgcgcttcatgaaggcatcgttcaacgccgctaccgacgggcttgcgggcctgcagcagctggccggcgacgccacgcttctgtactacaccaccgacgaggccaaggagggccgcgacgccttcaaggagaagcgcgctcccgacttcacccagttcccgaaatttccgtaggatgcttcgccccctgccgcagccggcgggggcttcctgtgtcctgttcagcttatcgcgcccaaggagttccacgagccgttcatgatcgatattttcgaaagcacagcgcagctgcgtccggaagccgtgttcttcacggcggtcgatcggcgcggtaacgagacggcctacacctatcgccaggcgaggctcatcgcctctcagcttgcgcgacggctgcgggataagggcgtcttcccaggcgatgtggtggcggtggatttgcccaacggccccatgtacgtgttccttgccttggcggcggcctacggagggttcgccctggtggcgctgaaccatcggctgaccgatgccgagaagctcacgcgcgtgctggaactggagcgggcgggattgcgcgtggcctacacggtggacgcggccggtgagcccaagctcttcgaagcggtgtgcaactcgcttcttcgcaacgagcgggcgggacgggtggacgactccctcggcggctcagtcgaggacgccatccacttcgccgaacgagccgcccatgtcttcgattcgagtcatcgggccctcattatgttcacctccggcacgacgggcaagcccaaggcggccgagctcacctggggcaacctcgtggaggcgtcgaaggcgtcgaaccgggtgctttccgggcgcgttcgggggcgcggtctgtggcaggcggtgctgccgtttttccacgtgggcggcttccaagtgctcgtgcgcagcgtctgtagtcgctggcccttgcgcatctacgagcgcttcgacgcggcggcggtgctgcgcgatgccgaggtgatgcacgccacccacatctcggtggtggacaagatgctgcaggacatgctgaacgcgcggccaaacgcgctctcccagtacgagtgcgtgctgctcggcggcggcccgctgaacgcgaaaaccgtggcccgagccctggaggccgaagggcgcgtgtatgccagctacggcatgaccgagacgtcgagccaagtggcgaacacgctgatcacaccccagttcacgggaggtatgcggcttctgccgggttattcggcccgcattgtggagccggatgcggagggtttcgggcgcctcgccctgcgcggcccaggggtgttcggcggctacgccaacgcccgggcggccttcaccgtggacggcttcttcctcacgggcgatacggcggcgctacacgacggctgcctttatgtgcgcgagcgcaccggcgacatgttcatctccggtggtgagaacgtgtatccggcggaaatcgtcgacgctctcgtgcgcgttcccggcgtggccgatgcctatgtgttcgggctacccgacgcccgctggggtcgtcgtccggcggccgtggtggagctgacgccggatgcgccgctcatcagcacccgggccttgcgggaggcgctttcccagcggctgtcgaagctttacgttcccgagcaaatatccattgtggacgagttgccgcggtcaggcatcggcaagatcgaccgcgctgcttgcgaggcgctgttcagcgagaacatcgacatccggcgcgtggtgcttcaccacgggcgcctgccgttttccaagcctttcaaaacgccgaaggagacgctgacctaccgagatacggtcattgtcgaggtgatcgaccgcaagggccgcgtaggattaggggagtgcacggccttcgacaccgattggtatctgcccgagaccctcggtgacgatctgcgtgtgctgcgcgagacgctggcgccccgggtcatcgccggcacctatctgcatccgcgcgaagtggcggccgacctgttctcgctggaaggcgcggaggcgtttcccatggcggtgagcgctctggagatggcttgctgggacctgtatggcaaggtcacggaaaagcccctctggaaactgctcggcgaggagttcgaccgtatgacccgcgtcgcggcagctttcgagggggaggatgtcgcggtgggttcggcgtgtcccggcgaccggcgcggggcgacgcgcaaggtgtacagcggcgcggtggtgggcctgggcacgcccgcccaaacggtggccgaagtgcgcgagtgcgtggacgcgggctaccagcgcattaagttgaaggtggctcccggtcgggggcttccggcggtacgcgcggtgcgtcgggcgttcccgcatctgcttatcaccctggacgcgaaccagagcttcggcctgcacaacctggccgagctgcgctcctacgacgagctggatatcggctggatcgaagagccactgaacctggccgccgccgggggcgagcgggctttgcgagaccctttcacccgactcgcgtcgttccagcatacgctggccatgcccatctgcgtggacgaatccttcgtgaacgccgaagaggccgccggcttgttcgagcatcccgagttgcgctgcgccatggtgaagatcgggaagttcggcggcatcgagcggtcgctcgccttcgtgcaccgagcgctggccgaaggccgcgaggtgtgcatgagcggtatgtacgataccggcgtgtcgcggtttgcccacgcggccttccaaacgctgcccggagtggtcattcccggcgatctgggcgccacggcgcgctacttcgacgccgacctcacggtgcctgcttataccgtccccgacggcatcatcacgctgaacgccccgggccacgagacgggcatcggctgctcgctgaatgccgcagctgtggccgccgttcggcagcatcgctatgtcatcgagtaggcgcggacgcacctggctcatctggcaggccttgtccctaaaatcgtgaattttgagccaattaaccgcaaggcaacaatcgttcaggcgcaccatttatactttgacctatcgttgaaacactaagacggaggatttcatgggcggctttttcggagcggtttccaagcgcgacgtggtgatggatgttttcttcggcgtcgattaccactcgcatctcggcacgcgtcgagcgggcatgatcgtgcttgaccacgaggatggctaccagcgtcagattcactctatcgagaacacgccgttccgcacgaaattcgaggacgacatcgtgcgcttccacggcacgagcgccatcggatgcatctcggacgccgacccgcagccgctgctcgtgcgctcgcatttgggcaccttcgctatcacgaccatcggtgccatcaacaatgccgaggccttggtggaagagtatttcgaggatcacgatgcgcagtttatggcgctcagctctggcgcggtgaactcaaccgagctggtggcggcgctcatcaaccagaaggatgacctggtcgccggcatccagtatgcccaatcgaagattgacggatcgctcacgctgctcattatgaccgaggacggcgacatcattgcggcccgcgacttcatgggccgcttgccggtgctcgtgggcgccgacgatgacggtcactgcgttgccttcgagagctttgcctatcacaagctgggctatcacgacgagtacgagctgggcccggcggagatcgtgcggcttacgcccgatgccattgaggtgctctcgccggcacgcgacgagatgaagatgtgcgcgttcatgtgggtgtactacggctacccgaactccaactacgagggtatgaacgtggaagtgatgcgctaccgcaacggtgccatcatggctcgcgacgaggcagcgcgcggcgcgtgccccgaggtggacttcgtggccggcgtgcccgattccggggtgccccacgctattggctactccacggaaagcggcatgcccttcgggcgtccctttatcaagtacacgcccacctggccgcgctcgttcatgccggccaaccaggatttgcgcaacaagattgcgaacatgaagcaggtacccgtgcccgagctcatccgcgacaagaagctcttgttcgtggacgactccatcgtgcgcggtacccagctgcgcgagacggtgaacttcctgtacgactcgggcgccgccgaggtgcatatgcgcagcgcgtgcccgcccatcatgtacagctgcaagtacctgagcttctcgtccagcaagtcggatatggacctcatcgcgcggcgcgtagtggatcagctagaaggtgaggagggcgtggcccatctggacgagtacgccgacgcccgcaccgagcgcggccagtgcctgctgaagaccatctgcgaggacatgggtttcgattcgctgagctaccagagcctccagggcatgatagaggccatcggcatcgatccggagaaaatctgcacctactgctgggacggccgcgagtaactagcgcatgaacgcgtcggcttcttcgaggtcggttgcctgggtttcgacctgcttgcaatcgagggctgcggcttcggctgccgccctcgctttttgggccgcgatcttttcagcgcgcaggggcaaatactcgctgacgacgatgccgacgaagatgagggcaaatcccaggtaggtggaaatcgtcggcgcctcccccaaaagcaggatggagaacgtcacgccgaacaccgattcggtggcaaggaatagcgccgcctgggccggatcaacgcgggccacggcggtgttttgcaatcctagggccacacaagaggcaaacacggtgatgtagatgaggctcatccaagtgtcggcgcccaactggctgaagttgggtacgggctcggtgataagcccggtgatgagtcccagcaggcccgccacgatgaactgaatgaccgtgagcagcatcatggagcgtcccggcgcgtacttcgccgtgtacagcacgtggaagctcagccagagagccgaggccagcgtgatgaagtcgccgaagcgcagcgagaactcgccgatgccggcataggccacgcaacccacgccggtgacgcacaggatggccgccgcaatgttgtagcgggtcggtcgcttccgaatgatgatccacccgaggaaggggatgatcacgcagtagagcgtggtgagaaacgagctgttggaggcggtggtgtcggtgagtcccgtggagttgaaccagtaggagaggaatagaaagacgcccagcaccgcgccgtcgcgcagatgtccgcgcttgttgcgggcgaaggcgcgggagatgcgcggcgccgtggcaatgccgaggatgatgccggcaaaggtgaagcgcacgcccacgatccaagcgggcgggaattcgtcgacggtagacttgatgaccaccgtgcccatgccccaaatggcggccgccaaaagcagcgccgccttgtaggcccatgagggcaatccgttttgtctgatctgggaaagcataggcggcatcatagcacggggcacggcgatcgtccgtgtgcgatgcgacaaatcgtgctggaggctattgggacggcaaacatgtgcaggaattgtgccgaatgaggtgaagtgtgatcgaagacttgcaattcgcgctcaggagagtaatatatctctttgccctttgaggcaacccattgcggggtggagcagtctggtcagctcgtcgggctcataacccgaaggtcggtggttcaaatccgccccccgcgaccaagaaacaccaggtcagtcgcttgcaagtggctgacctttttcttttcttcccgcaggtgtgcgagaagtgtgcgagcccaccagtagcaacttacaagaaatcctttagagatcaatctgggtggaatgcggcaagtctttctgacttgccgcattccacagtttcctagcgtcggcagcaaccgtggcggtgatggtggccgggcttgcggtcgcggcagcccttgacggcgatggtgcgatagtcgacgcccatggccttgcagttctcaatcaccttgccggtcagcttcagcaggcactcgcgctccttgtcggtgaggccctccagcacctcgtcggccgcgcgatcctcggcggccaggcgcttctcgacgaccatggtgcccttgtcggtcagcgctacggacagcttgcccttcttgctggtggcaaagcgcacgtagccgttctcctgggctttctcggccacgcgaacgacctcgtggccgtcccagccgagatgctccttcaacttcttcagcgacagtttcccgtcgccgaacttgtagagcaccttacacatggcgccctgtccgcttttgaagctgcgcgggccgcacttgtgcatggccagcttgctgtaattggtcgccactttcagttgatgcagaacctgagtcgattcagtcatgatgagccttctttcgtcgatggacgcccgcaggcgcaggcgcgacctccatcttagaagccttcgacgtcgccgcgccagaagcagccgtcaaccattaccaacccgttgctgcttcaccatggcgctattgcgcgagaaggtgtcgctacttcac

SEQ ID NO: 10659 - DNA, 141250 bp, Unknown; identical to SEQ ID NO: 10658
  gut microbiota DNA sequence

SEQ ID NO: 10660 - DNA, 2371 bp, Unknown
  gut microbiota DNA sequence
gattttcaggaaagaccctttcggatatgttgccgagctgtggtgatacgtcaacccgtccgcagtacgcaccccgggcttgcgatgtccgagcacatggagaacttttccggcaccactcgaactatcagcgattccagactcttccgagcgcttcgacgaatgcgtctccgacaagacaacgcgacaagcgccaagcagctcagcgagttcttccggcacaccatcctctagcgcaccatcaatgatttcgacaacggtgcgttttgctgaggacgaatccaccagaacggccgatgacggaaagatccgaaaaggcagatcatcggtctgcatcgtcttacggcaatggaaaagatgcaaggcaatgccattgcgagcggaccacaacctccagaattccaaagcagtctcatgacttaagcagatgcaccgcattgcccctcctttacttagtagtgtattactgtatgctatatcacaatcgagcgaaatataccagagggaaattcgtctgcgaaagatgcggtagtcgagcaattggtcacagaggcaaactcaggacaaggacaaacggaggcccactccgtccgggatcaaagcacacaagggcaagcggaagcccatgccatctgggctcaaagcatttcaatcagtgaactaaaatggcgcaagattttcgagttgttagagtttcgcagacagcagccccaccccctacggtatctcattttccacatcacatctctgacctgggggtattcaccatgctcggacgcattgatgaacgtcatggcgacctacctcggcatagcgccgaacaaaagcctaacaactcgaaattatcgtccgagaatttggcaaaggttggcaggagcaagaccgccagaggcaaaatagccaacagcgggatcggggaggcccgggcgcgggttgcaggcagataggccagaaggatccgggcgcaagctgcaggcaggagaaaccggggagacccgggcgcaaactgcagactgagggggccaggccaggccaaacgcaagctgcaggcaagtgcgaagtagcccggacagagcggcggaaaaacggggagggcccgccatagcaggccctccccgaaagtacgtcaacaacgacgaagcgtcccgcgagacccaagcatcatggcggcacctctcctgacgagacatcgccgcccaccaatgcgagactcacaaggcccgggcatcgggccgccccctcccccagaaacatgatggcggagacttcggcccatgcaagcgagcaccccgcaacgccccggtaaatgccgcggaagagactagtactcctccagatcggcggggttcacgcggccgcggaaggtgcggtagatgaccacgtggtacacgagaacgagcggaagcccgatgcacaggatgatggtcatccaggtgagcgacagctccgacgatgcggcgttggccaaggtgatggccggccccacggaatcggccgtggcgttcacgagcacggggaacatggaacaggccagaagcgccacgagcgcgatcatggacgcggactgagccagaaacgccttcaggtcgtccccggacgtcttgcccacgacgagcgaggccagcagccccaccaccagcgccgcgaacagccaccgcaggatgcccaagttcggatccatctcgggcccgacaagaacgagggcgtacacggacaccacggcgaacagaacaagcgcgatcacttgcaggggcaggcgcagccgtgcggcgcgggcctgaaggcaagagggcagcggcgccttcagcgcggcccagcaggcaccggcggccaaaaacatcgccaggcccaaaagccccgtcagcagcgtgaaaggcgtgatgaggccgatcagaggcacgccggcgtaatcgcccgcggcgtccatggggatgccggcgaagatgttgcccaccgccacgccgagcagcagcgccggaagcagcgagcccacaaagaagcacgcgtcccagagctttccccaggacggatcgccagcacggaactcgaaggacacggcgcgcacgataaggccgaacagcaccagcatgacggccaggtagaacccggagaacgtcgtggcataggcgtccgggaaagcggcgaacagcgcacctcccgccgtgagcagccacacctcgttgccgtcccacacaggccctatggcccggcgcagcaccgcgcgctcctcgtcgtttttcgcgatgaagggcgacagcacgccgatgcccagatcgaacccgtcaagcacgaaatagcccgcgatgagcacgaagatgaggaagaaccacagcacgcttaagaactccatcatggctactcaccttccttc

SEQ ID NO: 10661 - DNA, 652 bp, Unknown
  gut microbiota DNA sequence
gggcgaaggcgaagcggtcgggggcgagcacgtcgcagccgtagtcgtggcgcaggatgcgggcctcgccgggggcgaagaagccggcatccaagatggcggtcacgtcggcggcgcggcagcgggccacgccggcctcgtcggtgatggcatccttgggggccgtaaacacgatgcggccggcgtccacgcagacgacctcgtcggcgatcttttccaagtcggaggtgatatgggtggacatgaggatgccgcgatcgccctcggccatgaagtcgcgcagaaggtcgagcacctcgtcgcgggcgatggggtcgagcccggctgtggcctcgtccagcacgagcagctccgggttgtgcgagagcgcgaaggccagcgtcagcttcatgcccatgccgcgcgacaactcgcttaccttctttttaggggccaggttgaagcgatcgcacagcgcggcgaattggacggcgtcccattcgcggtaagctgcccgcccgatagcgcccacatcgcccacgcggcaggtgtcggggaaggcgcaggtatccagcacgatgccgatgcgggatttgatggtgtccagctcggggctgccgcaggcgatgggctggccgaacaggcgcacggcaccctcgtcggcggcgatgat

SEQ ID NO: 10662 - DNA, 938 bp, Unknown
  gut microbiota DNA sequence
catgccgcgcgagagctcgctcactttctttttgggagccagattgaagcggtcgcacagcgcggcgaactgggcggcgtcccattcgcggtaggctgcccgcccgatagcgcccacatcgcacacgcggcaggtgtcgggaaaggcgcaggtgtccagcacgatgccgatgcgggatttgatggcgtccagcgccgcgctgccgcaggtaacgggctgcccgaacaggcgcacggtgcctgcgtctgcggcgatgatgccaaggatcgccttaatggtggtggtcttgccggcgccgttcgatccgatgaagccgacgacgcagcccggttccacggccaggctcacgccggaaagctcgaagtcatcgtagcgcttgcccaggttgtctatttccatgaggtaagtcatgtccgctcctcgttcagttttcttccagcagcacatccagcatggcgtgcagatcggcggcttctatgccggcgttttccgcttcggccacggcgcgggcgaggtgtccctccacctggcgcagccgctcctcgcgcagaagctccaggttgcctccggcgacgaaggaacccttgccctgcacggtgtcgatgaagccggcttcttccagttccgcgtaggcccgcttggtggtgatgacgctgatgcgcaaatcgttcgccagggcgcggatggaaggaaggggatcgccctcggccagctctccggccatgatggccgccttgatctgacgcgtgatctgctcgtagatgggctcgctgcttccgtttgaaatgatgatgtccaaggtgcctctttcgcagacggcgtatcgcgagccccggcagcgctcgtcttcgcgacgagcgcccaaggtgcggcgatgtgccgtcctagtttcggcccttaccgtcccagcgtcccgagcgcggcaagggcgtgaatag

SEQ ID NO: 10663 - DNA, 827 bp, Unknown
  gut microbiota DNA sequence
agtcgtcgtgggatacatgtacatgtgcacgatgaacttcatcttcttcatggcctcgaggaacgtggtggcatcccccaccatggccagcttgttgccggagcggtcgatccacatctcgggctggtagggctcgccggtgttcatggcctccatgatggtgggaatgtgcgaggccatccagtagttcaggcccttgtgctcgatgacgcccagacggcgcctcaccacttcctcggtcggcgagagcggcgtggggccgaacaggttgaacgggaacaggaagtaggtgccgagcgactggttcttgcgactctggatggtgttgccctggtggcacgcgttgcccatgagcgactcgatgatggtcacgccctcgggcacctgggccgactgggcgtactggtcggtggccacgccgatggagatgccggaatggggtgagccctcggcgtagatcttcacagcctcctcgatggcctcgggcgtgcaccaggtgacttcggcggtcttctccaacgtccactcggcgcagttgtcccacacggcgcggaaggcggtgcggctcttcttgccgttcacttcaaactcaccgtcgagcaccggcgacagcgtctcgtcctggggccacggcatagccttagcggagttgctgttggcgtcccacaccacgtaatcggtcgcctcgcccaagcccagctcgtcggcatgatagagcagcatggtctcctcgttgacgaggaagggcagattcgtccacttcacgcaccaggcctcgtcgtagagcttgttctcgatgatgtagcgggcccagccgttggtcatgg

SEQ ID NO: 10664 - DNA, 8374 bp, Unknown
  gut microbiota DNA sequence
cacggtggcaccggcctcaagagcggcatgcatggcggacaggcccgactcgccggcgcccacaaccacgacgtcgtactcgtgggtctcggcgaactcggtgatctcggccggcttctgcaggaagctcgggcccacgtaggtggagccgtcctcggcagcggccgcgccgcccgtgctcgccatcttcggctgcggtgcgcatccggcgatggtgccagcagcggccatgcccatggcggccagaccgccgaacttgaacagatcgcgacgagagacgttcatttcgtttttcatgatgggttccctttccctcactcgtggcgccagactgctattcagttccggctgcagcgtcggtgctgctcgtttcgcggcaggtttttctcgcccgccgccgcagctccctcgctgcaccatgcactatggacgcgccgtcgaaatcgcacatcgaccgagaaggaaaaagaagtttaaagctttaaacccccctataaaccttgctctttacctgggtaaacgaaaagcggacggaattgttcccgtccgctttaaaccttgtgatcagcttaagcgctgcatgctttcgcgtcctcctcccatgaatgcggaaggagtcacgcccctcggaacaccaccaaaagctaggcgaccttctgagtgtcctcgccggaggctacgtcctcgggggtctgcgcggcgccgttttcttgcaccacatcgtcctcgggctcgccggaggcgttctcgtcgccggcaggagcacccgccgcaacgcccgcgttcgcgtcagcgtcagcgttcgcgccctcgcccgtcgcatcttcggtcgccggggccttgccgcccgcgccgagaatctcataggccgggctcacgttggaaccggcggcttccacataagtgaagttgatctcgtcgcccaccttgtagccaacgatgtccagcagtccgggcaaggcgaagtcgaagatggttccgtcctccccttccacggtcaggtagaagtgggtattgccctcgatgaccgcctggttcatagagcgaatggtgcccttcaccgtgacgacgtcggtagtgccgccctcgccctcggccacaacaccattggtggcgagcagcgcctcgtaggccttctgagtgtcagccacggtatcgcccacggccacgttctgatagcgctggatgtcaatcatggcgaacttcttcaccagacccgcgccatccttcaacgccatgaagtaggtcggctggttcgacacgttaatgagcagcgggaacgtggaggtgtagcgcaagttctgcacctggccctcggcggactgcatggccgagtcctccgtggcgccggagacgctgtagaagtgtgactcctgggtgcgctggttcaccagcacaaagccgatgatggagttgtcagccgtggcggaggtgacgccggtgtacacccacacgtcgtcgtccttggcgatgtagttgtagccgagcgtgccgtcggtaccgggggtcgttcgcaccacgccctcctggccgaggaacgagttcagccagccgttgttgtaggcaccccaccagttgtactgcttgatgagcagctcggcggggaacacgcggtcgacccactcggggcagtcggccacggcgaggtcctgggtctcgccggtggtggcgtcgcagagcaccacgcggctgatggtctcgccgccgaacagcccgatggtgaagtcgcgcacggggcagatccaccagggatggccgtcctcatcaatttcgaaagacttctctccgaacatgtagaaggggtaggacagctgcacgtgacggtcgatgttgcgcacgagcggctcggactgcgagtagtgaatcggcgaatcgcccagacgcacgatttcggcgtcctgggtggtcatgttcacgagcgcgtaggccggaataccgccctcgcggttggtgaaccacttgaacaggtcggcgtaacctagcgggctcacgcgcaccggcgtaccctggtagttgatctgggagtacagcgaggacacctcgaactggctcacgtactcggggatggagcccatctcgcggttgcccagcaaaatggcggaatcgcgatcgatgacgggaatctcggagtagttcacttccttgatgtcctgggcgaactccagcgtgtcggtcttcagcacgttggaatacttctcggcgttgcccgggaagatcgccatggacataagggcgccgatggccacgagcgccaccaccgccacgggcacgaaggacagaatgcggaaggtcttcgccttgccctcgttcttcgtcacttccttggtgcccgtcttgtactgcttggagcgcatccagaaaacgaggaacagcggcagcaggataacgatgaagacgaaaccccagaagtccgtggagtgaatgttgatggccggatggaaccaccagtaggcaccggcgatgacgagcagcgccagcacgatgatgagcgccagccatttcttagaaggcaggtggaagtcgttggcgaggaactcgaaatcgaccgtagggccaccatggccgccatcgccgccgtcaccggagccggagccgccatggccgcgaccgccgccgttgcccgcaccgccgaagcctccgaagggaaagccgccgaagccgcccacaccgccgcgcgagcccgacgctcccgcaccggcgcccgagccagagcccgagccggaaccggagcccggcgtctgcggcccggacgacgccgaatccgacgcaccggtgcccgagcccacgccatcggtgttcatacccgactggcgcaacgcctcaagcagcgaatccaaaccagattgtgccacgtaactcatcctctcttatcggccgcagcgcaccgcgcggcgacctcgcatctcccggagcccctttggccccgcaaaaggtttcgtgacactatacaggaaggccccgcgccaacacccaacccgtcaaatacccgaaagaaaaccacgggcctgaagattttcttcactgcgaccttaaaagtctacctccgcccacgactccagaagcagtccctcgacgcgtcggaactccctcgtgttgttcgaaatgagcgtcgcgccatgggcaagggccgttgcggcaatcagcagatcgttcggcccgatcatgcaaccgcgccgcttcaagtcggcccggactcgcgcgtagcaggcggcgcaccgggaatcgaagggaatgatgtgcagcggcgacaagaggctctctacaaaatagcggccctcttcgggattgttactgttctcggccccgtacagcagctcggcctcgacgatagccggcacgccgaacagatccggcgagcttttccgcatgatctcctgggcccgcggcagatgcccccgcatgatctcgatgcacacatcggagtcgaagaaatacatgacggccccttacgcgaacagaacgatctcgtcgaggtctccctcttcctcggggacgacgaacgtcggatccttcagacagccgtagacgttatcccagtagcctgacggccagccgcgcccttccccactctcgcgaatgagccccgtcacgtacctcgacatcgactgatgcgcccgcgacgacttctcgcgcagcatttccatggtcggctcatccagatacaaagacaactgcggcatagcgcacctcctgtatacttgcaattcaagtatacttgcagctatacttgctgtcaaacccgaagaaacaggaaaagctgtcgacgcatcgccgcatcgacagctccctctttgacgccagaaagcagagcgaaaaagttcctacaaaatcgcgcgacctagctcgccgacgacttcttccaggcgcaccttggcctcggtgtgggtggccatgtcgcgcagggtcacctcgcccgcatccaactcgtcggggccgaggacggccacgcgggccgcgcccagcttgtcggccagcttgaactggcttttcagcgagcgcttctggtgatccatctcggtcgtgaagccggcgtcgcgacattcctgtacgagcgcgaaggcccgggcacgcacggaatcgtcgacgcaggccacgaacaggtcgcacttctgagcccgcgggaattccacgccggccgcttccagggccagcacgcagcgctcgaagccgagcgcgaagccgagacccggcgtgggacggccgcccacctcctcggccagcttgtcgtagcgcccgccgccgccgatggcgttctgggctcccatgccgttatcgacctgcacctcgaataccgtgcgggtgtagtaatccaggccgcgcacgagcttgtagtcctcctcgtaaacaaccccggcgccatcgagcagagccttcaccgcatcgtagtgctcgcggcactcgtcgcacaagtggtcggtgatcttcggtgcatcagccataatggccgcgcactgggggttcttgcagtcgaacgcccgcagcgggttcacctcggcgcgcgtcatgcaggtgtcgcacagctcgtcggcgtgctcgtccatgtaggcgcgcacgagctcgcggtaggccggacggcactgctcgcagcccatggagttcaacagaaggcgcatggaatcgcgcgggatgcccaccttctcgtagaagcgcatgagcatgatgatggcctcggcatcgatcgtaggctcctcggcgcccaggcactccacacccacctgattgaactggcgctgacgccccttctgcgggcgctcggcgcggaacatcgggcctgcgtacatgagcttcgccggggccgcgccctgcggcaccaaatcgtgctgcactacggcgcgcaccacaccggccgtgccctcggggcgcaaggacaggcggctcttcgccttcggggccttcccctcttccacccagcgacgcagattctcaccggaaatggccgtgaacatctccttggacaccacatcggtcgcttcgccgatgccgcggacgaagagctcggtctgctccatgatgggcgtctcgatgggcaaatacccgtaggtgccgaacacctcggccgccgtctgcttgaactgattccagaacagcgcctcgtcaggcagaagatcgcgagtcccctcaggagcgttaatggccatggtgatatcctttttcgtcggcggggctttgcggccctggtaagtgaaacttcgggtattgtaacgcagaaaggacaacccgacaggccgtcctttcccaatggttttgcaagtttaatcccagcggcgatggcggcgagccgacaggccgacgaaacgggcgaggcgctacagatgctcgaccaccaagtcgcccatcttcgcggtgcccacaaccttgtcgaccggggtctcggcgtccttgatgtcgccggtgcgccaaccggcgtccagcacctcggtgacggcgcggcggatgtcgtcggcggcctcgcccatgccgaagctgtagcgcagcatcatctccacggaaaggatctgtgccagcgggttggcgataccgcgcccggcgatgtccggcgcgctgccgtggctcggctcgtacagagccacgccgtcgcccaaagaagcgctggcgagcatgcccagcgagcccgtgatctgggcggcctcgtcagagagaatgtcgccgaacatgttctcggtcaccaccacgtcgaaatcggcgggacggttgatgagctgcatggccgtgttgtccaccagcaggtcctccagctccacatcggcgtagtccgcgtcgtgcacgcgatgcacgatctcgcgccacaggcggctcgtctccagcacgttggccttgtccacactcgtcaccttgccgcggcgcttgcgggcgatttcgaaggcctggcgggcgatgcgctcgatctcgtactcggagtactccagcgtgtcgtaggcgcgctggcccggcgctccgttcacgccggcggccggctcgtcgtagaagcgctcgcggcgaccgaagtacaagccaccggtgagctcgcggacgatcatcatgtccacgccgtcgacgatctccgggcgcagcgtggaggcgtcggccagagcgttgaagatctgcacggggcgcaggttggtgtacaggcccagctgtttgcgaatgcccaagagcccctgctccggtcgcggggcggcaggatcggtggtatcccacttagggccgcccacggcagccagtagcaccgcgtcggaggcgcgggccgcatccagcgtcgccgtcggcaagggctcgcctgtcgcatcgatggccgcaccgccaatgagcgcgtcggtgtactcgaaggcggtgtcgtacttcgcacccacggcgttcagcaccttcacgccctcggcaatgatctccggcccgatgccgtcgccggccaataaacagatcttgtaggtagtcgtcatgctacgcgtcctttccgagcttcttctgccagcggggcacgaggcctcccgcgttgatgatctccatgaggaacggcgggaagggctgggccgtgaaggtctcgcccgtggtctcgtcggtgatggtgcccgcgtcggcgtccacgctcacaacatcgccgttgctgatggcgtccacggcctcggggcattccataatggccagccccgtgttgatggcgttgcggtagaagatgcgcgcgaagctcttggcgatgaccacgtccactccggccgccttgatggcgatgggggcgtgctcgcgcgatgagccgcaaccgaagttctcatcggccacgatgatgtcgccgggctgcacgttgttcacaaattccgtgtccaggtcctccaggcaatgcttcgccagctccgccggatcggaagtgttcaaatagcgggcgggaatgatgacgtcggtgtcgatgtcgcgcccgtagcggtgcacggttcccttgaatttcatggggcttcctcctactccgccgcgtccgcgacggcttccaaatcttccggaaggccgatgtggccgagcacggccgaagcggcggccacggccggcgaggagaggtacacctcgctggtggggtcgcccatacggccgacgaagttgcggttggtggtggcgatggcgcgctctccggcagcgaggatgcccatgtagccgcccaggcacggcccgcaggtgggggtggacacggcgcagtgggcgtcgatgaagatgtccatgagcccctcggcgatgcactgctggtacaccttctgagtggcggggatgacgatgcagcgcacgtccggatgcaccgtgcggcccgcgagcacggctgcggcctggcgcatgtcggcgaggcgcccgttggtgcagctgccgatgacggcctggtcgatcttcacgtcgcgagcctcggccaccgggcgcgtgttgctcggcaggtgcgggaaggccaccgtcggcacgatgtcagcggcgtcgatttcgataacgcgggcgaactgcgcgtcgtcgtcggaatagtaggcggtatagggccgctcggcacgctcgtccagataggtgcgggtgatgtcgtccacggggatgaggcccgccttgccgccggcctcgatagccatgttcgaaatggagaggcgctcgtccatcggcatactttcgatggcgctgcccgtgaactccatagccttgtacagggcgccatccacgccgatcatgccgatgatgtgcaggatgacgtccttgccggtgacgccgggggccagctcgccgttgatgacgaacttgatggtctcgggcaccttgaaccaggccttgcccgtggccatgcccacgccggcatcggtggaacccacccccgtggagaacgcgcccagcgcgccgtaggtgcaggtgtggctgtcggcgccgatgatgaggtcgcccgcgcccacggcgccctgctccggcagaagcgcgtgctccacgcccatgcagcccacctcgtagtagtgggtgatgccctgctcgcgcacgaaatcgcgcacgatcttggcctgctcggcggacttgatgtccttgttgggggtgtagtggtcgggcacgagggcgatcttagtcggatcgaacaccttgtcggtgatctcgcgaacggtcttgatggcgatgggggccgtgatgtcgttggcgagcaccagatccagatcgcattcgatcaactggcccggttccacctcatccagccccgcatgggcggcgagaatcttctccgccatggtcatgggacgagtcaagggatgctcctttgcgcgcgataaacattactctcaaactcggctattgtagcaccgcgcgcgtttccgctttgtttcctcgcacgcgaacacggtaatttccacgcaaaagcgctcgtcgccttttccgggtctttcaaacccctcttttcgggatt

SEQ ID NO: 10665 - DNA, 55572 bp, Unknown
  gut microbiota DNA sequence
tgccacttcgaccccgaaatggccgatcccgatccccccttctgccatttctgccctcaactggcatttttctgccacttgaggcccgaaatggcgcacctccatcccgcaggtcgaccatttcggggtcgaactggcatttagtccggataatccgaaaatgccgcatctccaatagcgatagctccgacaagcgcaatcgataggctcccgcaggaagtcacctgtcgtctactcctgcaaggcggagcagagggcgtcgagcagcgtgatggcgtagtgctgggcggagcgctccgggccggcctctagccacatggtgccggggagcagcaccgacacgcggggccagctcgcgtcgcgggccacatcgacggccgaggccaaacgcagccctagcgtatcctcttccgcataggacaccagcggcaccccggcctcggcgtccgtcgcgctcaacagcacgtgcacgagcatcatggacgcgtccggcggtaccgagagcgcgtcggcgctgataatcttggaggcgggattggtggcctgggccacgttcgacatgcgtgaggccacagcccgggagaactcgtcggtgccgaacaggcacacggcgttgcgctcgagcacatcggctgcacgggcgaagcccaaatggcgcaccggactgtgggtggcctccttgccgacccaggagtgggccaggttgcgcagcgccgcataggtgtaggcgccggcgatgccatcggagggcaaacccaagttcagctggaagcgacggagcgcctcttcggtgtgagcaccgaagatggcatcgcgggtgccgtagaagaacccgagcgcgcccagcgcctgttgcagctcaagcacgtcgtgcccatggaagtagggcatgcgcagatacagcgtgcggtcgcccagattgtaggtggcgtctaccagcgccgcccacaccttctcggtcacctcttcgctcggcgggagcgccgaggcagcgaggaactcggccaaagcggcggcggtagcctcatcgaaagcgccggtgatggcgtcctcgggaagatgcccgatgcgggccaggcgcgtctgcacgtcctcgacggcggcgccggtgtcgtttctcttgataggttccatgttacttcaacctgttcacgaaccagtcggccatggatacgagcaagtcgcggtactgcgaagggggcaacgccccggccaaccgcgccttggcattcagcgtcagatcctcggcaaaggtgcgggcgtaatcgatggaccccgtctcctccatgatggccacggcctcggcgagcacctccgggtcgcgctccttcgacgacaggatctcgacgagacgctcgcgcgcctcgtgcgccgcgttctgcagggcgtgcaccacaaccagcgtgcgcttgccctcggtgatgtcgctgcggaagtccttcttcttggcctcgtcggtgcccacgaggttcagcaggtcgtcctggatttggaaggcgaggcccgtgtccagaccgtagctgcgcagggcttccacgatctcgtcgtcggcaccgcccacaatggcgcccacggccaggggcacagcacccgagtagtgggccgtcttgtggatagccatggtgaggtagtcctcgggcgtgatgtcgtagcgcccgtcgcgggcccaacccagatcgagcgcctggccctccaccgtgcggcaggtcatggcgatgagctccttgatgacgcgcaccttcacggcgtcctccagaagcggatcgttcaccaccgggccgttcaccatggaaagggccaagtcccccatgttgatggccagccccagcccctcggtgaggtgcaggcagggctcgccgcggcgcagctcggcctcgtcggcgatgtcgtcgtgaatgagagccgcggaatggaaatgctcgatagccgcggcggcggtggcagcgcgatcgggatcgccgcccacggccaggcaggccgcgaagcagatgagcgggcggtggcgtttgcccgcgttctcactgtaatggtagagcggatcgtacaggtagcgatccatatccccatgagtcccatggggaatgtaactgttgatcagctccccgaccggatcggcataagctttcaaatagtcttcgaacgtgacgggcgtctcttcgacgctggcgaggatttctgagatgttcttcatagcgctttcttgccagagggcggtcgtttcagcatcgaaccataataccacgggctcacggccccgcaccgcgcgatcagcccaccgacaagaatgtaagatttgacggcgagggcaaacagccggccgccaatcaacttctttccgcaggggcattcgagcagcacttcctacaaaagacgggtgtaatcccgcgagcgatggataatgcgacagacgactatctgcccatccgccaccttgtacagcacaagatagttcttcacaggagcgcaccggtaacccagctctgctagctcaggaacgcgagaaaggccatacaactcgggagtctccgtcacgaggctcacctgcttgtcgaattcctccataaaattccgcgcagcctgcttgctctgcaacacgccgacgagatatccgacgatatcgcagtactcctgctgagcctcggccaatatggccttcctataggccatattcttccctcaccgcagcagcaaagtcatcgtagtcgtcataagtccccgccgccaactcgcgctcggccctcatgacatgagacagcaggcgtgcccgcaccacctcgtcttgcatagcgcgatactgctcttcgctgagacagtggaatacctcgcagccgttcttcgtcaccgtcacatcgcgctcacgctcgacgagttcggcgaactcggccgtgttcttcatgcttcttacgggaacgcacactgacataaagactcccttcatagcgtggcctaattgtaccacatccacgaaaggcttcatggcggccgtcatcgcccccgttgccagaccactctcaccatatcccattgcccaccaactttcttcggaatcgctttgctggctctttcaataaaggagcctagcagagccgaaccgcagaaatgacgcgggaatgtcccgtttcgttcctcgcgccgaccgcaatcgagtcgcaaccatgaaccacgcgagccccagccgaaaatgccagggcccgctcttgggagactattcggttcgcagcagctaggcggcgcaatctctggcctcaagatcgtcgaccggcgcagtggccgagacgcctaccgcagcaacgacgcgtcggtcgatgagcgcccggcgcacgcgcagcacggcgtaggcaccgaagaccaccgtgtacaccgccacggtgatcagcgccgcctcgccgccgcggctcgcggccggtgcgagcatcagcatcaggtgcatgtacaccaaaccgaagaacacgtaggcccaccgctgcagacgcttccagctttcggtgcgcatatgctttttcacgaagccgaacgacgtcacgccgagcaccaacagcagaacaagcagcgctagcgccaccaccaaagcactcagcacgttcgcccccatcgcgcccccgagccgtggcgcataggaggccagatacactgccatatgtccgcaggccaaaatgcacgcgaggatggaaagctcggcgcgcaccggcttcagccactggtgaacccgcgagcctttcgcgaacacgccgatgtacataaccaccacgaacagcgccagcgacagcatgcacttgcccataagcagcgtgagcggactcatcaccgcgcgcggcagcagcccctcaatacccgcgatatacgccacatccgccaccacggccagggcgtagaacgccacgggccacttatgcaacggctgccgcagcgcgagcacagcaacaatagtcgccacgagaaccataagaaacgtcacggactaccccttacctttgttgcaggccctcgcgctcattgagcgcggccagcagaagatgcccgtaagcagcgagtgcgctatagaagcgcttggctacgacatcgatctttcctgcctcagcgagacgatcgacctcttcggcggtgcgcttgaagaaatccggcatccaccgggagacgtgcgcgcaaacgaaatcagcagaccgatcccgccagaacgccgcgctttcctcgtcgccctcacgcagcgccttcgcctcgctgccgatcagaaacgaaagaaacgcccattcgttccagacgctatcgcaaggctcagtctcggcatccttcgggaggacgccactctcgcgcatagtccgctcgacgcgcagggtcagcgccgagcgaaacagcgccggctccccaggtacgcccgcacgcacatggataaacgcgctctcatagggaaagacagccaccccgcttccctggcgaacgtagaggagcgaccacgctcgtcgaagggcgctgcacaaggcgtctacctcctcgttcccaacgcacccgaacccttcacagagtatctcgacagcgtctccttgcccgtcgccgtgctctgagacgatatctcgcgcgcagcctattgcatcgtcacgtaccagcccacttgtcacggccaaagccaaatcgctatcgggaaaacgcgtcaaggcacccatcagctcgcagccatcggccaaaccgatcgtctctctcatatttcccgcacccacgaagcctccttgcaaagaggcgggcaccgcacccatcgacacccgccttacgtaccgccttaacgccggcgtctacttcaagtagtagacgtttggacttgtccccgccgactccatcataagatggaagtcgcgaccttcgatagccttcgataccgcagaatcgggatcatcgagatcgccccaatagcgggcacgccctgggcacaactgcatacaagccggctcctccccccgatcgatgagattcttacagaacgtgcacttctccaccgtgccgggcgtatggggcggcgcatcgaactcgccgacctcaacctcaagataatactcagggttgtcgctaatcaaactgcgaacaccctcgtagggacaagccttgatgcacgactcacacccaatgcacagatcagtatcgacgaacacgataccgtcttctcgctgctgggtcgcgccggtggggcacgcgctcaggcaagcaggctccgcgcaatgctggcactgcataggcaggaagttcagcgtgcaattggggaaggtgccgccagcgttgtcgttggcaagagcgccgcgcgacacggcggtgccaatgctgtcaaaatcgtcatcgcctttggtgtacacaacgttgtacgtcagctccttcggcagattgttcgccattttgcacgccgcagcgcacgcctggcatccaatgcaacgacgaaggtcgatcgccattccgtatcgagtcatctatctcagcctccctagagcttctcaatggccacagcgcagtcgaaataggactggtttctgcaagcctggttgtagtcgttgaaggtcgtgcgggcaagatcaccgtcaatgtgctcacgggtcaggaagctgcgcgggcaatgaaccgctttgcgctgctgaccgggattaagaacagccagcatggtgaccgaaccgcgatcattgtagaggcgaatggtgtccccctcttcgatgccgagctcggcggcgtcttccggattgatgcggcaaactggcgcggcctcgaactccttcagatagtccacgtcgtaccactgagtatgagcgcgggtgcgcatatgctcacagcaaatggtgaaggggaacttctcgcgaatgggattggagagatcggcctcgcgagccggctcccagaacacggacaacttctctttctccaaatccaattcctggcccatattgtagtcgggctgcggcgcctcgcggtaaaacatggcgcgtcccgtggcggttccaaaaacgccgccctcgaaggcgatagtgggatcgttgtcacagcgcaggtaattcttctcgcgaatcttgtcgatggtgatccccttttcctgcccatagggagtggagaggacaacgttcagatactcgtcggcggtgaactggaagaagtcaccgtaccccatagcctcggcgatgagcttgtatatctcaaaatcgggcttgctttcgtacagcggctcgacggccttctcgttccacagcagataggggttgcagtagtagcgcacgcgcaaatcctcggtctcgaaccaatggcaagcgggcagcaggatatcggcatacagcgcggtatcgttcatagtcatatcctggatgacgatgaactcgatcgcgttcatgagctccaaagtcttgttctgatccgtttgattcgaaacaacgttagtgcaagaggcatagaaagacttgatggggaagtcctcgccaagctttttgcccgtgggcacgatgttattgcagaagtcggtccagttgagaatggtgccgacgccttggggaacttcgcccgtggcgctcggcatcgtaatgcaggcctgcacgttgccctctccaaagttcggctcgccggtgaacagacccgaacccgaccgacccatctggccggacacgagcaagagagaattgacgcatttcgagctgtacatgccgttgttgtagtggttcaggccgaacttcatgtccgcctgaacatcgccttcttgcgtgtaaaggtgcgcgagatgctgaatgtcctcaacgctcacaccagtcacttcagaagtgtgctccagcgtccacggctcaacagcttcccgaatcatctccatttctgtgcgcaccgcgatgccctcgatcggagccacgccgccaagcgcgggcttagtggcctgggccagaggcacggcgctggagctcgcctcatcccacactacatacgggtcgacgggaatctcttggccctgagcattagtagtggtctcagttggctccacgcccaaatcgctcatgcgcaagaacataccgtcttccttgatcagcaggggcgcctcggtgtggtcgcgcaggaaatcagtcgcctcccaaccttgctcgaagatctcgcgaatagcaccgagcgccaaagcgccatcagtagccggatgaacagggatgaaccagtcggacttcgaggccatggtgcgataagcgatgtcgataacaacaagttcagtgccggcgtcacgggcttcgaggaagaagtgagcgagctgcttctgggacactgccgtgtcaccaccccaaatcacatggtgtttggcgttgatggcgtctgatgagcgattgccgtaggggccagctccgaacatgtaggcccaggccatcggcgtagcgatatcgcgatccggcaggacccggctcgcacccatgacgttcagaagtcgggccatgacagaaccttccggcgcaccgccgccgagcgtaccagtgttgccgctgcccaagaagaacgcaatggacgtggggccgaactcttcccgatagctcttccatttctcagcgatctcagcaatcgcctcatcccaggtgatacgctcgaactccccgcttccgcgctcgcccacgcgacgcatggggtactgcaaacgctcggagctgtacacgcgagcaggctggacaaggcccttcgggcaaatacgatcgaactcggggccgtcatcgaagtgacccgctgtcgtacgaaccacgcgaccatcgcgcacatgaacattcagatagcagccctgaccgcactgggcacggcatgcgcccgcatagatctgggtctccggaacctccaccggctcctcgcccgtttccgccagcgtctccttggcgggagcacaaccgacaagcgcgccggttgccgtcagtgcggccgcccccttgatgaagtttctgcgcgagaaactcatgcccgttttcgattcggtcatgttctgactcctctctctccctcgcgggctcggacgacgcgacgcaggggaggggtcgtagcgtcacgtcgttcgagcaggaaaagtctcctcgttggacttttcgatgttcccattctgcccaagcccccgattaatagcgatacgccgcgtctaagctttgcgttaagctgaccttaaccggagattaagacgccaatcggcaatggttttgatcagggcgttttaggatttggcgacgttttactttaggatttggcactcggtgcgacccgaaaaactcgcgccgaaatcgccgctatcccaaggtgtcggccattttgtagccgacgcgctggacggtcagcaggtatttgggctcgctggggttctcctctatcttctcgcggatcttgcgcacgaacacggtgatggagttcgaatgcgcgtccacctctccttcgccccagatgtactcctgaatctggctgcgggtgaacaccttgcccgggtgtgtcgccagaaaggccacgatctcgaactccttggtggtcaagttcgcaggccggccgcccacaagtacctggtactcgtcgaagcgcacctccaagtcgccgatggtcaccgatccgtcgcgggccgtgcagcgggcgaactcgatggtgtccttgtggcagcggatgtgggcctcgatgcgcaggatgagctcggtggcgtcgaagggcttggtcacgtagtcgtcgcccccggcccgaaacccgatggacttgtccacgatgtcgtttttcgccgataggaagatgatgggaatgcgccgcccctcggcgcggatgcgcgtgcacaagtcgaacccgttcatgcccggcagcatgacgtccaaaagcagcaggtccggcttctcggtggcgagcatctccagccccgactcggcgtcggtggccccgcagtactcgtagccgctcttcgtgagcagcttctcgatggccatatgcaggctcttctcgtcgtcgatgagcatcaccttgtacacagccgcctcctcgtctctcgtgctacgcggccccagggcgccgccgcgccggccgcttaccgccccagcgccctcgcccggcccgcctactcgtcctcgtccaactctaccacggcggaggcgggaatgcgcacggtgaacgcgcttccctcccccagcacgctttccaccgtcaccgtatacccctgggccaccgcgtactcgcgcacgagcgcgagccccagcccgctgccgctgtagatgcgcgtcgccgagctgtccacctggaagaaccgctcgaagatgcgctcctggttctccgacgcgatgccgatgccgttatcggacaccgtcaccagcacatcccccgtggcctcctcgcgcacggcggcgatggccacggtgcccccggccggcgtgaacttcaccgcattgctgcccaagttctccagaatgcgcagcatcttctcgtaatcgccggaaacgagcggcacgtccggcgccaccgtcgttgtcagcgtcacccgcgcccccacggccagagggccgatagtcccctgagccgaagcgacgatgtcgcccaagtccatcagctccatggacaccgccatggcccccgcgtccgaccgcgcgatgtccagcatgtcgttgatcatccccagaagcaccgagctggacttgcgcacctcctcccagctgcgccgctcctccgcatcagccccacccgattccaacgcaatctgcgccagcgtgatgatggaggtgagcggggtgcgcaactcatggttcaccatagagagcaaatcgctcttcacctgggactccttcgccagcttctcgcttaaggcctccaggctgtcgcgctgggcggccagctcctcgttggcgcggcgcaagtcctgggtacgcgcctccacctgctcttccagccccccataggtgatgcgcagctcgcgggccatggcgttgaagcggtcgataagactcgccatctcccgcgccgtgcccgcatcgtccacggattgcgcgagccggccctcgcccacttccccgaaggcccgcttcatggcctccagcgggcgcagcacgaacacggtcatgagcccgaagaccaccagtccgatgaaagtggccagaagcaggaagaaccccacgtcgcggatgacgttctcgcgcagggcctggtactgctgctccagcggaatgacgatgctgatggcgccgccgatggaatccagcgtccagccctccttcggaaacccggtgatgtcgatctccccggccggttcgccatggcactcaaggcagctctcgtttaccctgagcgcctgcacatagcggaactgcgcggcgccgttgtcggccgaagtttgggcgcggtcgacctcggccgggtcgtcgctcacaatgcggaagaactcctgagtgtccttttgctcgttgaacagggccagcgcctcggtttcgaaggcatcgggcttgtcctgagcccggcgcggctcgaagttcgtgtagcggatggagtaattgttgcccgccgagaagatggcgccgacgctcttgccgacgatggcgcagtgcagccccttgaactcgtagacgcccgtcgttgtgttgttgatggtgtgctgggagttgtccatgaactcccacacggcgtccatctcgcgcgcgaaggtgcgcgcctcctcggcgagcgagtcctccatgttctgggtttgcatgcggatgtcgaagagcgtgaacaccgcggtggccaccacgaacacgaaggtgagcacgagcagcgataccactcgcaagctgatattgcgcatcctcatggccaccccctcgcaccgacaagattctccaagttcccatggtaacccgacgcccatgcaccgcagcctaagttttgcctaagctttcgattaacaggatattaagggatgaggggtggaaatcttgacgggaagtcgataaagtgagggcgaaagcttcggcgcgctccttgttccctgtcggcggcgcgcatcggggctgcaccgagaaagcatcgtggaaaggaagagcctcgtgagccttcgccccctcctcgcatcgcgaaaggcagccagggcctttgccctggttctcgcggtgtgcctggggctgtccatcatgctgggagccgccgcgcccgaaagcgatgccgacgaggtgccgcccttccgcttcacggggcgcatgggccagggcgtgtgcgacaccttgtgggtgtgggcccaccaccttgatgaggcccgccaggatgtgctcaccgagcaatccctgcaggcagcgcgccgggccgagcccgcaccttcggccgacgacgacagaacgcccaatgccgcaagcagcctcatctgcttcctcggcgaggaagtgccctatcgccagggcgagccagccgacatcaccgcgcccggcggctacgccagcacctgggtgggcaccgggtgcgtctccgacaacgcgaacacctactttatcggccacaaccccggcgtcttcgagcgcgtcatggatttggaaatcggcgacaagatcaccgtattcgacgacgacggcgcctcgcgtacctactacgtcttcgacacgctctttctgcccaacgggtcgaactacttcgtctacgagggccgcatcgcgccgaccggcgagaccatcaccctgcagacctgcaccggagacaaccagcaggtgcgctgcgtcatggcccgctaggggcgacgggcgcgaacgtcgcgcgaagcgctctcttgtcgtggtatcatgcgtacattcgccgttatcgaacggcactcgatgcgcgggggcgtggcggaattggcatacgcagcggacttaaaatccgcctcttcggattgtgggttcgagtcccaccgcccctaccatcaatcttcccgggcggcctcgaagatcatgccgtggaggatgtccgattcgctggccgtgtaggcgtcggcgccggccagagccagcacctcttccaaaatgacgaatccggccacgatgacgccggcgcgctttgggtcgaggcccaccgtagccttgcgctcttccagcggctcggcggccagacgttcctcgatggccgcaagctctccagcagcgacaacggccttgtgcacgcgggaggaatcgtagacctccatggcctcgcggatgctcacgacgctcgtggccgtgccggccacggccaccacgcggtcgatggcgaacccggcggtggccaagccttcgaaatacggcgccatggtctcgcgaatccactgacgggccgcatccatctgcccggccgtcggcggatcgtcgcggaagaaccgctccgtcacgcgacggcacccgatattgaaggaatgggaagcgatgggatcctcgccgaagcggccggccaccacttccgtcgagccgccgccgatatcgacgacgagcaggttctcgccggggaaatcgctggaggcacccaagaaggtgagctgcgcctcccgggagccggggatcaccgccagcgtgacgccgcgctctgccaagcgggccgcgaactcgggaccgttggccgcatcgcgggaggctgaggtggccatggcgatgagccgtcgcaccggatgctcgggggtatcgtagcgcgcgagcacctccaagtagcgatccacgcaggcgagcacccgctcgatagccgcctcggacaggcgccccgtagcgtccacgcccacgcctagatcggtgatggcgtactccttgtccacgtcgatgatgcgtccgtcctccacgtccgccacaagaagacggcaggtcaccgtcccgatatccaaggccccatagcgcccatcagcgtacgtcatatcgtgctcctgtcgatgttcaaccttattccacgccgaagagggggtcgaggagatccgagtaccaggtgtcgggggcggttatatcctcggaaacgatgttgccgcggaactcggaggcctcgtccttttcgtccagcccgctcacggacacggcgtgctcgccctcgtgcacccagccgagctgcgtgcgggccgcgtcctcgatgccggcctcggtggaaagggcatccaccgacgcctcgatggcggcgttgcgctccgtgacggcctcatactcggcggcgaggcggtctcgctcgcggatatcctggtagagttgctgagcgggcccgtaaaggaaagtcgcccccagccccaggcacagaaccgtggcgcaggtgacgatgaaaggcgcccgagtaaagaaaggagcttttgcctcgggcatcttgacgcgtccggagacgcccgatcccttctgctgcatccgagacgaacggcggtgcgacgagcccatctcgcctttgtacacggcggcgcgcggaccggcttgggaggcgtccgagggcttgccggcctcgtactggcgatagtaggcgcgacccgcccgctctttcgcgcgctggaggcgcttcttgccgaaccgggaggtcaggcggcccaagggccccaagggggcttccagctcctcgtcgtcgacatctgcggcgcgcgcggccccgcgcgattccaaagagcccggcccgcggtgggcgtcgctcatggaaaggggcgcgtagcgagaaccggatgccggcgcggcgaacgaccgggccgaagagcgcccggcgcttgcggctcgaccggtcacgcgcacctcgaaatccgggtcatcggcgaagcggccggcatgggcgcgcacaggcggcgtctggcgcgcacgacgatccgacgcaacgcgtcgcgctgtgtcgaaggaaacgatattcgcctgtcgtggcacggggattcgctcgtcctttcgctgccggggttcgtttctggtgcgggtagtcagtcgaaagcgggtagattatcggtcaggcgccgaggcgccccttgctcacaagtcgaggctacggacgaacgcgccccatttctcgaaggaggcatcgctgatggcgtgttccatctggcaggcctcgacttccgccacctcgggttcgatccccaaggccttggtcagaaagtcgaagagcatgcgatggcggtcgagcaccgaccgaccgtaggcgtagcccgcctcggtcagcgtgatgtcgccgtagtgcggttgcacgaccagctcctgctccttcagagcggagatggccttgttcaccgacgctttggaaacgcccagcttgttggccacatccaccgagcgcacgggcgcgtcggtcgtgccgcccagcatgacgatggcctcgaggtaatcctcgtgggacatggacgttttcaccacagcaatctccttatcgaacaagtcagatcatcatagcacggcgcgcgaagaaaaaagaggctcggagccgaaacttccgagcctctttcacattgtcttcgccaaacggttacggacggcgcggggcctgatcccccacggccttggcggcggcttgggccatagcctcggctgcctggcagcacggcggcatctcgtcaccggcacccgtgccgttgatgcggcttgaaacggtcggtcgaacggccgaagcgcagtgggagcagccggcgcagcccccttctccatcgccgcagtggtcgccgcagtcgcacaggccgcggcgcgtcatgcgccggatggcgagcaccgccagggccaggatgaccagaaggatgacgacggtggggaaattgaggctgagctcttgcatggtgcttccttacaacttaggcgttcttgctcgccgcttccagcctgcccgcgcccttgggcttggcggccgggcggaacagcaggtacagcatgcccgcggccaccacgacagccagcgccgtgaacgggccgaaggcgatctcaccggcgataaggccgccgaactgatagatcatgaggcccacgcaccaggcgaaggcgcacatgtagccgatggcggcccaggtccacttcgccgacatcatctggcgacggatagtgccgatggccgcgaagcacggcgcacacaaaagattgaaggcgcagaaggccatgatggccgccgagctgccgccgagcatggcggcaaacgaggcccacagcgacgggtcggtctcgccgatttcctcgccgaggctcgtgatgacgcccacggtggccacgacgttctccttggccacaagacccgtgatggaggtgacggtagattcccagttgccgaagccgagcggcgcgaagatccaggcgagcaggttgccgaggccagccatgaggctgtactggatatagtcgtcaacctcggggtcgagcaggccgaaggagccctcgtagaagccgaagttcagcaggaaccagatgaccatagaggacaggaagatgatggtaccggctttcaccacgtagctgcgcacgcgctcccacatggaaagcagcacgttcttcaccgtgggcagatggtattggggaagctccatgatgaagggggccacctcgccggagaaggcgcggaacttcttcaggatgatgcaggacaggatgatggcgaacagccccaggaagtagaaaacgggcgcgacccaccaggttgcctcgtagtcgccgccggcaagggcgccgaagacgagcgcgatgatgggcagcttggcgccgcaggggatcatagtcgtcgtcatgatggtcatgcggcgatccttctcgttctcgatggtcttggtggccatgaccgcgggcacaccgcaaccggaggcaatgagcattgggatgaaggatttgccggacagaccgaagcggcggaacacgcggtccatgatgaaggcgacgcgggccatgtatccgcaaccctccaagaaaccgagcaggatgaacagcacgatcagctgcgggatgaagccgatgacggcgcccacgccggcgatgatgccgtccagcacgagcgactgcacccagggagcggcgccgatggattcaagccagccgcccaccacgacgggcacgcccacgtggtagaagccgtagtcggctggatcgggctcctccaactcgccggcttcgaaggcagccacgccctcgtcggtctcgaggatgccctcgaactcctcgacggcggcctcgtactgttcggtgccggtgtagagccagccgtcgccgaacaggccgtcgttggcccagtcggtcacgatggtgcccacggtggacaccgagatgtagtacacgaggaacatgatgacgatgaagatcgggatgcccaggatgcgattggtgaccacgcggtcgatcttctgggtggtggtcatggtcttcggggacttcctcacgcaggcgtcacaaacctccgtgatattgtcgtaacgctcgttggtgatgatggactcggcgtcgtcgtcctccgcatcttccagacgctcgcggatggcggcgatcttcgagagcgcggcggccggcaggttcagcgcgtcgatggtgagctgctcgccttccaggagtttgatggcgtaccagcgagcatggcggcccttgatggccgcgccggccacgtcgatgacctgggctaaggcctcttccacctcgttggtgaagcgcagggtggtcgcaggggcggcgcccttcttgcccgcctcgatggcggccttcacgacctcctccatgccgcggcccttgagcgccgaggtcggcaccaccgggcagcccaagcgcttggcaagggcatcgacgtcgatcttatcgccgtttttctccacgagatccatcatattgagggccacgaccacgggaatgcccagatcgatgatctgggtggtgaggtagaggttgcgctcgaggttcgtcgcgtccaccaggttgatgaccgcgtccggtttgccgctcatgaggtagtcgcgggtgacgatctcctcgggggtgtagggcgagagcgagtacacgccgggcaggtcggtgacgaccacctccttatcggcgcggtagcggccctccttcttctcaacggtcactccgggccagtttcccacgtactggttcgcgccggtcagatcgttgaacatggtcgtcttgccgcaattggggttgccggcaagggcaatgttgatagccatgatcagcctttccttctccaaaaaacgttgttcgccgggcccttctcgcgcctcccaatgcgcgccgcggcgaagacagaagttagataaaactaactagaggggagaaaaaatgcgccctcgggcgcaggggaggtgcggctcccctaggatacgagcacgttttgcgcctcgttcttgcgaagcgacaactcgaacccgcggacagtcacctcgatgggatctcccaaaggcgccaccttgcgcacgtagatatcggtgcccttggtgatgcccatatccatgatgcggcgcttgatggcgccctcgcccaccaggcggcgcaccgtcgccgattgccccacgggcacatcgcgcagggtcttgtcctcagccatgttcttcctttctgtcctctcggcgattccggttgattgggtcggcacgacaacgcaggcgccccgcggcgtccgtcattgcgatcgcgcgacgacacgaacgcctcttgacgcccatctttgcgggcgcgcgacgggcgtgccttcttatgaaacgatgatcttcgcggccaccgatttatcgagcgccacactcgcgcccttaatctccacgatgaagtttcctgcctgctcggaaacgacggacaccttcgttccctcgacgaacccgaggttctcgagatgatggtgcacatcgccctttccccgcacgcggacaacttgagcggtatcgccgcgacgcaggaacgtcagcggcatcggctggcacgacgcgcccgcgctgctggcccggcagacggcgctctccataaccatcgcattgctcatgatgactccaatcaatgttagctgcatgcaacattgtattatagccaaaagttagactatgtaaaccctaaaagtttgctttttcatactttgtcacgtgagcgcgaaactcgcacagtccgcctgaaacgccccgccaaagggcgggcgacgtggtatcctttatcccatctgacctctttgaaaaaggatgattcatggcgcaacgcatcgatcgggccgcctcgttcggccagaacctgtacgtggacacgcgtggagcagccggcgagccggtgcctttcacccaagccgtcatcaacggcctggcccaaggcggcggtctctacgttcccgaagagctgccgacgctgagtcttgacgagatctgcgctctggcgcgtctcccctatgcccagcgggcggccgccatctacaaggcgctcaacgtcgacctgcccgacgaggccatcgacgagctcatgggccgcgcctatggcgacaatttcgacgatgaggccatctgccctattacctcactggacgagagcacccacatcctggagctgtggcacgggccgacgagtgccttcaaggacatggccctgcagtgcctgccccacttcttctcggccagcgccgagaagctgcgcgaggaggggacgctcgatcacgagttcatgatcctcgtggccacctccggcgacaccggcaaggccgccctggagggtttcaagggcgtagacggcgtttccatcggggtgctgttccccgatggcggcgtgagcgacatccagcgcaagcagatggtcaccaccaccggagacaacgtgcaggtgtgggccgtgcgcggcaatttcgacgactgccagaccggcgtcaagcacgcctttgccgacgagaagttcgccgagaagttgctggacgagtaccgcatcgccctttccagcgccaactccatcaactgggggcggctgctgcctcaggtggtctattacatctccagctatgccgaactcgtggcggcgggcaagatcgaagccggatgccccatcgacgtgtgcgttcccacgggcaacttcggtaacatcctggccgcttggtacgccaagcaaatcggggtgcccatcgaacggctgctgtgcgccagcaacgacaaccgcgtgctcaccgacttcatcaacaccggcacctacgacatctccgaccgcgagttcattcttacctcctctccctcgatggacattctcgtctcctccaacctcgagcgccagctcttcgagctcacgggccgcaatggcgaggctattcgccagtggatggccgatctggccgacgcccgttgcttccgcgtagacgccgagacgttccgccgcgtgcgggagaacttcagcgccgattccgtggacaacgccacctgtctcgccaccatccgcgaagtgctcgacgcccacgactacctgctggatccccacaccgctgtggcctacgccgccgctcagaacctgcgcggcgagaaccccgtcctcatcgcctccacggcccactgggcaaaattcggcaacaacgtctaccgggcgattcacggcatcgagccttctggcgagttgcccgcggacgtggccgcgctcaccggttgcgagctgaacaagctcatcgccgaggaaacggacaagcatcacatccccgccggacttgccaacctggatacaatgcaagtacgattcaccgaagttatcgacaacgacgtcgaggccatcgaggacgccgccgaggcgttcctcacccgctaggcctcccgggaacggaagcgatgccatcatgggccagttgaagaacctctccaccaccgtccgcctcaccgtggcgaacccctcttccgagaacaagtccgccttcggaccgggcatcgccaagctctgcctgggcgtgcgcgagatgggctccctcaacgcggccgccaagggcatgcgcatggcctacagcaaggcctggcgcatcatcaaagacactgaggagacactcgacgtgcagctcctcctgcgcgacggggctcacggctccacgctcaccgaggacggaaatcgcctcctcgatgcctacctggccatcgaggagcacctctcagccgaggccgatcgcctcttcaaggagatgacccgctagacgggctcgatctctatggtaagcgaactcccccggggctgaagcccctcggagcgcacgcgcagacgccagccaggaacgctcatctcctgggcggtgggggcggcagaaccgccttcgccgcctctgctggcagcgcactccccttcccctccatctacgggccagggcactgccttcgcagagcgggccgcctcgagagccggatcgctgccgaaacggtacaggcacccgaagcacgtatccatgtcatcgaacagggtgctctcgcaaactgggcaaattttcatcgatgtctccttctcttggtttcgttcttaaccgctcctctgccgcccgacgtttccggagcggcctgagttcttgcgagagcgggcgccctcggctttctgcgtcgcggagcatcggggagcaggcacacatcgcctcggacgaaccagggccccggccgggcaaagcgctccactaccgcccaggctcgaccgcaacgcaggcgcgcccccggcagcacgagacgatgaaccgctatcacccggcccctcctgtcgagaaaggcaacgtccagaggatgccgcatcgtcagcgtgtgcacatcgcgacagcgcgggaacaccatgaccgtagaatccggcctgcgtcccgccaatccgcgcaaccgcagaagcgggcttgaagctaccacccatcggccctcgaacggggcccgatcgccatcccttaccgtgcaaaggcgcgcaaacgccgtttttgcgtctcccctcatcccatcggcgcatttacttgaaggaccacgcatagcacgtcgcccacccatgtgcagctgagtgcgagccatgagcaccgccctccttccttgactcccgtccatactccttcttggccactggccaccagtgcccacccgcgtccctccagctcgccaacgaggcgatcgggcaggccgtccccctcctcaacgaaggagaccaccgaccagtcgtcattggcccgcagctcctcgcgaccgttcacatcaaccacttcctcggcgaaccagttgggggcctcccacgccgcgcgcagaccgacgtcgggctcaagctcccctggcgccccgggcagcatggcctcccccatcggttgccccaaagccagagcgagcaggggggccaggacaagcgcgagggcgcacccgaatcgacggcgccatgtcttcccggcacccatcagagcagcacccccggccgataggcgtccaccgtcagatcgacctcgtggacgagcctcggaagagagacaccgaacacctcgtctttaagccccagcccgaaaagcgtaggggcaaaggagagacgtccgcaatagcgctgataggagcctgcccgcccctgaaccgttacctcgattgccaggttggaagtacccaaagcctcctccagctcgctttccacaagagcggccacctcggccggcccctggcccgcatcgggcgacggagcataggcgcagatggcttgacgggccagctggtcaaaagccgcgcatgcctcgaaaaacgacagcgcgttcacgacgatgacggcgagcacaatggccacgggaaggacgacagccagctcgacggtagcctggcccgcatccccgcgctcctttcgcagaacgtccatagctcactcccatctctcgagatacgtcggagcgccgacgatgctgcgcagggctgcgaaagcgccatcgacaagtccggtcgctccttcggccaaggtggcggggagggtcaccgtcaacggaaccgagacccctgtcagaggaatctcgacaaccgcaagggtgatctccagggaggccaagcgctgataggcctcgtcgctcacccgctccgctagcaaaccgagggcatcgctggaggcctcggggcgcgccaatgcctgctcgcgcagagagaggtaccgggctgaccagtcgccgccgccagcgcgcgccacggcttccgtaccggcaagaactggcttgaggggagccgtgtcggccggctcgaggcccaccgcctcgagcccttcgcgaaggtcattggcggcccactctcccaatcccgtcgagccggcgagcggtatgcccgaaagcacggccgccacgccgttctccaacccttcggtgccgctgctataggcctccagggcgccggcccatccgtccagcaccaaaccgccgacgccggagagcgcagagcccgaccccgacagatcgtcgagcaagtcgcctatcaccgacgcctccgtgctctcgtcccggatgagcgtcgccgccgacaccgcggcccgagcgcccagcgtgcttgagggcgcaaaagcgctctcgaaggcggtcggctccgacgttcccgtcgagacgacgaaggcgatgcaccccgccgctccgggaggatccgctttgatgcggaaggcgcccgcatcgccgagcgcggccagaacctcgtccaaaaggccctccgccttgcccttcgccgcgcgactcagcggctcagcatccgctctcgccttctggtagtcggcagcagcctgggcgacggcgtcgtagtggtactcgaacccattgtcgatggaggtagaggccgaggccaccgatcctaaggcgctcgctgtgaacttgcaggcagggcaggtttcgaaggaaccggactcccactcctcggccgacccgtaatagtccacgagccccgcctccgggcagccgtcccaggcatgcatcaccggcagctctccatcgacggtcaccggatagacgggctcggtatacagccgcgtggcccgcatctgctcgatgttccgcggaaagcgggggaacgacgctgagaagccgtcggccgtctcgtggacgaaggcctcgcgcagctcgcttatggcgtaggcgtagaatcgcttgcgcagggcgctgcgggcctgctcctcggcagagtccgaggcaggacgctcgctcaacagccgttcgcggtaataggctcgcgcccgttcgagaggcacagagaacgaccaactgtccaccgaggcgaacagagggttatcggcaccgctcagccccgcgaggcgccccgcgcgctcatacatgcaataggacggattgtcgccgcagtcgcgggcgaaaccccgggcccgggcttcctcggcggcacgcgccgcctcctcggcccgggacgccgcctcagcaagctcgccctcgcccgcttccacggtctcctccatggactcctcgaccgcactcgcccctgacgcaatagacgatccctcgccgggcagcagcagggccatggccgcatagccgctcccctcaccattggccgccgccaccgccgcaccgttggccgccgcgagaaacggcagcgcccgctgcagcgcctccagcccctcgcaggccttctgggagaacgcgtcgcgcgccttgagcaccttctggccggccgaaacgagctggctacccaactctgccgccggcggaacgcacagggcgacgacgccggccccgtacgcaatgtcccccagaagcgtgagcgacagcacggcggcatcggccacgcgcgcggccaccatgaactcggccacggggtttaaggccgcgcatgcggcggcatcggccacctcctgcacctcggcaccagcggcgtggatgcggtacacctgagccgctgagaacagcagcgacagagtgacgagcagcgccacggccatgccggccgtcgtcgagccctcctcgtcgcggaatatcgacttacccttcatggtgccattcacctgcctctccattgacgctcgcgccattcaatgattcctgagcccacgaggcgcgcgtcggcgccgtcgccgtcacctccaccactaagttgccccgctcgttcaccatcccgagcagcgtcgcccctccgtccagcaggggaagcggtctcacctccgtccgcacggtcacccgcgcgacatccgccgcaccaccgccctcgcagcgcacctcccatgtgcagccggagtcatgcacgtggaagacgtcgaggggcgggatcgcccccaagcggcggcgcacgtactcctcgcaagtcgccgcatcgccgtcgctcgtcgccagaagccggcagccctcggccgccgcaccggccatgaccatgcggtcgtacagcacgatgcccggctgcacgagcagaagaacgagcaggaaaaccaccggcagggccacggcggcctccaccgtcgactggccgcgcgcatcgcgggccctcgcacccatccgcctcattgcctcgcacctccttaaaacacgagcacatcggcgatccacgtggccgccccagcgagatgatgcgacgccgaggcgagcccgtgatcgacgaaaagcccctgggacaaggcccgccagagcgccgccccggcaacaatcacgcataggaaagccgccgtgacgatggcgtactccaccgtgccctgaccgcgctcgtttcctaaaggctgtttattcccgaggcgatggcgtcccagagctcttgcagctttggccggaacagggtgatagcgatgatggcaatgaccacgagcaccccaacgagaatggcgtactcggtcgtcccctggccgcgcgtgtccgccaagcgcgagcgcaccgcggcgcaccacgcgcgtgtgcgccgatcgaccgcctcccgcgcacccgctacttttcccacaacggattcgagcctcttcatgtcgcacttcctttctcgttcgtttcatcttcaaaagccccccgccaattccagaagcaccggccccagcacgagcatgagcatggcgggcaggatgagcacgccggtgggaaccatcatcttcaccggcgccttcgccaccgcctcctggcgacgcgccttgtatccgctgcgagcctcccgcgccgcgtcctccaagttgtcggccatagtcgcgccgaagcgcagggagcgcacaatgttctcgatcacccgggcgagcagcggggaagcgtaggagtcggccacctcgcgcagcgcgtccggccgcgatgccaggccgcaggcccattggcgctgggcgcttcggaacgcatcggccaactgcgtgcggaaatacccggtgtacaaatcgaggctgcggtcgaaggacattccgctgcgcatgccgagcgccaccacgtcgagcatctcggacaagtcgcattccatggcctcggctcgccggcaacttcgccgtttcaccgcccagggcaacgccctccacccggcgacggcgccgatgacagcgagcagagccgccagctcggtcgtcgccgtcagccccactgcaccgccgagaaccgcgccgccgagcatcaggcgcactcgcgcctccccatagcccgcaggcgacagcgcaccgccaagaccagctgcggccaagcggcactcgggcaagggccgctcccgtagagacgacggcgacaggaagtggaacagcggacttcgggcccgctgggacagctccaccgcataggcgactatccgcgcatccactccttcttccccgaccgctgcggcacggccggtctggagcgcggacgacccttccaccaccgccgcacgatgacggatgcgacgccgccatgccccgacaatgcgcgaggccatacctccgagcagcgccgccgagccgaccgcaacgaccgccgccgctccctgcacccaacttacatccatcacaaccgcctccctcccgcatccagcatccgatgcaccaagacgacgccggccacctgcatgaccaaagccgccgccagaagagccatacccgccatgctctcgaagaacggcgagaggaaaccggggctcataagcgagaacagagcgataagcacgaacggcatcgccgtgacgatgcgcgctgacagctgggcctgagccgtctgcaccttgagggagcgggcaaggtcgatctcgctttccaccgactcccgggccgcatcgagcaccgccgcaagactgccgccgctccgatgctgcacgtccagggcaacggccacgaaagcgagttccggcacatcggcccgctgacgaaacagcgccagcgcctccgaggccgtgccccccgtctgaagcaccagggccgccgagaggaacaactcgccgagaggacccttcatctccgaggccgtctgttccagcgtctgcatgagggagagccccgcccgaaagcacacgcccaacgagcgcagcgcatcgggaatctcgtctctcaaggcggcctcgcgccgttctgcatcgtttttcaccgcagcgcagagcgccaccagggcgcaccccgccaccgccgccccgaataccggcgatgcggccaccacccagccggcgacaagcaaggcaaggcaagcgcccagaaccagcgagagcaaggcatcggacgtcgaggcatagccccgctgctccaaggccatccgcgcccacaggacatagcgccgcaccggctcgcggcgcaggagcgcctcggcgaccggccgcaagcccgacaccccgtggcgcaaacgccaagcaagcccggggtgggcgactccccgaccgccttcggccgcaagggcccaggtgcggcgaagacgctcatgccgaaccgtcgcaagccgtgcgaccagataccccgccgcccccgacgaggctacgccgactgccgcaagtccaacgaccgcatccatgccttcacctcccgtctgtccgccaggcccatgggagccagccggtcgacccactgcggatagtccagccaaaagcccgcttcctggcccacttcccaccggtacagcgtgcgaacgacgcagcggcggcgcccgtggtcgaaggacacctcggcgatctcggagatgcagcgggcgcccccaggacggcgcgccgtctgcacgatcagatctaaagcgttgccgatctgcgcctcgatggcatcgggaggcagctccacggcgaaccgcaccatggtcaccaggcgctccaccgcctcgcgcggggcgttggcatgcagcgtcgtcagcgatccgtcgtggcccgtgttcatagcctgcagcatgtcgatggcctcgtcggagcggcattcgcccacgatgatgcgatcgggcctcatgcgcagggcgttcaccaccaactcccgtatggtcacctcgccggtgccctcggcattgggcgcccgggcttccaagcgcaccacgtgggggtgctcgtcgaacttcaattcggcggcatcctcgatggtgatgacgcgctcctcgtgggagatatggcaggaaagggcgttcaagagcgtcgtcttgccgctgcccgtgccaccggaaaccgcaatggaacggcgcgaccccacagcccaaatgagaaactgctctaccgtctcgtcgaacgaacctctcgctttcagctcggccagcgtcatgacgcgccgcgtgaaggcgcgaatggtgagcagcggcccattgagggagagcggcggcagcaccacgttgacgcgatggccctggggcaagcgggcgctggccatgggcgacgattcgtcgacccgccggcccaaagggcctaaaatgcgatcgatgagcgcccgcacctgctcgtcgctctcgaagctcacgctcgctcgggacaggcggccgtcgcgttctatgtacacgctgtccgttccgttgaccatgatctcggtcaccgtctcgtcggcaatcagatcctccagcggcccgagcccgaacaccgtgctgatcaggccctccaccaagtcgcggaacaccgcgggcgcaagcgccttccacggatctcgcgtcgagagcctccggcaggcggcccggatctcgttgcgcgcccgctccgggctgtcgacggcgatgagcgcgaccctatccaggggaaccagctcgcccacggccatccgcaaggactcgagccccgttgccacgcgctcatcgtcttgctgctcgcgggcgtcttccgccacgcgaacccattccagaagagacatttcctcacctccttacgatgcgtccttggccaaggcggcctcacgacggctcgcgcgacccttgcgtttgcgctgcttgccccgcaaccccgcgtctgccttgggcgccaagccgatgcgggcgagaggagcctgcacccccgcacttgcaggacgagaagccaagggcagcagctcgtcgagaacaccctcaatgcttatgcacaaaggactcgaagcttctaccaggctctgcgccatgcccgcgccgagcagctcctccacttcgcgaccgccgtcggccagctccgctacatgggccccatccaacgcactggacacgtcgatggacgtgaagggcgcatgacgcgtgcagcggttcacggcgagcagaaacgatcccgttgcaatgccgcagcgcaggcacaaatcgagggcatggcggcaggcacgcaccgaagaagcgcgctggtcgacgaggaacagggaggcggcagcccgctccagcagaaggagatgcacgtcgtcccagccgcctcccgtgttcgcaaccacgaaatcgaaggaggcgacgaggacgtcgacgaccgatcccatggaggccgctacgacctccgagcgctccagtgcccgcggggcgctgacgagcaccagcggcgccccactcagctcgtcgggcactgctcccgttctcgcaacttcttcagccggcaccgacggagcgtctcccatcagggccgcgagatccccaaactgcagatcagcgtcgagcagcgccgtgcgcaggccgcgccgagccccgagaagggccgcaagggtcgccaccgtgctcttacccgcaccaccgctcccgctcaccaccgtcagcagaaagcccgcgcgattctcttcctgcgtttttgccgtcgtgagagcttgtcggacgccttcggagtcgggtagcgccagcgcgacggattccccatcgcccctgtcgccatcgatgttgcgcgcagcttctttcagcaaatgctcccccagctccgcgggggacacgatgccgtccagctcggcggcctgagcccgggaggtcaccgatcccgtgcgatccgccgtcacaagatagacggccgtctgcggactgtcgcgcttgcaggccgcagcgagattaatgggctctgccccttcgcagcacgacacccacacgaaatcgaaatgctcctcgttgacgcgccgacgagccgaaaccgcctcggcgcacacttccacagccagctcctccaacaccgaagaaagcgaggttgcgccgtcttccgccatcggcagactctcgccgtggccgcagagcaagtaacgcttgcgcttcgtcataggttcgctccttcccccgtcgctcctctctcaggcgccgctggttgcccagaagcggaaggcgtctcggcagcggggccctccacaggcgtctccgccgaagccaacggctctgccgcctcctgcccctgaggcgccgaatcgcgaacctcccctcccgtcgaaccgtccgatagcgtgctgccgcctaaagccggcagcgcgaaataaagttccaagttctgcgccgccgccacgacctcctgcacccgctcgggctcgacggctaacgtaacccactccgccgtcgcccccgattcggacgcagcgctcgtggccagcaccagagcgccgcccaccaacttggtcgtggacacggggcccgtggcgtacacgtccacttccatacccggctccaccgaaccacccacggcctgcacgggccgcgccggcacgctgatggcggccatgcccgcaggcaccgccagttcggagtcggacacctcggtgcgccggaagcagaggacttcccccttgatgacgttcgaacccagacgtttaccgatgatttgggaggaatcagtcacggcagtgtcgggcagaagatcggccacccacatcttcgtgacgacggccgaggcgtccaccacctcgcccgccgccaagtcgcgcttggccacgcacacttccacctgatcgcccccgtagcgctcaagcgcctcggctcgggccgcgtccacctccccgcgcacgctggccaagtagagggccacgcacaacgcgcagcacagcccgcaggccagagcaccccatttcgtcttgttgattgccatcgcttctcctgactttcggaaacgatgacatcatgcaagatcacgaccgtaaaaatgacgcgggaatgtcccgtttcgttcctcgcgccgaccgtcatggagtcgcatcctcgaccgcactggcgtcccaagggcgaggggaatgccagggcaaacaagaaagccccaggcaacccggggctttctgcttcaattcatggtggtcgcggagggatttgaacccccgaccttgtgcttgtaaggcacctgcgctcccgctgcgccacgcgaccgaacatattacgcgcctaaatgcgcgagtccgtattgtgccacaagttccccgccggagcaaatggaaagcagggcgccgagacgatagcgcatcccacgtacctcgcggcacagcgaccacggcgcaccgtgcggcgcgatcccggcacggcgcccacggcgctacctcggcacagcggccgcggcattgccgccggcgtcgtcgctggtcgcgcgcatccggcccaccacgagcgccgtaacgaagatggccgccgcgaacagcaagagcacgccgaccgcaagcgcgacgccttccgccgccgaccccgtcgcgtcgcccactgccgcgcgcaggccctcgccgagccagtacaccggcgtgaaggtggccacgacgcgcaccgcctcgggcataagatccaggctgatccacgtgccgcctagaaacgtcagcaccatgccggtgatgttgcccacggcgttcgacacactctcgccgcagcccagctgtcccagcagaaacgcgatggccagcgggatgagcacgaacacgagctccaccgccagcacgcaggcaagatcggccggcgcaagggtgaatgcggaatagccgaatgcgacaaggccgatgcccatgataacggcccacacgagaagcgccacgacgagccccgccgccgccttctgcagccccagacccaagcccgaggtggaggagacggcaacgcgccgccgcacgtcggtgcggttgaaggcccccatgagaatgcccaccgacaccaccacggccaccgtgagcgggtaggcgctccacataaggtagaaaacgaaggcctcgctccccaccgccgcacccgggacggaaacctcctcgatgcgcggctccttctgcgcggaggcctcggcctgggccaccagcgcctccggcgatgcgtccggctcgagcaccgccgcggcccgcaccagccccagatactggttcacctgggtatcgaccagcgtggccgccatcgattggaagctgaacaccgtctcaaggcgcgggccgtcgccgccgtcgcgggccgccgccagatagccctcctcgaacccggcgggcacgatgagcagatagtccaccaagcccgtggccacggcatcctggcaggcccgcgcctcgtcggccacctcaaccgacgttccccgctcctcgaggaacgccgccaccgagcgcgacaagtcgctttgatcccgatcgatcaccgcgaagggcacctcggccgactcatagcccgcacttgtcgccggcgggtacacgccgctggtgataaacaggcccatgaggctcaaaaagcccacgtacaccagcagatagatgggatgcttcgccaccacttccaaggcatatctacaggcttgcatagcgctgcctcctcacgaacagggcccctacggcgaacagcgcggccgagaacaggccgatgagcgccacgttccccgcgaacacctccagcccgtcgtagtagtacaggctgtagaacatatcgcagatggccttcgccgggttcagcgaggccagcacggggaattcccgcgagaccatgtcggccagctccatgcagggctcgccgtagagccccgtgaacagcgagagcaggcacaccaccccggtgagaatgcccgtcttcgaccccacgtccaacttggggagtgacccgagcgccgtgcccagggcgcaggcgagcagcgatgcggcgcccagtcccgccacgcacaggccctcgcggccggcgaagtcgacccccacgacaagacgcgtgtacagaaacgcgatgagcaggcagcagaacgacagcagccagcaggccagaagcgtcgccagaagcgtgcgcgtgcgcccgatggcccccagcgcccgccgcgcgcccaacggcgagaggttcggctgggtccagcagacggccaccacggcgatctgggcgccgaacagggccgccatggcgaacagcgcgtagtaaaagcgcaccgactccttgggcgcggcgtgggtgagcgagacctcctcggtcgcatcgacgctcgagaacatcgcctccagacggcccggatcggcgaaggccccggggttctcgcgggcgatggatgtcatcaggtcggcgtcgcgcacgtaggtgcccaccaccgattccaggatgctgcgatcgatggcgtccatatccgtcgtctggccgatctgcagccccggcgccagggacagcaccggctcgccgtcctcgtcgacggagaacacccccatcacctcgccgtcgacgagggccgatgcggccgcctccccatcggcgaagcggcgcacgtccagcaactgatcgtcgcccctttcccccagcgcctccgccaccgctgaaaacggcgacgcgccccacgcctcatcggccaccacgccggtgggcacggggtcgaactccatggcgccgtccaagttcgcgaacatgaacatgaagatggtcgccatgaggatggggaaggccaaagaccagatgaacaggctcttctcgcgaacgagcgcccgcaacgtgcttgcgaacaacgtgcccatagcccgctcctaatccctcagctctttaccggtgatctcgaggaacacatcgtttaaggtgggcggctcggcatagacgcggcccacggcgcaccccgcgtccgcaagcacgcccagcacgtcgcccacgttgtggccgccctgctcgcactgcacgaccagctccggctcggtgtaggtcacgcgccgcacatggggcagcgaggccaggcgcccgcgcacggcatcaccaagcgccgccacctccacgatgatgcgctcgccggcccccactagggccttcagctcgacattggtgcccacagccaccgaccggccgcgatccatgatcatgatgcgcgagcagatctcctccacctcttccatatagtggctcgtgtacaccacggtgcagccctgcgcgttcatgcggcggatgccctccagaatggcgttgcggctctgcggatccaccgccaccgtcggctcgtcgaagaaggcgagccggggcctgtgggcgatgccgcaggcgatgttgagccgccgcagaaggccgccggagagcttgcgcgggcggaacttcacgtagtcctcgaggcccacgaacgcgatggcctcgtccacgagccgcgcccgctcgcgccgatcgtccacgtacagggcacagaagaagtcgatgttctcccgcacggtgagctcctcgaacagcgccacgttctgcggcaccacgccgatcttgcgcttaaggtcgtagcgcgtgggcgtcatgggctcgccgaacaggcagatgtcgcccttgtcgaaggtgagcagctgcaatatgcaattgatggccgtcgtcttgcccgaaccgttcgggcccaaaagcccgaagatctcgccgggctcgatgcgcaaatcgaagtggtcgagcgccaccacgtctccgtagcgcttcaccaagttgcgcacctcgacgatgggcgccgacatagcgccggcccgtgcgctatcgtctctcgcgcagtcgccctgcgcgccatcctgcgtgccatcgatcctcagcgcgccggtccgcgcgctgccgttcgtaagctcgccgtccatgagcgctccttcccctatcggtcatggccccattattccaagaaccgccgcgccgcagaagtgccaaatgtcacgaatgtcgacgtgccccttgcttcgcgaacgtgcgccttataatggccccatggatagaatcgtcgacgagatcgttctcttcgggctggggcttcccctccttctgctcgctcccgctgcccccgcagccgtagcggcgccccttctcgccctcatcgccacgggcgtcctcgaactgctcgatcgcggcgaaggcggtgcgcagcgtcagttctccgccagcgccgcaagccccatccgcgccgcgcgcttcatccgcgtcgcacgtcccgccatcgccgccgcctacctcatcgccgcgctcgccgcgccggccctggctgcgttcgtgccgcttctggcctacgccgccgtggcgcagaacctcggccccctgcgctttctatggcccgcggccctcctgggcgccgcagtgtccggaagcggcgcgctggcggcagccgcccttctgctgggagcgctcgcctgcctggccgcccggcgcacgaccaaagttcaaaccgagcgcgcctcgttgcgccgatggcgcgacgccgtgcaggaagaccgcctcgccctggccgagcgcgcccgcgacctcgccgagcggcaagatttggaagtgagctgcgcggtgctggccgagcgagcccgcatcgcgcgggagatccacgacaacgtcggccacctgctcacccgctcggtgctgcaaatggaggcgctcgccgtcacgcacgaggacgatccagcgctcgccaaagagctggcggcggtcggcgccaccctccacgaggccctcggcaccgtgcgggccagcgtgcacgacctacacgacgaggccttcgatccacagaccaccttggccgagctgatcggggaattcccgggaattgccggcacgctcgccttcgaggccgaaagccttccacgccctgtcgcccttgccgtcgtggctatcgtgcgcgaggcgctcgcgaacgcccgcacgcacgggcgcgccacgagcgtcgccgtctccctcctcgagttccccggcttctatcagctcgccatcgaggacaacgggcgcgcggcgaacctggtcggcgagggcggcctcggtctcgcctcgatggaagagcgcgcgacggccttgggcggcaccttctcgttcggaccgttgcccccaccgcgcaccggctcccgcgtcttcgccaccttccccaaaacccaggaggttcgcccatgagcgccccatctcccctctccgtcgtcatcgtggacgacgacgagctcgtggcccaatcgctgcgcacgatactggaggcgcgcggcaatgtgcgcgtggcggccctcggcacgaagggggccgaggcggcggcgcttttcaacgagcaccaccccgacatcatgctcctcgacatccgcatgcccgatctgtcgggcctggccgccggtgaggccatcctcgccgcccacccgaaggcgcgcatcgttttcctcaccaccttcgccgacgacgactacatcgtgcgcgcgctggcgatcggggcccgcggctacctcatcaagcaggaagctcgtggtctggccgaagcgctgcattccgtcatggaaggccagatcgtcctgggatccgatgtcaccgaccgcgtgagcgcgctcatcgggcaacggccagcaaacggcgccggagccgccttcgacgactctctgtcgcaccccgataacagccaggccgcccccgccttcgccgaggggctcacacagcgcgagcgcgatatcgccgagctcatcgccgaggggctcgacaaccgcgagatcgcgcaggcgctgtacctgtccgagggcaccgtgcgcaaccacatctcggccatcctgcagaagtgcggcctgagaaaccgtacccagatcgccatcgcctggtggcggtaggtcgcagcgtcatccgctccccaccgcccgcgacgttccccggcgccctcatcgtccgcaagaccgcatggtgcgccgctgcaatttcatgcaagaaatctacgggcaaatggctatcatctctccttgttatggagatgactcatgccccacatattcagcagccccgccacccccggcaccgcgagaccgtgcgccgcgcccttggcggcacgatcgagttccggcatttcaccggcttcgaccagctgttcgcgcctcacgcccacggctacccggtcataggcctcgtgcgcgaggggcatcgcattatggaatgcaaccgcacgcgctaccgcctcggccccggccagctgctcgccctcaacgcgggcgacgcccacggatgcgtccaagagggagccacgccgctcgtctacgacagcctcgccctgctcgatttccacgattgcccgccttttgccggccccatcgttgaagacgccgaggccatcgccctcatgggagacctcgccggcctcatgcaagagcccatcatcgacgaggcgcacgtggaagaggagctctgcctgttcatcgggctgctggcagcccacaacgagcccgaaacctccgaccaaacggctcgcgacctcgcaacccacagccaatcggaaggccgagagcatccctccccggccaatccggcagcccccaacccggccgctcaggccatggccgcctatctgagggaacacgcgtccaccaccgtgcgcttggaagaggtcgccgcagcggccggcctcgacaagtaccgcgccctgcggtcgttcaccgccgccttcgggctcacacccatgcgctaccttgcctcgctgcgggtggaggccgcccgggaggcgctcgccaccggggctagctgcgccgacgccgcctgggcggcaggcttctccgaccaggctcacctgacccgcgccttcaaggagcgcctggggatgacgccgggcttctatcaacgggccgtcactgaatccagcgtcagcgccgaccgggccaagggcgccccattgtccccctctaccccgagaggctccgtcgattcgtcacccgagcaggtgctctcatgaaatcgcatgcactcgccctgttcaccatcctcgtctggagcaccaccttcgttgccgccctcgtgtggtcggtctactccaccctcgtcgatcgcatcgccgacgcgggctacgaaacgctggccgccaccaagcgcatcttcgcgtggggccttttgttcacgatgccggccgttccctttgcaggggccttccccgcactgggcctggtcgaccccctcgtcgttgcgaacctgctcttcttggggcttctcgcctctgccgcctgcttcgccacctggaacttcaccgtgaagcacctcggcgccgtcgccacgagcacctacatctacctcgtgcccgcgctcaccggagccgcctcagccctcgtgctcggcgagccgatgacgcctcccatcgtcggcggcgtcgccctcaccatcgccggcctcatgctttcgaaccgcaaaggctctcgccgagggcaacgccgcggccacgcctcgccctcctcttcgtagacgtagtacaatggccggagcgtcaagggatcgctgctcgcaccagcagcatggccctcacgcaccactatcgccatgtcgaagaaaggacccccgtggccgctattcccgatcccgtccaaaccgcctacgagacggcggcggcccagcgcaccttgtcgctgccgaccatcccggaagagctgcgcgctctggaggccgacgacttgcgcggcggcgccgacgagcccctggaggccatcgacgcgagcggcctcatcatcgccgacgagaatttctcggagctgcaggcggcccacgcccggttcgcgaattgcttcctctcctgctgcgacttttccggctcgctgtttaccgatacggtattcgagggatgcgacttcgccaacagctacttcgacggcgccggattcacccgctgcaccttcaagaactgcaagctcacaggcgcgtcgtttatggaggcgaacctggagcacgtggcccttgaagactgcacgctggacttcggcgccttcaaccgttgccgtttctgggccgtatcggccacgcgctgcgatttctccggcgccgacatggccgagatggagctgcactacgtgaccctggacgacgaccgcttcattggcacgagcttcttccgcacgccgctgctcgggctcgatttctccacctgtcagctggagggcgtggcgctctccgacaccatggcggaaatctacggcacgaagatgaacgtctatcaggccgcagccttagcccgccgcctcggcgtcatcgtggcggagtagcctaagccgccatcctgtcgtcgcggcgcttcgacacgagcaatctcgggcgcggcacggctcgacgggaaacgacgacgggaacagccggagctgcgggagcgcccgtgcgtccgtcggcccaggtggcggccaccaccgtgcccacgatgaccgcggcacccagaagccccatcgccgaaagcgtctcccccaggaacaggtaggcgaacagggccgtgaacaccggctcgcccgtcagcagcagcgacaccgtcgtggaagagaggcggtcgagcgccaagctctgcaggaagaacgccaggcaggtggagaacagcgccaagaacacgatgatgccccaggccaccggccgcacggcggccacgtccagcatcggctcccatgccagagcgcatcccaggcacagcgcgaaggccacggcgatctgcgtgccggccacggtcacagcgtcaagctcggccagcgcctgcttgccgaacacgagcgcgccggccagcgccaccgacgaccctaaagccagaagctcgcccggccccacggcgagactgccgccctggctgcacagaaggtacaggccgccggctactcccacctggaagggaatgatggcgcgcgggtagcgggagcgctccaccaccgtcgagagcagaggcgcgaacaccaccggcagcgccacgaggaaccccacgttggtggcggtggtaaggtcgagcgccacgttgcagcacagatacgaaatacccatgcacagcgcctggggcagccacagccgcaccttcacgctgcgaagccgcgcgacgatgcggcgcccgaagaagagggcgaacaccgccgtggccaagccgaagcggacggccaggcaccacagaggcgtgatggagtcgtaggcgaacttcgtcacagcgctgcccgatccgaaaatgaccacttcaatgagcacgaagaccacgaacggccaacgcgcctgcttccaatgactcatggctcctcctctcagcttcgtcgcggcccgcatccggcacatggcggcgcgcaacctccttcaaagcgcaaaaatccaagccccacctggggcgttctttctctgaatttggaacgatggttatactaagctccgggcagaaaaaagtaaaacgagacttcttgtaaaacatttcaagaaagtcttatacttgtgcaagcgcacaacacgaaacaggcttattcgtaccccagggagacaccttatggccaatcagaaatacgacgctttcctcacggtggcgcgcctcggcagcttcaaggccgctgccgaggaattgggctatacccaggccggcatcagctacctggtgaacgccctggaaaaggagctgggactgacgctctttttgcgcgagtacggaggcgtgcacctgaccaccgaaggccgcgaagtgctcggtcttgtgcaggcgatcaacgccgacgagcacgcgctggccacccgcgtgcgagagctcgccgaccgggagggcggccttgtgcgcgtgggcgccttcacgagcgtggccatcgaatggttcccctccatcgcgcgggccttcctcgaccggtatccgaaaatcgacctgaagcttctgtgcatcgacgacgaggaggagctcgtgaacgccgtgtgggagggccgcgccgactgcgccttctccatcgcgcccgagcggcgcaacctggaggcggtgccgctgcacaccgacccgctgcttgtggtgctgccgccagaccatcccctcgcgggcgcccccttcttccccaccgaagccttagcccgcgagccctacgtgcagctgcagggcaacgcgcgcccctccgagatggaggcgctgttcgaggccaacggggtcacccccaacgtgcgcttcacggtggactccgactacgccgtcatgtccatggtcagcgccggcctgggcttctccgtgctgccgggcctcattctgtcgcgccctctgttcccgctcgccgtgctgccggccgagcgcgagtgctcccgcagcatctcgctcgccgtgcgctcgcgcgaaaccgcctcggccgccacccgcgccttcgccgaagtcacccgagaatggatcgccgcgcgctacgcgagctagcaccaacttccgaaatgcatacttgagaacggccgcccaaacttgctttttcgccttctgcgcggagaaaagtgcgatcgcgcgagtcttttgagccgagaaagagtcctcgtgcaagaaaaagtgcgatcgtgcgagtttcgaaagctctgaaactcgcacgatcgcacttttctccgcacggaagagacaattctcgtcctggatcttcgaaaccgcaacttcttgcactcatatgaaagcaagaagttctgacccaccgaaagcgccggttcacaaagcgaagaaagcccccagtgggggcgattcgcgtttgcaaggggtttggggatgcgaatcgcgcccaccgggggctttcgggatcggggggtcgggaattagcagctgctcttccgtaggggctgaccttggtcagccctcctcaacaaagacaatctttctcagtcgggaggggcgaccaaggtcgccccctacgggtgccaaccggaagaccggcctccctcgtgctctagaagaacgggtagatggacacgccggtcatgtagaacaccgcgcgcagggcgagcgcgctcacgagcacgcaggccgcgcccacggcgccccacaccttccagtcgcccttggcgcgcccggccagcgcggagcccaggccggccaccgcggccacgatggccgtgacggcccaggccacagacgcgccggagaagggcgccgtcgagccgtcgggagtgatgtccatggtcgggctcgtcgggtcgaaccagaactccaccgccgtgtaggagccagccgtggcctgcatggcgacgagataggccaccacgagcaccacgttcacggcctggccgatgaggttcgccttcgcatcgaggtcggacgcctcgtcgcgcacggcgcagatgagcgccatggtggccgggccgaagccgcaggccgcgccgagcagcgaggcgatctgcagcacggagtcccaggcgggcagcgaggccatcatgtaggagtggcccatgacgatgacgagaatcgccgccacgacgatgccgatggcggaaagccacgccggcacgcgcgcctcgtcacccgcgcggcgcaggtacacgaagtaggcgaccatgacgacggcgagcaccacaatggcgatgagctcctgggtgatgccgctcgtgaggtgcccgaagccgttgaagatgcgctcccagtgctccagatggaagaacaccgcgatgccgcccacgaccagaagcgcggccgaggcgatgagcgccggcatctgggcgcggccgccctttccgcgcagcgcccagaggcactgggccgcgaacaggccggccgcccaggccaagagcgtggtgaacaagataaggggccattgcagttccattattccccacccttccagtcgcggtcgcgcaggatgtaggcgaagtgcggcccgttgcccacatcgggcaggtggtgcacgtcggcctcggtgtactccttggccatatcgcccagcttcacgcggttgccggtgtacaaattgtcataggagcgatcgacgtcgtagccgatctccggcgcctcgaaggaatcgatgccctcgtccaaatcgccgaagaagcgggcgcggccaccgcactggataacgcactggggcagaccgccctgggcggtgatctgctcgcagagcgtgcacttctccacgacgcgctcctcctcgttcaggtagcgcacgccgtaggggcaggccatggcacagaactggcagccgatgcacttcgacttgtcgatctgcacggtgccgtcctccagcttgtgggaggcgcccgtcgggcacaccttcacgcactcggggttctcgcagtgctggcactgcacgggcagatagtacatctccacgtcgtgggcgctcgtggcgccggccttaaggctcgggccgatgcggagcaccttgttccagtacgagccgatcggcacgttgttcacggccttgcacgcgaccatgcacgccagacagcccacgcagcggttcaggtcggtgacgattgctttgttcgccatggcttaggcctcctctcggatatcgtagttgggcagccattccttcaggcgcgggtcggaggcgtcgcagatgatctgggtgccgtcctccggcgcgcaggggatgaccttgccgtcggggcagttctcgggcgtggccttgtaaatcttcaccggcacgccgcgcatatggtgcgagctgatgaacttgtcctggccctccgggtcccaaatgcactcgatgttggagagcaggcagccgtgggtcggcgccggcagctccgggaaccaccaggcatgctcggcgttggcccagccgggggcgatgccgtggtacagatcgacgcactggcgaaccttgccccacgcggtctcgatccaggcccagtcgccctgcttgaggccgagcttctcggcgtcggcggggttcagctccaaacgcggcgccggccacagctcgcggcaccagggcagctggcgatgctcgctatggaagtacaccgggatgcgacgaccggtggtgaggatgatcgggtactcctcaagatcgatctgaccaccctgggcagaggacacgggcggctcgtagttcggcatgatctccttcatcacgtcgaacttgcccggctcgaactggttggccatatcgaggcagaacgtctcgaactccatggaccagaagctcaccaagcccgtcggcgtggggcagccgaagttgttcactggctggccggtttcgggatcggtcgaccagggagcagccgtgcaggcgtccttgcccatgcgcatccaaccagtctcgaagcggcggtaggttccccagcggttaggctcgatcaccttggcgttgatccagccgttctcctggaagtcgtcgcggaagtcctcccaatgctcccacttgcagcccgggtagcgatcgccgaagccggacacctcgttgtgggcctggaaccaatcctccagacggtcgtcgtgatggtaggcgccgggcgcgtcgccggcaatattggtccacgtgccgttggggttgccctgcttctcgatggcctcgaagatgaggcggttgatgtcgtagtcgaacttcgtgtcggccggcggctcgatgcagcgctgcgtgagcccgatgccgcccgaagcgccctgggacacgcggatgttgttgatctcggtccagtgctggcacggcaggatgatgtcggccatctcggtgccggggtgatggaacatgttgatgtccacccagaagtccagcttcgagagcgcctcccacgcaagcgtcgcgttcgacatgttcatgaacgaaccggactcgttgatgccgcccttcagcgggtactcgccctcgcccaggcacgccttccaaatgcaggtggcgtcggcccactcgttgtagtacggcagaatggggaacttctcggcgccgatcatgttgcccagcacctcgcggcgatccgggatgttcatcggatcgacctgcttgtctgccagatacatcggcgggcacatgggctcgccggtgagcgcctccatgcccttcagcgtccacttcacctcctggggcatgttggtgccgggagcggccgtggcctgctcgtcgaccggcgtgcgggaaaggccgcggttgccggccgggccgtcgaagttgcccgaggagtagatgaggttgagcaccgcgcgaaccgtctgcgcgcagttgccgatctgatcgggcgccaggttcaggtggatgccgccgttgccgtaagtctgcccctcgggacgcgtggcccacaccgtgcacgactcctcgatgagctgcgggtcgagaccggtgatctcgctggcccactccggggtgcaatcggccaccgacttggcgaggtagctccacaccgggcgcgcgatgtgcttcgtgccgtcggccagcgtcacctcgtgctcgccttccagatcgaagtcgatgccggcctcctccaactcccagtaggagatcggcggcaggtagccctcctgcgaggtgcccgcgtacaccacttccatctggtcgcgggtgggggccacgtggttgcagccttgccactgggtggtatcggtatcccagtacaccaggccgcccttaccgtcgttggccttcttgttccaggccatgaacttgtgggggctgccgccctctaccagatccatctccttcagaaggcgcgtcttcagcttcgtgccgataagatcctgcaaggccggaacctgaatcggcgaggagagatcgaggtagcggccgcccgtgggctccatgtcctccaccacgagcaaagacgcatcggtccagcgcttcacgaactcccagtcgatgaggtccttctcaatgagaatgtgctgccaggccagcgccagcgcgccgtcggtgcccggctccaggttcagccagtaatcggcctccttgcccgagccggacaggcgcgggtcgatgcagatgtgcgtctcggcggcgctcatgcggtccaccaggttgcgacagctgtcgtcgtagttcgagttctccggcgcggtgccccactgcacgtacacgcgcggcccgtcgcgcagcgccatccacggggcgccgtcgaccgagctgatccagcccataaggcggcgcggacccttgcagatctcggacgccacatgggcgttgggggtgtcgaacagccacttgtagaacgcgtaggggccgtagacccactggcgggacgtgccgcacatgttgaagatggactggccgccgtactggtccatgatctcctggaacttcgagccgatgatctccatggcctcgtcccaggtgatgcgctgccagcccggctcctcgcccttggggttggtgcgcttcatgggatggtagatgcggtcggggtggtaggccgcctgcagcgacgactgcgacttgccgcagcagttgcccgacgactggaatgacgactggtcgccctccaccttgacggcgcgcccgttctccaccgtgacccacacgccgcactccatcttgccgcagccgcggcagcacgtgcgcacgcgcttgatctcgctgccgcggctgggcgcctcggcgtcctcggcgagtgcggcgcccggcaccgcgcatccgatgaccgccgtggcagccgtggccgcggacagcttggcgaaggtacggcggctcaagttgagcttacccatctctcctcctttttctctcatcctttcgggcgccccggacgggtcgcccacgttgatatagtggcaaaatcaggcccccgccgcatcatatgtttgccatgatttttgagttttcccagatgagagctttattagtcccatgaaaaggtcgggggcaagcacggggtttcgctgtataatttttgccaaggaaaaggggagttttccttgaggaattccagggaaagggctctcggcgcgcacatgtggcgaccgccctaccattctttctatcgagggggtcgcgtgagttttcgttccatttcagagagcctgaacgcctaccgcgaagaagccggcagccatccggtggccctcgatcgcgtgctcggctttacctttattcgcgcgtgggtatacctcatgttcgtgggcgcggccgccagttccatgacatggagcggcgagcagatcccgcctttgttctacgtcgtctccacggccagcctctgcgccgtgctcttcgggagcgcgctagccggcgagcgcttcgtgcgcttcatgacccatccggccgcgcgcttcgcggcacccgcgctcaccaccggtggaaccctgcttctcgcctcgtcggcggcgggcaccggagcggccctctccttcggcatcctgggcgccatcacaaccggcatcggctcggggctgatcgatctgggctacggcgagttgtaccgcaacgagccacccgcccgcgccacgttcgaggtgcccctggccttctttctggccgctgtggcgttttccctcgttatcatgccgccgtcagttgttggctgcctcatctgctcgcttcttcccgccatttccggctggatcctgttcgtcgagcagcatgcctggtcgcgcaagcaccaagccagcgtcctgcccatcgatttcgacctgaagtccttcgcctggcgcatcggcgtgtgcgcgtgcttggtgggcgtggccgacggcatggtgcgggcggcgttcctctcgtcgaacaacctgagcatccacttgtttttgcagtggcccctggccggcgccgggctgctcaccatggtcatcgtgtacggcgccgccctgctctcctccgagcagagcacgcgcaccatctacaaagcggccatctgcgtcatggccttcttcttcatgctcctgcccgtattcaccagcgcgcaagacgtggaaagcgtgctggccctggcaggctacggcaccttcaacgtgctcatctggatgcttctggcggagatctcgtcgaactaccgactctcttccactgaggtgttcggcatcgggtggggcatggtcacgctcggcgtgctgctcggctccatcgccggcaacatcgtggatcggttcgccccgttcacaccacaattcctgagcctcatcgtccttatcgccaccatggcggtgctgctctcgtttctgttcgtgttccgcgaaagtgacctcatcgcgctgaccgaggagtcggaaagcgaggccgagaacgccgaagatcgcgcgctcggcagctccagcgacgcacctcccacagctagcgacagcccccgcccgcgcttccaggaccgctgcttggaagtggccgccgccttcgagctgtcgcccaaggagaccgaggtgatgatgctcttcgccaagggccgctcggccgcccgcattcaagaggagctgttcatctcgaaggggaccgtgagcacccatttgcgccacatctaccagaagatggacgtccattccaagcaggaaatgctcgacgtcatcgaaggcgtcacgagggagtagggccttccccttttctatgccttcagtataatagcgggcggaaaggagaggactatgagtttacgagggcgcactgcgctcattgtcgcgggtgcgggaatgaatctgagcacctacggtatcggcgtgtggggcgacagcgtgctgctctcgagcggttccttcgtgggaccggccctcgccgcgctgtcggacacctatctgctcttctcggccctgggcctgttcggcgcccttatcgcccgggtggttattgccgtcgcgtcgggagcgagcaaccatcgctacctcgcctgcgggcttggacccatggcgatggcagccgcactattcatatccggtgtttggaacacctcagggcttctggtggccctagcggctttctgcgtcggctggagcttcgcctgccagagcctgttctgggtgacgtcaatctctttcgagcccaagcagatgcgcacgatcttccctttggaactagcctgcgcagccgcgttcaacggactgctcgtcatcggcttcatggacaaccaggggctgttcctcgggttgtgcatcgccctttccgctgccgccagcgtagccctggtgcgccttgatcaaaaatgtgagcagccgaaaatggtgcccgtagcgggattcttcgagagccgctatgtgcccgcttttcgcacctttgctgaggtgctattctgcgtggcggcccttcagaccatagcccccactctgaactacatggggtttttgggagatctttccccgatcgaacagcagctggtcgtagcaggagccaagctcgccgccgccgtggccctcgtagccatcctgcgcttctcgaaggcgccgctgctctccgtccaggtgttcaaggtggtcacgcccgtgctcatcctgttactgttcgccgtgccctttgcgccggcgccctacctgctcggactgttggcagcgggttcttgcttgcatttcgttgtaatgaactcgctgttctgcattgacgccatcgctatcgcgcaacggcaccgtcttgtgttcgaggcgttctacggcgccggctacctcttactcatgggcttttgctcggtgctggagaaagtcatgccccagcttctggccgccggctcctccgccgagctgctgctggtgttcggggtgttcttctccgtgtacgtgctcagcatggtgcttgtgctggtgcgcagacgccgccgtgatgaggatggcggcgcactgccgtccgaccgttttgtaccagatgcagacacgcggagagatgcttcagcgacgctctcggaagcagagccttcctcgggcatcgccatcaccgaagatgctcccgcccctctacctattgccgaacgcgtaggcatcgtacaacggaaattcggcctgtccgacagggaggccgaaatcgtgctgctcataacacgaggacgcaacgtgccagccattgccgaggaactcgttatatcccaaaataccgtgcgcacccacataaagcgcatctatagagcttgcggcgcccacgctcgccaagagcttatcgagctctgcgagactgcggagaccgaagaggactccctctctcaggattagactggatcagatcgtatcaccaggtaaatcacccattcatcccgtgaatcacccattttgagacacctatcgatcctctttttgccctattgtcttcccgtcgcaagaagcgatgaaagacgaaaaggagggtcttatgtcgaagattaccgaaggcggcctgtcgcgccgccagttcctgaccggctcggcgctcaccgccggagccgtagcctcgctcggcttggccggatgtgccccaaaagcgccgacggaggcacccgcaaccggcgagagcgatctagcagccaccggcgccgacggcactaccgtacgcgcccatgcagcccagttgaatcctcagtctgatccgaaaccggtatcgaacaccacctgcccctcactgtttaccgagtggaagatgggctcgctcaccttgcccaaccgcgtggtgaaatcggctgccggctatatcggcgtcacctcgcagggcatcactggcgacttgcacatgcagcactacgggaagttggccgccggcggcgcgtcagtggtctactgcgacgacttcgccgagctgtacgatcacttccgcgctattcccgacgtgggcaagttcaccgactggaccgacgaggatctgacggccttcgccaacaacatcaaggaaaacggcgcgaaggcaggctaccagctagccacgatgggcctcgtgttcagcggcttcgagcccgatccgacggccatcttccaatcctccgactgcatggatatgaccgccgaggagatcagcaacctcattgccgacaccattaaggcggcagccaccctgaaacgctgcggcttcgactgcgtggaggtcaacgcagccggcgagaatgtcggccagacgttcatgtcccgcaatcgcaacaagcgcgaggacgattacggcccccagaccttcgaaagccgcacgcgcttcgtctgcgagatcgtgcgcggcatcaaagccgagtgcggcgaggacttccccgtgcaagtgctcatcaacggtgtcgaggagaacgacaaggccatcggcgacaacgcctttttcactaccgttgaagagaacaaagagatgtgcaagctcatcgaagccgccggtgccgactcgctgcatatccgcatcgggccctgcggccagcacgtggccgagttcgccggcgacttgtacttctgcggtaccggcatcgagggaacgaccggctatggtacccagttcgatttcacgcgccattggcagggtatgctaaaggccgatcagtcgggcctcggcatcatggtgcccgtggccgctgagatcaagaaagccgtgagcattcccgtgggcgctgtcacctacatggatccagctcgcgatcccgagttcttcgagagcctcatcgcctccggcgagctagacttcatcctgatgaaccgaccgctgtcggtggactacgattacctgcacaagctggaagagggccgcatcgatgagatccgcccctgcacccggtgcatgcactgccattgggatgcagccgatgacggcaacctcactttcagctgccgcaccaacgccgcccaccccttccgcttcgtgaccggccagctcaccggcagctacgatcccgagccagccgccacggcgaagaacgtggtagtcgtgggcgccggccctgctggcctcgaggcggcgcgcgtagccgccgagcgcggacactccgtgaccctctacgagaagaagggctccgtgggtggccttctggaattcgccaataacgtgaagggtccccatgagaacctgtcggtgctgcgcagctacttcgagcgccaaatggaagtactcggcgtaaacgtgatgctgaataccgaggccaccgccgacatcatcgccgaggcctcccccgatatcgtaatcgcggccaccggtggcgtgcgcgacaccttggggctgtccgacacggccggcaccaaggtggtgggcatcgacgacttcatgatggccgacattgccgaggaggtcgtcatcgttggatcgaacgtgcaggccatcgacgccgccatgtacctgctcgcccagggaaagcacgtgcaagtggtcacgccaaacgcggcaagcgccatcggagcaggtcactcgttctgggtgaaaaccttcacccaacccaacatgaaggccttgggcgtacgcttctggcccgaggcgactgtgaccgccgtgaacgacggctccgtcactgtgaaaacggccacgggcatcgagcaggaaattgcctgcggcaccgtagtcgaagccctggactgcctgccgaatgacaacctcagcacgggactctcctgcgaggtggtcaccgtcggcgacgcggcgcgccccttcaacatcggcgaagccatctgctccggcaacgccgccgcccgcgcgatctagattcgacccaaaagctcggccgcctagacgtcgcactcaatctcagtcctccccttcaatcggggcagctccccctccgagctgccccgatttttatcgccacctgtagcccggagccactttttggcatcgccgctcggacttcccggcattttcttgggtcgggctgcgggtattctggcagaaagccgcgtcgggctgcggattcggagcaaaaacccgcagcccgacgcggctttttgccaggcagactgatggcgcagggaaatttccccccttgacgaatccaacagccctcggctactatgcgctgtggggataccgcccgaattctcggacggacaatgtttgcaaaagtcgaacctcgggggcgaggttcatctctcgctgcgtgcgagagggaagactgcaagcatttgttcaaagggcggatgatatgaaagacacttcctcgttcctcgatctcgcattagacgattccatgggcttcgaccccctcggtgccttcgacaatgatgtcgacgacgatgccgaagaggtaaccgagggctatttgggcacgccccacaccgatgacccgacacccgttgtggacacccgtcccgcgcccgagcgcatcgccgacctgttcagcgccatggcgccgcgccgacgcacgctgctcggcatgatcaccttctgcgccgcgccgcagaccaccgacgccctggacgccgaggtggatcgtctgcaggcggacaacttctccgtgtactcccccgcctcgctcgcgaacttgctcgagcgcgccggagccctcacccgcgtgaccgccgacggcgagccgtaccccgagggcgacccggagccggtgctcgtggaagtcgatggcgtgtcctactacgaggccggcgaggcgccggaggtctgctggctggccacagaggacggcgcggcctacgccgaggccgacaagcccctcgaccgcctgaccgacctgctttccgaggacgcgaagtacgccacgatctacgagcgcattctcggccttaccgcccaggagagcggcgcctcgatgccgatcatcaacgaggccgtggacaacgacgagctgctgaagagcccccgtttgtacgcgccccacttcatcgacaagctggagaaatgcgacgccgtggaatggcgcgacaagagctggcgcattaccgaggtcggccgcgcgggacagcgcatcgtggctgacctcgtagcggcccaatccgcacccgaggcccaggccgacgagggcgccgagaccggcgagaccaccgcgaacgcccagtagcgcggcgccttccaccgcttcccttccggtaaccagagggcggtcgcatacgccccttcgagaacagaggagattcccatgaccgaaaccgacaccatagccactgccgccgcggcaacccccggcgccgaagaggcgaccgacctggccgcactcgccgagctcacggcccagcgctcggccgtctaccgcctgctcgctcgcctgtatcgcgtggaggtggacgaggagtttttggccgagctgaaggccatgcgcttccccgccgccacggggaacaccgccgtggacgccggctaccgcgccatcgccacctacctgcccggcgccgatgcccacgccatcaccgatctggccgtcgattacgtgcgcgccttcatcggccatggcgtcgatgcctactcggccgcctaccccttcgagtcggtgtacacgagccccaagcgcctcatgatgcaggaggcccgcgacgaggtgctggcggtctaccgcagcgagggcctggacaagctgcccagctggaaggagtccgaggatcacatcgcgctggaactggaattcatggccgtgctcggcgaccgcatcgtgacggcggccgaggcggccgacgaggcggaggtggagcgcctgctttccacccagcgcaacttcctggaggatcatttggcaagctgggcgccgctcatgaccgctgatctgcgccgcttcgcgcaatgcggcctctaccagggcctcgccagcctgaccgacggctttctgcaggtggaagaggagttcttcgacgagatttttgaaaccgagggcgaatagccgcgcagccgaaagacaacatccaacgaggtcgacaccgaccacctatgacgacgagggcgaatgagagaggaagagaagaccatggcagacaccgaaaacacggcggccccgaaaaaggaggggcgccccgtcatcagccgccgcgcgctgtgcgtggggctcggcggcacggcggcgcttctgggcctgggcgcggtgcgctacgccggcagcgcgccactcgtgcgacctcccggaggccaggacgaggaggcgctcgtctcggcgtgcattcgctgcgagaagtgctacgaggtatgtccgcgcggcgtcatcgccccggctcatctggaggacggcatcctgaacatgcgcacgcccgtcatgaacttcgacgcgaactggtgcgattggtgcaccgaggagaacggcggcgagcctctgtgcgtggcatcgtgccccaccgaggcgctcaaggtcggctcgacccccgagaccggcgtgctcggcgtggcggagctcaaccaggatctgtgcctggcctaccgcctcatcggctgtcggttctgctacgacgcctgcgagttcgaggccatggagcttgacgagaacaaccgaccctacgtgatcgccgacgcctgcaatggctgtggggcctgcgagagcgtctgcgtgtcgctgcagaacggctccatctccgccggcgccaccgagcgcgccatcatcgtccgtcccctcgagtcgtaaaggagggccgcacctgtgaacaccaaacgactccgcactatcatccccctcgccgtcatcgccgtcatcggcgtgggattcgccacccatgtgggcgtgggcacgctgtcggccatcggttggcaggacatctcgcttctgtgccccttgggcgcactcgcgactatgattgccacgaagaccctgctcccccgcgcggtcatctcaatcgtcatcgcgctcgccctcattctgctgctcgcccgcgccttctgcggctggatctgtcccgtgcccgtggtgtcgaagatccgcggcatcttctcgaagaagacgtcgaacaccgacatgaccggcaccggcgttttgcccgccgtcgagaatcccctggtgaaagctgcgaagggatcggaggccgccgacgcgcccgcgcccctttccgccgacgagcaggcggccctctccggttgcggccacagctgctcttcctgcgccgaaaagcgggcgacgttcgattcacgccacgtcatcctgggcggctctctgctctcggcggcggtcttcggcttccccgtgttctgcctcatctgtcccatcgggctcaccttcgccaccattgtgctcgtcatgcgcctgttcgccttcggcgacgtggcctggggcgtcatccttgtgccggcgctcttgctcgccgaggtggtgttcttccgcaaatggtgcagcaagttctgccccataagcgcgctcatgagcctcgtgggcaaggcgaaccgcaccttcgtgcccaccatcgacaacgcgaaatgccgcgagagcgcccagggcacttcctgcgaggcatgcgccgccgtgtgcccccagggcatcaacgtgcggcaccccgaggccggcatgagcttctcggagtgcaccaagtgccgcgcctgcgtggaggcctgccccaccaaggccatcaccatgccgtttctgccgaaaaaggccgccgtgccgtccacggtcgtcgtggaggacgacgaggccgtgcctgcggcctagcggttcgggaaagatcgccctgcgcggtctttccccgtcagcccgccgcctgcggccggctgacggggaaagacacgaggctttggcccgagcggaagagaggaagaccatgacgctggaacttgcccccaccccgaccgccacgcttattgaaggcggcgtcggctgcgggaagaccgccgcgctcgttgcgcgcgcatcagagcttttggaagatggcgtggcaccggaggacatgctgatgctggcagccacgcccgatgcggcccgcgtcctagccgcacgcct

SEQ ID NO: 10666 - DNA, 213 bp, Unknown
  gut microbiota DNA sequence
accttcagcggacgcgccgggcgcctcgtcacgccggtagagctcggcttcatcatggaggacatgaaaacaagcggcctgaagcagcggcgcctgcgcgagatgctcaagttcttctaccgcaactggacggaactggccggcggcgccgacgatgatgaccgttggctcattcccggtgaggaggccgatacccacgcgcttctgaaggac

SEQ ID NO: 10667 - DNA, 611 bp, Unknown
  gut microbiota DNA sequence
ggggggacgatctacaagttctcgatccacgtgcgcagcgtggtgtcgctcgggcctccgttgaggagcttgccgggcagcacggtggcgccgggcgtcagggaggccatgcgctcgggggccttcccaaggccactgcctccgctggtggcgaagggaacgatgatcttgccggcgaagtcggcggattcgaggaacgtgtcgataatgcggggttccacgtaccaccagatggggaagccgacgaagatggtgtcatagccatctagcgacggtgcgtcgaccttcattgccggacggctggcctcgtcgttcatttccttggtgctgcggctcgagcggtcggtccagtccagatcggcggcggtgtaggggttggcgggagcgatttcgaacaggtcggcggatgcggcgctggcaagcgtctctgccacgcgggccgtcgttcccgatgcggagaagtaggcaaccagcgaagtggtcataaggtatgtcctttcacgagacagtatttgtcttagcctataacttggagtcgacttcaagtcaaggaggatttggcgaaagcgctacggcggcagcgcacagccggtcgagacggggtcggcttc

SEQ ID NO: 10668 - DNA, 358 bp, Unknown
  gut microbiota DNA sequence
cgactgtttaccaaaaacacaggactctgcagaagccgcaaggcgacgtatagggtctgacgcctgcccggtgccggaaggtcacgcggaggagttagcgcatcgcgcgaagccccgaagccaagccccggtaaacggcggccgtaactataacggtcctaaggtagcgaaattccttgtcgggtaagttccgacctgcacgaaaggcgcaacgacttgggcgctgtctcgaccatggacccggtgaaattgcactggtcgtgaagatgcgacttacccgcggaaggacggaaagaccccgtgaaccttcactgcagcttggcattggccgctggtcccgcgtgtagaggataggcag

SEQ ID NO: 10669 - DNA, 462 bp, Unknown
  gut microbiota DNA sequence
actccttgcgaggctccacctgctcgcccataagctcgctcaccacgcgctcggcctccacggcatcgtcgatgttcacctgcaaaagtgtgcgggttgccggctccatggtggtttcccacagctgctcggggtccatctcgccgagacccttgtagcgctgaacatcgaacttgctggggtcgtcgtactcggccagggtggcggacagcgccttctcgtcgtagatgtagcgctcgaccttcgggctgcgggaattcttcttcttcaggccgaagatgggcggctgagcgatgtagatgtagccgagattgatgagctcgggcatgtagcggtagaagaacgtcagcaacaggcagcggatgtgcgcaccgtcgacgtcggcatcggtcatgatgatgatgcgatggtagcgggccttctcggcgtcgaagtcctcgccgatgttggtgccgatggccg

SEQ ID NO: 10670 - DNA, 922 bp, Unknown
  gut microbiota DNA sequence
gtattcaccctcgatggggaaaacgcctcaatttacggaagccaggggcagcagcgctccattgtgctctcgtataagctggctgaagctgccgtcatcgaggagatcatcgaccagaagccggtgctccttcttgatgatgtgatgagtgagctggacggccgacggcgcgatgcgctggtaaccgctatggaaggtggtagccagacctttatcaccacagcgaacatcgattactttaatgaggccatgttgaacaagagcaatgttatccacttgccgttggtgtgacccgccaaaaccgtaggatcgtcccattcgagtccctaaagtattaactctgtgcatttctcgcgtgatttaagccccattttccacacttcctggcaaagtcttcaccgaaccgcaacataggccctcaaacagcctcataacagccccgttccgcgactttcggtcgaaatacgatttcaccatgctataattgacactcattcggcgcccgcatctgggcgcgttcttttgttccgagagcgaaggagtgtcagtggcaaacaaaccagatcactacgacggttctgacattcaagttctagaaggacttgaagctgttcgcaaacgcccgggcatgtacatcggctccaccggcccccgcggtttgcaccacctggtctacgaggtggtcgacaacgctgtggacgaggccctggccgggtactgcgataccatcaaggtgaccatccatcccgacaattccatctcctgcgatgacaacggtcgcggtattcccgtggacaagcatcccaaggagaagattcccaccgtcgaggtcgtgctcaccattctgcatgccggcggcaaattcggtggcgagggatacaaagtttccggcggtctgcacggcgtcggcgtctccgttgtg

SEQ ID NO: 10671 - DNA, 665 bp, Unknown
  gut microbiota DNA sequence
gccgcatcggcggcagcagcgccctcggcaaccggcccttccttgatgaagcggccgatgacccgcgcccacccgatgagcagcaccagatacacgagcacgaacaggcccagcgtcagccacagttcaggcgccgacaccgacatggagatgccgtcggccgtcagcagcgacacgccgtcggggccggtgaccgacgggtacaccacccagggctggcgccccacctcggcggtgatccaacccgtctgaatggcgatgaacggccagatgggcgaaagcaccgccgcccactgcagccagcgcatcttcgcgatgcggccgcccttgaaggtgaacacgagcacgagaatgctcgtcagcatgatgagcccgtacatggccaccatgaggtggtagctctggaacacgagccccacgggcatgtcctccaccaccatgtcgccgtactcctcggtttgggcgagctcgtttaagcccggatactccgtctcgaagttgcccgtggccagaaagctcgtgccgccgggaatggcgaagggagcgatgacctcctggttgtcctcatccacaatgcccacggcgtacagcgggggcacctcggaatcgtacatgccctccatcatggcgagcttggtgggctgctcgttccacaccaccacggc

SEQ ID NO: 10672 - DNA, 3578 bp, Unknown
  gut microbiota DNA sequence
gcatataccagccggccacggccatggccacgaacgcgcccatgatgagcagcgcgtccacggtgtgggtatagcgggcgaagatggacgggttgaaggccgccgagaagaagtcggtgatgacggcctcggtgccgtcggcgttaagctccgcgccggccggcgtctgcatccaggagttcgcgatgaggatccacagcgccgacaggcacgacccggcccacacgagccacgaggacaccatgtagaacttcgggctcaccctctcgcgcccgaacaggagcacgcccagaaagaccgactccaggaaaaaggcgaacagcgcctcggcggccaagggagctccgaagatatcgcccacgaaccgcgagtagttcgcccaattggtgccgaaggagaactccatggtgatgcccgtggccactccgatggcgaaagtcgcggtgaacaccttcacccagaatttcgtcgccgcagcgtcctcgggtttgcgcgagcggtaatagcgggtctcgttgatggccagaatgagcccgagtccgatggacagcggcacgaacaggaagtggtacgccaccgtcagcgcgaattgaatgcgcgagagcaccgccacatcagcgaaagcctccattgcacaccccctttctctgcgcgcccgcggccgagatgcggccgcccctgggcgcaatcgaatacgttcccattcctaagcggaacggtcaggttccatagtactccttctgtacggaaggcagcgtgtcaacctggtgtcacttcctgctcgtttcgccgcctcgcccgcctcacccctaggcgaaagacaactcgccttccaacagctgccggtagagggcggccagcgccggcgagggatcgagtcccagcgttcgcgacaagcggtcgcggcaggcgaagaacgtctgtacggcggccgagcgctgaccggtggccatctgcgcgcgcatgagagccgccgccgcgtcctcgcgccccgcatcgcgctgaaaggcctcccgagcgagccacagcgccccctggagctccccccggacaagaagacgccgcgaagccgccaccaggccgtccacgaactccgcgtcgaggcgatcgcggaagacgacgatggcctcgcacttgcgctcggtgggcagaagcacgctgccgaaggagccttggatcgtggctatggccctctcccaggccatatcgtcggcagggccgaacagcaggcagcgaatcagctcctcgaactcgtctaggtcgctctcgaacaaatcgggatcgagccggcagccatagcggctgcggatgaggtaggggcacgacccctgctgggaaaggagggatcgcagatctccccacacgcgatagaagctcttcgcccccgtgcgcttgtcggcggcgggccacaacatggagacgatctggtcgcgtcccagctcgcgcccgcggtgcagggcgagcagcgccagcagaagacgggtcttcgggcggccctcgaactgataggtgatgtcgcgcctccccaaagcgacttccatggtgccgaacaacttcaggcgcagcggctccacggacacctcgggcgcgacggccatcgccgtccggggcgcgctgggcaccggcaaactgcgcccgcgctcggggtcctcgacgacaggggctccggaagacttctcgcggcgcgagcgggccgcccccttctcgacatgggccgcaaataatgcggcggccacaggagcggaaagccgcggcaggccgaggccttcgagcacctcccccgcccgctccagtgcggcggccgcccggtaggctccgaatccgaggctccagccgcgctccaccagcgcgtccagggcgcgatggctgcaagcgacgagccgcaccagctcgggtcggccggcaatggccgtatcggcgccggcgcccagcgccccggtcgcctccaggccctccagcgccgccgcggcgccgagcagccggcgctccacgtcgatgcgcgagccgcttccccagtccagcgcttcgccgacccgggacgcccagaccgccaggacgtcgtcgccgcggcccagcgccagtactccatgcgccaccacgaccagctcggccagaccgtcctcccactcgactcccccggcgccatccagttcagccaggcaggaggcgaccgcctcctccatagcccggcgcgtggccgcgttgcccacctcccaggccgccaatgccgcagagaggaccgttcgcggcgtgctcctctccgagacgaggctgcgctgggcgaactgaacggcccgcgcgcgatcgccccgctgcgcccaggcccaggcgatcatggcgttgatatccgcccgggctgccatttgggtgcgcgtcgccgagtcgtagagctcgcacacctcgacggccgcgccgccccacagggccgcccagccgttcgccgccagccaccggccgtgggcccgccgacgcgccagcaacgtcatcgcgctcacggcgcgcccgcattccccgcgctccatcaagcgctccgccaaaacctccatcgcctcctccttgccggcgaacccgcaggtctcggcgagcgcctgaagacgcgcccgcccgtggcccctcacctcctcgaggggcacggaaagcgcggcgaagctctcttcgccggcggaaatgcccgcaagggggcaacgctcggccaaagcgtcccatgccttctcggcccggcgcgccccgagcagcgcgcgcacatcgtctatcgtgccccttccgagcaccgtcatggcccacaacgccagttcctcttccggggtgcatcccgcccgactcgcaccgagtattagctggatcggcgtcgcggatccccatcgcagggcggcaacgcgctcggccaaccccaaggggcgccggtccgtcaccccttcgggctcctcctccaaatcctcccgcactaccagcatctccgcagccccgatgacgacgcgtctgccgaacagctccatcggcgcatcggcccgcgttgtcgtggcgatcacctcgcagttcgcatccgccaagcgctccacgacctccgcaaaggcctcggcgcgatcatcggtaaggagcggaagatcggtcaccaccatcagcgcggcgtgctcgtcggcttcaagcaccgcctcggccagcacccccgcatccaaatcccgcaaaaagcagggcgacgagccgcgcagccagaacacgtgctcgaactggaacatcacagatgcgtactcaaatgcgagcgtcgccttgccgaaccccggcggcgcgacgacaaggcgcagggcgccgcgatcctcgaggagccgcgacagaagacgcggtcggcttctcaggcggtcgggaaccactccgtgggggcgccttccctcgcaagcgctctgctggatgaaacgggtcatgggcatctccttcttctgtcggccctcgctaacaacagggcgcaccttacgaggccccgaccgtccgggcaaccagcaaggagcataaggccgccgatccccttccgtcgtcgcccgggcaagccgcccgcaagatacaggcagccctgtggaagacac

SEQ ID NO: 10673 - DNA, 435 bp, Unknown
  gut microbiota DNA sequence
ggagcgatcccgtgggggggggaggggcgaccttgatcgcccctccttgcacggccttttccggcagggagagccttgtcccggcacctgcggggacaaggctcggattttggcagatgcgggtaccagaccgcctgttttgccaggcgcagggaaccaaaccgcccgtcttggctgaagtgcgacaggccatctaccaggtattataggaagttttcccagttcagcacttcgggcgaaactgaaggtttggtacccccgtggactgccaaaatccgaggtttggtatcgtctaagacaagatcgcgtgaaaggctatgcttcagtttccggtatgcgtagggatacgcgtcgggctcgctcttcgacgagatcgccaaagacgctgcgagcaaactcaaattcgttttcgtggcgacgcaagaagttgcgcat

SEQ ID NO: 10674 - DNA, 595 bp, Unknown
  gut microbiota DNA sequence
ggtgatgatgccggaggtcgttggcgtggcgactcggtcggcctcgatcaggtgcaggcgtagcgagtagggcgtgagcggcgtcggctcgtactgcttcacgacggcgaacacgtcgccgctgaccagccacgaggagagtgcgagctgctgcatggctgcgaagttgttgacgccggtggcgtcgcacgcccttttgttctcagaccagagagcgaactcacgctcagcctgagcctgccatgcgtctgcggcctcctgcgtcatgccgagcgcctcgcggtcgatccgactcttgagctggaggccgatgccgacgacgttggtgcggttggtgcggatggcagaggtggcgatcggggccgccatgtaaagcatccgggcacgctgccgcagggtgtagttgttggcgtcgatgtcctccttcgggctgccgctcatagctctgaagcccttggtcgccttcttgtgccagctcgcgccggcgtcgccgtagcccttattcacagggcgcggctgctgccgcctgttctgtgggcggcttctgctttttcttttgctgatggtgctcacctccttcatggtgaagatggcc

SEQ ID NO: 10675 - DNA, 1296 bp, Unknown
  gut microbiota DNA sequence
tgcatggacggtttctgcaccctggtctgccccgacggcatcgacgcccgaggggttttctccgccttgcgggtgcttttgcacgaggcacgccttacgggcgacgacggcttcacgatgacccgcgtcgatcaggaatggcacatcttctcggcctaccgggccgtgcacggcatcttctacaacgatttgccctcgttggagaacgcgcgcgcgtggggggccgacacgctgttcttccctggctgctcgcttgtcagctatgcgcccgagctcacgcgcgaggtcttcgcgtggctgcaagagcagggggcatccgtggccctgtcggccgattgctgcggaagccccctgcgctcggggggtttcgccgatcgctgtgaggctcacaagacggcgctggttagtcgcgctcgcgaggcgggaatcaaacgcgtggtgttcgtgtgcccgggctgccgcgacgagtgggagacgacggcgggcgccgaggcgttcgagctcgttgcgctgcccgagcttttggccgccgccggcgcgcgcccgcgtcccgagaaggtggcggctctggccggctgcgacgatccggtgctcgcgatgttcgactcctgccacgatagggacgggcgcttcggagggcctttgcgccgcatcttcgccgattgccaaagcgtggagctcggccaccatgggaagagcgctctgtgctgcggggccgccggcgccgtatcgctggtcgaccagcccctgtgcgatgcccgcgcccatcgcgtgctcgacgaggagccccgtgaggccggcgccgatctcgtggtggccaactgccccacgtgcgcctacacctttgctgccacgcggcgcggcgacgcggcgggagccgtcgcagggccggccttctgccagtacctggagctgctcttcgaggccggcttcgactggtcgggcgtgtttggccggctggagtccatgtggtccggcgagtacggcccctggcttgcccaggagctgctctgagggctcggtcgttccttgcgcacggttttagccgcaaggacttataattccccttgactcttcgacccattgtcataaaatggtcgtatctactatttgactaagtctaatagtagatacgaccatctattgaaaacgggaggaattatggttgagagcgaatatggcccatggtcgtttcgtctcgcgacgtctcggatgagccgtcgcgggtttgtggccgctgcaggcatgacggcggcggcgatgatgctcggcggaacgcttgcggggtgctccgga

SEQ ID NO: 10676 - DNA, 705 bp, Unknown
  gut microbiota DNA sequence
atccccccgtgccgcagccaacgcattaagcgtcccgcctggggagtacggccgcaaggctaaaactcaaaggaattgacgggggcccgcacaagcagcggagcatgtggcttaattcgaagcaacgcgaagaaccttaccagggcttgacatgcgagtgaagccgcggagacgcggtggccgagaggagctcgcgcaggtggtgcatggctgtcgtcagctcgtgtcgtgagatgttgggttaagtcccgcaacgagcgcaacccccgtcccgtgttgccagcattgagttggggactcgcgggagactgccggcgtcaagccggaggaaggtggggacgacgtcaagtcatcatgccccttatgccctgggctgcacacgtgctacaatggccggtacagagggttgccaccccgcgagggggagcggatcccggaaagccggtcccagttcggatcgcaggctgcaacccgcctgcgtgaagtcggagttgctagtaatcgcggatcagcatgccgcggtgaatacgttcccgggccttgtacacaccgcccgtcacaccacccgagtcgtctgcacccgaagccgccggccgaacccttctggggcggaggcgtcgaaggtgtggagggtaaggggggtgaagtcgtaacaaggtagccgtaccggaaggtgcggctggatcacctcctttctagggagac

SEQ ID NO: 10677 - DNA, 920 bp, Unknown
  gut microbiota DNA sequence
tgcaatttaaccatagcggaagcgaaaggcaattcggtactgtccagactcttgcgcaaattccagcaggcggctgccggccgtcggcatggtcactcgtccagcagcgacacgtccagataccgcctcgatccccactcgctgtcggccacgtacttgagcctggccgtcaccagcatgagcgcgctattgccgtcggggaacgtgcccaccacccgcgtgcggcggcggatctcgcggttcagccgctctatggcgttgttggtgcggatgcgccgccagtgccgcatggggaagcgcgtgtaggtcagcgtctccgcgacgccgtcgcggacgcacttggcggccgccgccagcctcatgccgtccaatttggcggcgacgtcgccggccttctccgagctggcctccagcgactcttgggcatgaatggccttgagcatcgcggccacctcggcgcgcttggacttggggaccttcgagagcacgttgcggtagaagtgcaccgtgcagcgctggtaggcggctcccgggaacacctcggcgatggcgccggtcatggcggcggccttgtcgccggtgaacatgcgcacgcccgtcaggccgcggcccttgagccaggacaggaactcccgccagcactcggccgactcggtgaagccctcagccgccccgatcacctctcggtagccgtcgtcgttgacgccgatggccaccatcacggccacgttctcgaaggagccgccccagctcctcttgaggtagatgccgtcgacgaagacgtaggggtactcgcgggccaacggcctgctcctccattcctcgacggcctcgaacgctttctcgttcaagttcgacacggtggccgccgacacgctcgcgccccacaggatctcggagacgtcctcgatgcgcctcgt

SEQ ID NO: 10678 - DNA, 177 bp, Unknown
  gut microbiota DNA sequence
ggttcgccaccgccatcatcgagcggtacaagcgccgggaggcctccgtcgaggaggccatgatcgagatgtacctggccggggtctccacgaggcgcatcgaggacgtctccgagatcctgtggggcgcgagcgtgtcggcggccaccgtgtcgaacttgaacgagaaagcgttcg

SEQ ID NO: 10679 - DNA, 177 bp, Unknown
  gut microbiota DNA sequence
ggcatgcgcgcgtagcgcaccgagtagaacgcgttgcaggccgcgacgcccagagcgcaggcgagccacgactttcccgcgcccgaggggccagtgatcagcacgttcctgtgcgctttgacccactcgcagttcgccagctcggcgattttcaccttgtcgagtttgcggtcggcg

SEQ ID NO: 10680 - DNA, 429 bp, Unknown
  gut microbiota DNA sequence
ctaagaacttatctccctagaaaggaggtgatccagccgcaccttccggtacggctaccttgttacgacttcacccccctcaccctccacaccttcggcgcctcccccctctcggttgggccggcgacttcgggtgcagacgactcgggtggtgtgacgggcggtgtgtacaaggcccgggaacgcattcaccgcggcatgctgatccgcgattactagcaactccgacttcatgggggcgggttgcagcccccaatccgaactggggccggctttccgggatccgctccccctcgcggggtggcatccctctgtaccggccattgtagcacgtgtgcagcccagggcataaggggcatgatgacttgacgtcgtccccgccctcctccgccttgacggcggcggtcccgcgtgggttcccggcatcac

SEQ ID NO: 10681 - DNA, 1018 bp, Unknown
  gut microbiota DNA sequence
cgagatcgaagtgggtgttggagaagacgttcagattcaggctcttcatcaggtgcttgagcgccgcctgggccttcacggaattgcccgcgtcatccagcggcggcgcgaaggcgcacacgccgaacaggccgggcatgacgccgatgacggcaccgcccacgccggttttcgcgggcagccccgtggcgtacagccagtcgcccgagtgctcgtagaaaccgacggcgctcataagcgcgactaccttggaagtgagcgctgcgccgaacacgcgcttcttcgtgagggggttcacgccgtcgtcggcgatggtggccgccgagatggccagctgctcggccgtcacgcccagtgagcactggcgcgtgtacaggtcgagcgacatctccggatcatcgtacatgcggccgtactcttgcagcagccacgtgatggagcggttgtcgaagttcgtggcggattcggaatggtacagctcgtcgatgagttggggcttgcttcccaaaagagcggtcatgttgtcgaagatggccttccatttcccatcggcatcgccgtggggcttgacgagcgaacaggccgcgatggcgccggcgttcacgagcggcgtggagggtcggtcgttttccagcaggatggcgaagatggagttgaacggcagccccgtggcatcggcgccgatgtcgtcgaggatcgcctgcgcgccgtgctgttccagtgccagaatagccgtgtgcactttcgagaccgattcaatgccgaagcggtagtcggtgtcgcccacagagatgagccggccgtccggcaggcacagactgatgccgaacaggtcggaattcacgttggcgagatagggaatgtagtgggcattttggccgcccttgatgtccttgcaggcttcgtaggcgtcgtgcacggcggtgctgatctgatcgaaggtgagacgggtgatcatggcgcgctcctcgcttcgtggtgagagtttttctcatggtacgccgccgcctacggggcc

SEQ ID NO: 10682 - DNA, 101496 bp, Unknown
  gut microbiota DNA sequence
tgtgataatatggtctgaaaaattttccaaatagaaagaatgttgagatagatggtttcggagaagcaggaaagtcttctttcggtagatgacgcggcagattcaatcggcgttaccaagcagacggtgacgcggctcatccgagaggaaaaactgccagcccaaaaagtcggcaacaaatgggtccttcgcgaagaagcgctgcgggactacatgcgggacaacaatctcgtcccagagcctaaggatcatgggtgcttgatgagcgaaaagccgggaatagtggcgctcagcttcttttcgggggcgctcggccttgacctgggcatggaggctgcgggcattgagccgcttctctattgcgaaaacgatcgcaaatgcaggatgaccattcaggcaatgcgtccgcatggcgccctgatcggcgacatcaaccagtactcggcaacggagatccttcagatggccggtttggaatcgaatgcgaaggtcgatgtcatgttcggcggccctccttgtcaggcttttagcacggctggcgcgcgacgtgcgtttgacgacgcgcggggcaatgtgttcctgaagtaccttgaactggcttcagaaataaaacctacgtacctggtaatagaaaatgtacgcgggcttctttcggcaccctatgctgttgagcgacacgggcagccggtcaaagggggcgcgctgcatgtgattcttcgcaaattggaggaggcggggtattccgtgagcttcaatttgtataacgctgcgaattttggtgcgcctcagattcgggaacgcgttgtgcttatcggaaagcggggagaaagcaaagccccttatttgacgcccactcacgagtgcgatgggcagcacggacttccgccgtggaaaacgttcggcgaggccgtgggggatttgaaggcgcgtcccatgcagcacactgatttccctgagaagcgcctcaagtactttagaatgctcaaagagggggagtattggaaagatctgcccgtggctgtgcagcgcgatgctatggggaaggcctttgagctgtcgggtggcaagacgggattctatcggcgcatacgattcgatcgtccgtctccgacgctggtcacctctccgacgatgccggcgacggatctgtgccatcctacggaagatcgcccgctttcggtggaggagtacaagcgcgttcagggctttcccgacgattggcgtatctgcgggaatgttgcggatatgtacaagcaaatcggcaatgcggtgccggtagcgcttggcgaggccattgggcgggcgattatcggggatatgaacggggacgaacctgacgagcgattcgccgattttcgccattcccgctatcgattgaccaacgacgaaacgtggcaggcgcctatcgcacgatgatttccgacatggctgcgcctgttctctggagggatatgacgcggctctcgaactagcaaagccgctgcttgagcagttggacgtcgttcatagtgttgccaagggagttctcctcaagggcctggcgcatctcttcctgcagccggtcgatgcattcttgacgcgcttggcggacgtcgccgatctcgatgcgggaaacgtcgtcgataagaccctcgacggagtcgaaaccggtaagccattgccaaaaagccgcacccgttaggtaccggtactgaaatccggcgatgtcccggttggcctgatcgcgctcgtcgggctggtaggtgcgtatctcatcgatggccttgttgtggcgcagcacgcagaacgctggcagcacttgttggttgctggcgcgcttgaatcgccgctgcgtctcgcacttatctttcaattcgcggagctcctgggggaacgacgccgaattggtggtgttgacctgcgatttgagctcgcatacgtaaagggctccgtcgcgtaccgtcatcatgtccccggtatcgagggtgtcggaggagattgccgcaatcagtgcctgccacaggttgcccatgaccgtttcctcgctggagctttcgcaggcgcggaacgcctcaagcacgaactcttcagcggtggcaacgccgcgggcggcgaacatgatgacatctttgccaagcagtttcttgaggttgatcttagagctgtcgcgatagtaggccgccctcttggcggagaactcccgcagcatgtcgtaggcaatggcgcgctgccgggctacgtcgtcagtgtagacagcggcgtcctcgacgcgctgctctgaagagagggtgatggatgggtgcgaaggggtgtccatagggagatgcctttctcggcgtttgattgcgaatgccattatattgcatgcatggggccatgaaacgaacttgtttgcgagtctggttttgctgaagaccgcgcgtttggattgctctacaatgtcagctaaatacctctttccagaaaggcttccatgaacgacattcaaggcgtgctgttcgatgcggatggcacgctgatcgacacctacgacatcattctcacttcgatgcgctatgccgtgaacgacgtgctgggctgctcgcttgatgacgccgagctaatggcgggggttggcacgccgctctacgatcagatgctgcatttcacgggcggcgacgcggctcgtgctaccgagatcacgcaaatctatcgcgatcacaacgacggcgtccacgatgcgcgcattcgcgccttcggcgacacgaaagcggcgctcgagcgatttcaggcggcgggtatcccgatgggcgtggtcacctcgaagcgccatgccatggcccagcgcgggctcgaaatgagcggcatcgcagaccacttccaattcctcatcggccatgacgattggcccgagcataagccggctcccggccccattctgcgaggctgcgagcttttgggcgtggcgccggaatgcagtctttacgtgggcgacagccccttcgacatccaggcgggcaacgctgctggctgcgctaccgccgccgccctctggggcatgttcccgcgcgaggccctggcggccgagcgtcccacgttcatgtgcgattcgctaacagagctcgcggatcggctgggcatctaggccagcttacagctgcacaaccatatcgcactctcggcaagttgcgcgaacgctctctcgtactatgatttcttggcacaaagcgctacgtgctttcggcgcgttggcgcgaaagcatctgcgacgaaacatgctgcggcgaaacacgctgcggcggcctcggacgtagtcgccggcggtggaggtgcgtcgactgccggggcgccacgtgcgaaggcgcctggctttagccggccgcaatatagaatggagtagctgatatggctgttcaaaacaagcagaccgcaaaacaccgccaggcgatgatcgtggtgctgttcgcgtgcaacctgcttgcctctttgatgcagtcgctcatgaacgtcgcgctcgactatgtttcggcagagtatcacgtgagcctgtccgaggcgaacctgctggtgctcggctattccatcgtggcgggtattgtcattgtgctcgcagccctctcgctccaccgcttcggtttgaggaaggtcatgctcttcgggctgatcgtgtcgttcgtcggctcgctgctcggcgttctggcctgggattttccctctttggtggcggcgcgactcattcaggccgttgccaccggcctttatttccccgtggtgaacgaagcgctgctcaatctttcacctaaaaatggggctggtcgtctgcttgccgtcaatagcggcattatcggaatagggcttgcggtggctcccatcgtttcaggtctcgtcatcacctattgggggttgcgtgtgctgttcgccattcccgcggtgacggcattcgctctctttttcagtgcgcgtcgcacgatcgtcgatattatgccgcgtcagaagttgcccgtcgacgggctgagcgtcgtgctcattgccgtggggctttccgccttcatgatcggcttgaacgaggttacgcgcaacccgctgccgatggtggcgctcatgatcgcgggaattgccgtgtgtgcgtggttcatccaccgtcaaggacgcctcgcccatccgcttttggacatgcgtccgcttcgcaacaagacctatgctctgggcgagaccctcatcgttctcagctatatgagctcaatttacctcagcctgctcattccgctttatttggaaggggtggcgggtttcacgccgttcatcgctggttgcttgctggctccggcgacgctgtgctatgcgggtctgtgctttgtcagcggccggatgctcgggaaggcgggggtgtggccgcttgtacccgtcggattcggcgtgtgccttgtcgggttcgtggcgcttgcggtgttcacgcggctcgatcttgcgctggccatcgtgggctgcatggcgcttgcgtgcgcgggaatcggcaccgagtatcctgcgattaagagcgtcgatctggaagtgctcgaccccgagctgtccgcgagcggctcgtcgatccattccacgttggtgcagatcgcaggatctatttcgtcggcgctcttcgtcggtctcatgtcggggcaggttcaccgcctgatggccgatggcatggcgaaagcgcaggcctacagcgcaggtttctcgaccaccgtgtacctggcggtcgcctttgtagtggtagcggccatcttatcggtggtttacgcgcgccatgtggtcaagctgacccgtgggaagtagggcacaggcgcatatgcaggatggggaaggggtcgcccatgccgtcggtttccgagcggtcgaacacctcgaagccgtagtgctcgtagaagccgacggcttgctcgttctgctcgtttacatccacgagggtggcgccgtgctcgcttacggcatggtcgagcaggagtgagcccagcccgcagccgcgaagggacgggtggatgaacagcatctcgatcatagtgccatcgacaccgataaagcctacgacctggccattctcgtcccggcaaaccgccaggtgcgcgacggatgcaatcgcatctggcacataggccgcaatgcgctcgatatcatccggcgtgagaaacgtgtgcgttgcctcaaccgaagctcgccagcaggcgaccagctcggctagcgggcccgtgtcgtcgccaagctcaatgtcttcgatgcagaatgccattgtgctccttccgtgcacgcatgaaactttgaggactatagcataccgtgctgcagcggtcggggtgctgctcgtgcgctgcttctaccagtacttccggtgcgagacgagagcacccatgaacgagacgggctcttcgcagcgataccttgttgctctttgacaaaacagtaaacggcggtaaaagaagttcaaaacagtaaagcgctgggagacgctacggaaccgcagcgaccgcggcttaggcggggcagaagcgtgagccggacgtgccgaagttgcacttgaacggagaggaaggggcgtggttcaatgggtactctgatcgggtaaggaggtgcgaagtgagccagcttgaagatttgaatcgcgccatggcctacatcgaggaacatttggatggcacggtcgatatggacgtgcttgcgcgcattgcggtgtgctcgaagtatcagctgcagcggatgttcccctatctgacgggcgtgacgctgcccgaatacatccgtcgccgcgctatgactcgggcagcccaggatctgcgggcgacggacgcgaaggtggtggacgtggccctgcgctacggctacgactcgccgacggcgttcgctcgggcgttccggcgcgtgcacggtgcctcgcccaacgatgctcggcgcccgcagactaagctgacgctctacccgcgcttcgtgttcaccttgtccgtgaaaggagaagagccaatggattaccgcatcattgaacagggcgccttccgcgtcgtcggcattccgtccgacaacgggacgtgggaggtggaagatgctggggagaaggccgtcgattactgggagaagttgagaccccgcgtccacgagattctcgatctcgtggacggcagcgagccggctgggctgctcggtgttcagttctgccgcgacggcgcgttcgactgctacatggcctgcgtcgcgacgaaccgtccgtgtcccgagggcatggaggagcgcaccgtggaagcggccacctacgcggtgttcgaatgcgtgggacccatgcccgaggcgatgaccaacctgtggcaccgcatcctgaccgagtggctgccctcgtccggctatcgctgggagagcaagaccgacgtggagcgctacttcacgccgcgcatgaccgcccccgatagccgcagcgaggtctggctcccggtggtgaaagcctagcggaagcgggttctttccgcccattccggcagcatctatggggcgtcttcggccgtcccctagatgctcgggagctagcgccgttggccggcgctagccgcgcgctacttctgccagtgcttcaggtgcgggacgaggacgcccatgaaggagacggcctcttcctgcgacatgcccgtggcctccatgaggaagggggccgtcttctcgatgagttcgtcttcgctttggtaggcgaattggccgccgtcatagcaccacttgcagtaggccgtgttctccgtaccgtcggtctcggtgccgtggggcatgttggggacagtgaagggggtgccgcagcattggcacagctggctcacgtcgatgtcgaagagctggatgaccggcacgtccagcacggtcgcaatgagctttcgcatgtccacggacggctcggtctcgccgttttcccatcgcgacaccgcctgacgggtgacgtaaagcttctcggccagatcttgctgggtcatcccgcgctgctctcgcgccgcgacgagggtttccttgaacgccatgagtgacttctttctctcggttcctgaagtgccttcattctggccgtcttgatgccctccttcaagcaacaccttgttgcatcggagttctccctaggtgtcgatgatgctgcttttgttctcggctcactctatcctgatgctgagctcggtgtaggactgggcggcgatatcgcccgtgtagagggagagctcctgctcgtaaaggtcgcctgcgggcacgaagccgcggcgttggacctcgtccgccagctcaaggtaagcggtgaagaggctcccttccgaaaccagaagctcgtcgatgctggcgcagcgcaggcgctggaaatagcgccctgcgggcttggtgtgccgcgtgcgcttgtggccagagggcgccgactcaatgcagagatggaagtcctgatcgggatggccgtcgagaagcgcttgcaggccgacgcggtagcaaccctgcatttggcctaccatgcctcgttctatcaaggagtgtccggtatccaccagctcgttcaccaggcgctctccttgtacggggttctcctcggagaagagatcggagatattgatttcgaagaagcgcacttcgggcctttcgacgatacgccagccattcttcaccgttagccattcgctgagggttcggctgcggtcgagggtcttctgcagaaagcgctgttgggcgcgcaacgctcggcgctctgcctcaaggcgattgatgtgctccgcgatcatggcctcaagctcggacgcctgcgggttttccagatagcggtggatatccgccaacgagctgcccgcgcgttgcagtgctgccaccagcatgaagtctcccagctgcagcggcgagtagtaggcgtagccgctatcggagacgaatgccggctcgatcagcccgatggcgcggtaatgccgcagcgtctccttcgtggtgcggcacagcgcggcgaactgtccgctgcgaagatagcgagattcagggatattgaagcgcgtttcctggctgcgcatgacggctccttgactgcggggttaccccacagtttagcatggccgtgatcggaagaagtcgaacgaaacccgaagagcaaggagacgccatgctgaactggagcgaggagaagaatgcgaatggacgtcctctgcctcttcactggaagagagcgattgcggttatatggactggccaagcgttttcggtgcttgccacctgcgcggccaccttcgccgttatctggcatgtgacgacggcggaggaatcggcacttgccctgtctgtggtgggcatcgccgcgctgctgcccaccgcactgctttcgcccttcggaggtgtggctgccgaccgcttcaacaagcggtggctcatcattgccgccgacggtatggcgggggcgttctccctggtgatggcgttgctgtccgtggcgggaacgctgtcgctggaacttcttctggggctgctcgtggtgcggtctgccgcccaggccttccacgggccggcgctcatggcgctcatgcccgagcttgtgcccgagcgcgacatggtgcgcatcaacacgctgaaccagacgctctcgagcctgtcggccattggcggtccggcgctcggcatgctgctgtataccctgtggggcttcgccgccgtgctcgtcatggacgcggcgtgcgcggcgttggcgtgcctctgcctggcggtggcgcggttgccttatgcgcgcagcggcgaaaaagagaagaggggactggcggtcgatttgcgcgaggggcttggcgccattgcgggtgattcgggcatttcagtgctgttgctcatgaccatggcggcgatgcttctgttcatgccgcttggcacgctgagcccgcttttgacctatgattggtttggcggcgacgggtttgcggcgtcggtggtggaagccgccggtggtatcgggctgcttgcgggatcggttctcgtgatggcgtggggaggcgggaagcggctcgtgcccgtgctggtggtcgcgggcatggtcatcggcgtgtgctgcatcgtgggcggcctgctgccgcgcggcgcgttccccgcgttcgtcatcgccatggggctggcctttgcgggggcagccgtgttcaacgcgcccatcatccccctgatgcagacgcgcgtggatccggcgaagttcggccgcgtcatggggctctttggcgcactgacgacgctggcctatcccatcgggctcttcatcgcgggacccgcagccgaagcgctaggcctcaatcggtggttcgtggttataggcatggcgctgtgcatactcatgttggcgttctccctctgccgtcctttgcgcgccctcgatggcgctgcaagcgatgagcggttccgctaagcccaacttggcctttggcgaccgtcccgtttcggagcgccttgctttaggagagtgcgtcggcgccgtagaggcggatcgcgttgccgtcggctcggacgctttcccacatgctttcccgatacgcttcctccgaaatgccccatttcgcagagaaccacgcagccgcctcttccgccatctcaggatgctcccccaaccgccaaacgcgccagggcgctcctgcgtctatgctcgcgtttggggaagaaccaatgccggcatccatggttggcccttcgacaaaatcggtttgtccccgtgagcctaaccgctctagctaattccgccaaacggagctgatcgcaaggcggtcaaccgccggttgactcggagctcgcaaagtcgatggatgtttgcttgagggcggtggctcgtgcggcaataataggaggtgtcgaaaggagcttccatgaaccagattcccctagccgaacgctgctgtttctgcatagagaaggcttagtgcactttgctcaacccattgaaagcaagagtgcggtaacggcgatctgcgctgctgtaagaacgattgcacacgccacgtatagcttgagtgcgccctggcggctgacgccgtggaccaagccgtggtcgtagaggaagtcgttggcgcagtagcttagggcgaagatgatgttgcagaaggcgaggccgccggcaatgagccagagatcggaaggcgaacccatgtcgacgccgccatcgaagccaatatgcatgggaatctcggtcgtgccgggcggcagcatcgccagcgcaacggccgtcacgacaaagggagctgcgacggccagcatccagaagattgccatcggaagagaaggcgccttcatcgcgctcccatccacgtcagcaccgtgaacaaggctcccaggaagatgagcaacgcagtgtacttgagctgcgctgctcgccattcctttggggaaggcgggtttttctcgtcgtaacccgtatcgtggaatagcttccctctgggaactggcttggaaagccacacagccacgatcgccacaagaaaagccaccgctacaagcagaggggcgaacgacgcaatcatgagatcctccgtcttttgtggtgctgcttcgaatgtatacccgaatagggtacaatatgggtactagtagaaggaggtgcccgatggcaacggctgcagtggcaaggcgtgcggagatcaagacgcgcacgtctgatgaggtgaagcgggatgcgactgaggtatacgctcgatggggcctcagcctcaatgacgcgattaatacgttcctcatcaagtcgatcgaggttggcggcctgccgttcgacttgcgcccggaagcgccgtcgtatgatgccatcgcctcggtggcatacagagctcctttgaatgcggagggcgttgctgtgctgccggcggaatgggatgacggcgatgagtgacaaagagcctcaaccgggagagggctagcgcccgcatcaccgattgccgaacgagcccctattcgcacgacgctttgcggccgagttcgcttagtgcctccaaggtgggttgcacgttctcggcgtgccagttcttgtagccgccggcatactgcgtggcgtatatgccggatatacgcaggtcgctcagccccttttgctgggtggtgaggcgtacgccgccggtgcatgtctcgatgtcgatgaccacgttgagcaagtcgtcgataagcttcacagattcaatgtccgcatacgggacaacgagcgagacatcccgctccagcgttccccagaacgactcgaacggaagcaggacgagctcgttctcgcacatctggagaactgccacatcccatgtttcgaaaaagcggacgatcttctcgctcaggtctcccgccgcgcctttgacgatgatgcaccggtcctccagaggcgtgaagccggcattcgctacatattcccaaaccttctcttcgcgggccataacagtttcgctcctttcgctcggatttgcagcgacgggcattattctgccgattcggcttgacgctcgcaaatgggctgcgttggcaaaccacctgttcagaagccctgtgaaagacttttgacagttgcgtctgcctcattttgcaaagcttgtggggtatcatttcggtgtgcacaagcgacgcgacgcgccaacgggcaatcgaaaggaagggatcgacggaactggctcggcagctgaaggccaagcgagaggagcgcgggctttcccaggacgaggtctcgaaggcgatcttcgtgtcgcgccagaccatctcgaactgggagaacgacaagacctacccggacgtgcagagcctgcttttgctcagccagctgttcgatgtctccatcgacgagcttgtgaggggagacgtggtcgccatacagcgggctattgcggaggactcgcgcaagatgcggctgctgtcaatcgggatgctggccttctcgggactggccttcctcttcctgctcggcttctcgcttgcgtggcaagagccgtcggggttcgcgcgcatgagcaaggggaacctcgcaggggcggccacgtttatcgtgctctatgccatcgggttcgccatggccatcgcggtggatcgcctgaagaagaagcacgacatcgttacctaccgggagatcgaccagttcctcaaaggcgaagtggcggccgagcccgatgcggagggcctcgcccgcaagcatccagcgcttggcgttatagtaaagctcctcgctggcgccgcaatcggcctgcttctcgcagggttgttgcttgcgctggagggataggccaccagttacactgatgtattggcatagattcagtgtgattgctctacttcgcgagcaccgctctgcgtgatgggaagtcatacttgggtttctccctggcaccctattgcaagcaggctgttgcggacgtctttttgaaccagagagcgcatgctgtctgcgtagcggacgacgttggcgtctcttagcgcagagacgattttgggcgcaagcgtttccatttcatgtgcaaggaaactccgtcgcctctgagagctgatcgagaacgtagcagaggtatttcctagatgaggccatcttgcctcctcgtatttgcccatgtcaaaaccttgccatatttggaaaggttttgacgctacctaattgagggcttcttcaaccttgcgtggaagcgaatcttctgagacttccgaccatccgacgaccccgcgaatcggttgaagatccagcttcaagaaggcgtcctgacgcagttcccgagaggcgccgaattcaatctcggtcttatcgcccgccgcgttgaccgcctcaagcttatacagatacggttcgctcgattcgagattgacgaccccgccgctcgactcattttcggaaatacaggcattgtcgatctttatgtagtagtcgccagccaagaatagattcgtcactgaagcagcaaaaagaaggattgccgccaaaccgcaaatggcaactgctgtgattgctatcgtttttcccttgcccatgggtcgctcctttctgatccatgggacgatgatgccgcctcgacgctgtggccgccatcgattcgccttacggctctctaacatcttcgaaagatacggcgatgcgtctcctgcgcaaaagctgtcgaaacgccaggtgcggcaagtaggcatgcagcaagcgaaaaccatgagttcaaagtgagttcatggtgagttcaggggttccgagagccatatcgctgtacggcaccacatccatgtcacctgatattgcccatttgcgatgattgcgagtgatattcgggcgatggctcagaccatccgggggcacgattaaattaccgatccaatgtcataagccactcgggctcatcagcaccgtcgccaactatacggaaatcttttttcattgcaatggcgctgttgcctcctttctcagagctagaagattgcttcgcccagatacttatcatgtggttggatgaggcatttgtcgatacgcttccagaaggtctcatagaggtctttctgcgctttgccgtaatcctctttggattcgaactcccagaagagaacgtacttcacgcacttcacgatttgagtgagctcaactggaggcaaaccttctctgatctgttccatgtctattttgtatccgcgcttcatgaggcgcagctgcaatagacccgcccgctcttccaagaacggtttcgcctcgttcatgatagattcgaactcttcaaccttgtcaggcttcacctgatatatgcatacctctgtgaatgacataaaacctcttctattcagccaattctgtcgatacgaccaatcaaatcatttccccagacgatagcatgttccagatcaagcacatccaatccctccgcagcggctgcataacctatctcccaatcggggtaagcgacgatgcgaggtggccattcctgcatccccctgtatgcgaacaacctgatgcaaaggtgattgacatctgccacatccggagcatcctcccgcattatgatttgaagatccactaggtcatgcacacgatccgaaccttcctcggtcagcgcatggagcttttgggccacctgatgagcgagcttcctcccttgactgcaccatcgggaaggagctgccccacgatggcgttcgccatggttcggcgaatgcgcaccgcctcttcgctgtctttcgcgaggcgctcgatggctatgtcgagattgcgtcttgagttgggtatgctcatgagagctcctctttcaaacgttggtgctcggacttggtgatgaggccgctttgccgggcagtatccgcagcattgcgaagtcgctcggccataacgcggccacggcagtcgagtatggcctctgtcacggtttgagagggaattccctcataatgcgtcgtgtccttattggagacagtgaccgcttcaacccagggaggtaggatcttcctaatcctcttcggtgttccgatgctaaacttcctcggattcacgagtgcgagaccatgcatggcaagcacggtctctccgagcagaaagctatcgtcgccgaccaaagccactgcctcagcgtatgggtcgagctctgtaggcgtatgcatgacgagcttgtaaacgcccctgcccctgcgttcaaggcgtcctatgtcaacccacctgttgagctcagacttgctgatccctagctcgcgggcttgcgctgcggtcactatgccgtagttgtctgcggcaacctcatatatctcatcaaaatgcttcatgccaaaaggttagcacttctgtataccttttggcaacaatgaaatacttgcaaatttaccaattttatacgtttaacaaaaagcgccctgagtagggcgcttaggtagtggcatgccaaattctgctattcccactccaccgtcccaacaggtttgggggtgaggtcgtagcagacgcggcagatgcccggcacctcgtgggtgatgcggtcggtcatgcgcttgagcagggcccagtccagctcgggcacctcggcggtcatgacgtccacggtgttgatggcgcggatgatggccggccactcgtaggcgcgcacgccgtcgcgcacgccggtggcgcgcatgtcgggcaccacggcgaagtactgccaggcgcccacgttcgccgcttccatctcctcgcggacgatggcgtcggcctcgcgcagggcctccaggcgatcgcgggtgatggcgcccaagcagcgcacgcccaggcccgggccggggaagggctggcgctcaaccatgttctcgggcagtcccagctcgcggccgacgacgcgcacctcgtccttgtacagcagcttcacgggttctaccaagtcgaactgcaagtcctccggcaggccgccgacgttgtgatgggccttcacgccgtccttcgactccagaatgtcggggtagatggtgccctgggcgaggaagtccacctcgtcgcccaccttgcgggcctcctcctcgaacacgcggatgaactcgccaccgatgatcttgcgcttcgtctcgggctcgtccacgtcggacaggagatccaggaagcggtcggtggcgtccacgtacaccaaattcgcgttcatctggttctggaacacgtcgatgacctgctcggactcgcccttgcgcatgagcccgtggttcacgtgcacgcacacgaggttcttcccgatggccttgatgagcagcgccgccaccaccgaggaatccacgccgccggacagcgccagcagcaccttcttgtcgcccacctgctcgcgaatggcggcaacctgttcgtcgatgaacgcctgtgccagctcgggggtggtgatgcgctccatgtcgtcggggcgaacgttctcgtccattgagacctcctcggtttcagtgcggcttttccgatggcgagattatagcgtacaggggcaggggacgacggagcctgccctccggtttggcggcgaactgcggtcaagtgtgcaggattttgcgatagggagagtgcttcggaatcgttgtgtgcaagattttgcgatagggagagtatgaacgccctttttgcgcccgttgagttctccctatcgcaaaatcctgcgcgaattccctgcgtgctctgccgaacggggcagtacgcgaatgaacggggcgatgggcctgcgatgcccgggatgcttttccgcagcgcgagacgtgacgggggcgtgacaggggtgaaacgggtgcgggacgttggcaccacggaaatcgcggcgtcggcataatagaagccgtcaatgggaaattgcgtgaggagaagaggcgcacgtggaagttttggaactggcgctcattgtgctggcctgtgtcatcggctcggcggtgctgtgccaagttgtgccgcggctgtcgttgccgctcgtgcagatcgccgtcggtgcggtagtggccctggccgttccagctgtccgcgacgtgagcatctcctccgagctgttcctcgtgctgttcattgccccgctgctgttcaacgaggcccgcgagacgaaccctcgcgacctgtgggagaacaagggctccattctgtcgctggccgtggggcttgtgctgctcacggtgcttgtggtgggcttcgtgttgaactggttcgtgccctctatcccgttggctgtcgccttcgcctgcgccgccgccctggcccccaccgatgccgccgctgtgggcgcactcgcgtcgtcggtcagcctgaagaggcgtcagtcgacgctgctctccggcgagtcgctcatcaacgacgcgtccggcgttgtcgccttccaattcgccagtgccgccgccctcaccggggctttcttggccctcgatgccgccgaggagttcggccgcctgtttctcggcggtatcgctgccggcgtggtcgtgggcgtcgtggggctgtactccatgcgggccctgcggcgcggcggctacgagagcaccaccatcaacgtgctctacgaggtattctcgccgttcttcgtgtacctgttcgccgaatggctcggcacctctggcattctggctgtggtggccgcgggcctcatcatggccgatcgctcccagcgcctcacctccgcctccatcgcccagcgccagctggtgtcccgcagcttctggcgcatcatcgtgttcctcatcaactcggtggtgttcgttcttctgggtatgcagctgccccaggccttcacgccggccattgccgaccacttctcgctgccgtttcttttgggggtggtggccctggtcacggcacttatcgtggggtgccgcttcgggtgggtgctcgtcatggaggaggtctatcgcgtcggccgtcgtcgcagccggcgccgcacgctgcggaagaaggcgtcgaaggtggaaacggtggagacgaaccagccttcgcccacgccgcacctgcgccatcgccgcccccattggcgcgagcgcatcggcagcttgctgaagaacgcgctggtgcttaccgtgggcggtccgaagggcgccgtcaccctttctatcatctttacgttgccgctcacgatgcccgacggcgcgacgtcctttcccgagcgcgatcttatcgtgttcctcacggcgagcgtcatcctgtgcacgttgctcctggccgacggcctgctgccgctgctctcgccgcgtgtggcggaagcttccaacgagcaggaactgtcccgcgctgccatccgcgttttggaaggcaccttgcgcgagttgcaggccatgctggcctccgacgaaaacactcagtacgatccggctttgcgcctgaccatcgctcactaccgggtgcgcctggcccgtgcgcgcgagtcggtggacgatacgtgcagccagcagatcggcgctctggcgacccaggtgcgcgaggtgcaggagaaagccgccgatgccattcacgagaaaggtggctacgacaacggcacgcgggctccttactacgccatgctgcgcgaggtgcgtcgctcgctgggctacgatggtgccgacgtgaaggtgggctcgcggttttccactctgcgcggccgagcgcgacttctgtggcagcgcacgaagccgccggcggtggaaagcgaccaggacgagcgcgtctactacgacacctgtctgtttgccatcgaacttgagcatgcggccatcgattatctgcaggatgttgtcgaccagcatgacggccgccagggtgccgcgcagctgcttttggaggagcatcgcatggtgctgaactccctgtggaaccgcatcaaccacggccaggacgtgaaacagcaggatcgccccgacatcacgctgacccaccaccaggcccttcccgacggcatgcagcccctgttcggcggccagttcgccgaggccgcccgctacgccgacgaggtggacgccgacgccctttccatcgagctcgaccaaatccggcacttgcaggatcacggggaaatctccctgcccgttgccaacgaactgcgccaacgcgtctacgtcctgcaaatgagcctgggggagtagcgtgtccggaggctggaaatgcactcaatgagtgcagtacagggcaagaatgcgcactcagtgagtgcagcaatttcgcggatttcggaaatccttaggtaaatgccacttcgaccccgtaatggtcgatgcgctcgagggccctctgccattacgggtctgaagtggcagaaaaatgccagttgagggcagctatggcagagggggaaatccggccctgccatttctgggtcgaactggcatttccccctcgctttcgcgaaaaagcaggtagggggtctcgccgcggtgctaccccgcatccagcgcgcgcacggacttcgggaggtacaacgcgaggcccagagccaggcaggccaggccgtctataatgaagaacggggcgacgcccatggcttcggccagcacgccaccgatggcgatgcctactggggtggccagccccatggcggcggtgagcaagcccatggcgcggcccatcttatcgtcgggcacgttgcgctgggtgagcgtcatggtggggccgttgaaccaagcgcaggccacggccatcacagccaccagcccgataaaggccgggaaggcgtcgggcggcagaaacccgcagaccgcagtggctacgcccacgatcacggctgccacggcgatgagccccgcgagacgcttgccgccgccccaagcgataaggatgcccgaccccacgagcatgccgacgccgaaggccgcctcggccagagacgccgcatagccatcgccgccgaagtgctggtaggtcatgagcgggaacaccgccgacagcggcccgaagatcatcatgccgatggtaacgccgccgatcagcagcacaagtccgcgcgttttcgcaatggcgcgccagccgtcgcgcaagttcgccagcacgtgctgctccttcgccgttgcgtctaccacggtgggaatcttcgccagggccagacccagaacggccacgcaggcaccggcgaaatcgaggaacatcaccgaggagaacccgagggtggtgtataagaagatgccgaaggccggcgctccgatggaggcgaccgaggccagcagctgatccagggtgttgatgcgcagcaggtgcttgtcgggcacgagcatgggcatggccgccatcatggccggactgtggaaggcttggcccaccgcccgtgcgatgcaaacggcaagcaaaagcggaatggacacatcgccagccagaataagcagtcccgccaccagtgagatgatgcccacggctccgtcggctgcgatcatgatgagcttgcggttgtgcttgtcggccacgatgcctccgaagggcgagatgagtccgacaggcagcatgacggcaatgttcatggccgccagcataagggcgctgccggtgctctcggtgacgtaccacaccacggcatagccggcggcgtaactcgttatcatggaggcagcctgaccggcccagatgaacgcaatgatggcgagccagttcttcggcagcgacagaccggcggcactcaggggcggcgtgggggcggtgtcggtgccctcttcagcgacggtgcgggaatgcggggacaattcagtcacgggaatctccttagggatatagaggcgatgcgcggaaagggcggatcctctttagagtgcagttgcggatggggttgcgccagcgatttcgagttgcaaagggcggcgcggagaaaaaacggcgcaacaagaagttgcccgcacggggcaaccagacgctctcgttcgcgagcgatctctgttagcgcgccagcagtcccgccatcaaaacaccttgccttggtcgattcctgtggcgcccagtgtaagagagcattttatgcttgtcaatccgactacgatgcgtgggggattcgcgcgatggcatcctcgctcgctatactgggcttgatgcaagatacgaaaggggcgcggcatggtggaactgacgaaagagaatttcgatgcgcgggtgaccaatgcggaaggaacggtgctggttgatttctggagcccaggctgcggtccgtgtcgagccatggagcccgtgctggaagccgtggccgcgcgccatcccgagacgcgcttcgcgaagttgaacgcggcggagcaccccgacatcgcctgggccttcaaagtggtgagcgtgcccaccctcgtgctctttcgcgacggggtgcccgtagacgacatcgtcggcgcggtacccgcccagcgcatcgaggatcttctggctaagggcggccgcgaagggggaggagcctgatgggcaagaaggcagaggcgctccacaagtcgcttaccgggcaagggctggcgagccgcgcgacgggctcctcgctcgtgcataaggtggcgggatgccaggcgaagacccaggaggtgcccgttcgaggaccggatttcgaggcgtcccagcaaaaggggcaggcctgtcggcaaaagctgcctcgcagcaatctggggaagtgggaggtacgccctggccgcagcgaggcggtcgatctcattttccagcaggatgccgatcggctgtccttcctcgtgcccgagcgccaccgccgcatggcagcctcgccgttcgccttcttccgcggcgcggcccttcccatggccgccgacttgtccaccctgcccaccacggggcttttggtgcaggcgtgcggcgatgcccatatcgcgaacttcggcggctaccgctctccggagtcgcatctcgtgttcgatctgaacgatttcgacgagaccgcccgcggtcattgggaatgggacgtggagcgcctggtggccagcgtcgccatttgcggacgcacgcgcggcttcggcgacaaatggtgccgcgaggccgtgcgtctggcggcccaaagctatcgggagtccctggcatacttcgccacgctgggatccttcgacgtgtggcgagcctacctcgatgtggccgaggtgctccagggcctggccgacaaggtgtccaaggccgatcggcgccaggtggccgccgatttggaacgggccttctccaagaccaacgagcgggcgttcgagaaactggtgcgcatggaagacggccaaccccagatggtctacgatccgccggatatcgtgccgctcagccatttcctctccccggacaaccagcggcgcgtccagcgcagcctggcgcgcatgctcgacgactaccgcgcaacggtgaggccgccctaccaggaactgctgaagaactaccggctcatcggcgcggcgcaaaaggtggtgggcgtgggcagcgtgggcacccgctgctgggtggcggcgttctcgggcaaccagatggccgacccgctggtgctccaaataaaggaggcgaacgcatcggtgctcgagcggttctgcgggcgaagcccctatctttcccacggagaacgcgtggtggcggggcagcgcctcatgcagacaacgagcggggtgctgctcggctggacccacgcccgggacgagcgcgggcgccggcgtgactattacgtgcggcaattgtggaattggaagatgtcagtcgacttggaccacgccagcgccgatgagctggagatttacagccagctgtgtgcgtgggttctcgctcgcgcccatgctcgcacgggagaccgcgtggctatggcctcctatttgggaacgtccgacaagttcgatgcgtccatggtgtcgttcgcgctggcctacgccgatcagaacgagtcggactacgagcagttcctgaagcgcatcgcggcgagttgagtgcctgctcgcttcaaagcgacgaggcggcgtcgccgtgcgtcgaaccggcaatgctgctgaggcgcatcccgaggcggatgggtcgttttctctttggccgttcggtctggaaaattgttgacaaaactgcacatcttccatccggttttgcgggagcggcaaaggggcggagtgctatcatgggagcttacctcgcgagggcggcagcgcatccttgttgccgcttcaagcctacgagaggttgaggaaaaggaagattccatggtgtctttgagccgcctctttcacaagacggacgagcgtgaaaaaactgcgaccgctgcaacggctccgacggaggcggcctacacgccgacagctgaggtaacggcggcgccggtagagctgccgcaggagtttctcgacaagttcccgggcggcatgctccgttacagggccgaggaggccggcacgatcgaccaggtgagctcggggctcgtgcgcctgttcgggtgctccgacgccgagcagtttcgcgcgctgacgggcaatacgttcaagggcatcgtgcatcccgacgattgggaatgggtcagcgcgtcggtcaccgagcagatcgggcgcagcgacagcgactacgtgcgctaccgcatcatccgcgccgacggcgaggtgcgctgggtggacgactggggccatttggtggaagatggcaccggcacccgctggttctacgcgacgctaatggacgcgaccgagcgcgtgcgcgagagagaggagctgcgccgggcgaatgagcggcttgagattctcacggcgctctccaacgatgtgctcttcgatatcgagtgcggcacgggcaaagcccacgtgtacggcgacttcgaaggtcgtttcggccgtgctcccaagcaggaagatttcgtggtgaaccgccgctgccagaagccgtgcgagctggccatcacctctcatgacctcacgcctctcatggcacagatcggcgaaaactcgcttgtcgatttcgaaacctcgacgcccggtgccgacggggagccggtgtggtaccgctaccagtcggtggtcctctacgacgaggagggcggcccggtgcgccatgtcggacgtttgctggacacgagtgaggcggctctgcgcgagagccagtttcggcgcaaggccgagcgcgacggcctcacggggctgtacaaccgcgccgccgccctcgatcgcatcgagacggcgctgcgcactgagaaccgcgcgtgcacgctcatcgtcgtcgacgtggacgacttcaaggccgtgaacgacacctacgggcatcccgagggcgattacgtcctgaaaaagctggccatcttcctgtcgcaggtcatgcgcaaggaggatattgtggcccgcattgggggcgacgagttcctcatcttcgctcccggcctggccgcagggcctgctgccgaccgcgtgcttgagcatttggctcgcggccccttcgccgggcagcgcgccaccgacgaggtagtcgattcggcctatcacgcggctcccaccatcagcgtgggggcggcctgctgcctgacaccgcccatgcccttcgaggtgctctacgcggcggccgacagcacgttgtaccaggtgaaggaagcggggaaggcccagtaccagctgaccgtcatcggttagtgcgtttgcctcggggcggggctagccggctttctgcagcaacgggccgtcgcagcggacggtgcggcgcgtgtccgccgtgctcagaaggcgtgccagctcttccacggagcgtggaaagtggcagcgatcgaggtcgcactggtcgaaaaagcggtgctcgaccatcgattccaaaaacgagcgaagcggatcgtagaacccatcgatattcagcaagaagcactcgtggggccccatgtccaggcgcacgcgagtgaagatctccgagatttcctcgagggtccccacgcctcccggcagcgccacgaacgcatcgcccagctcgatcatcttcgccttgcgctcgcccatggtgtcgcagacgaaaagctcggtcaggtcgtgctgggccacgccggcctcgatgaagaaggcgggctccacgccgataacgggtgtgccgccttcgatggccgcgcgcgacacggctcccattagtccgaccgagctgccgccatacacgagcgtgtgcccggcgcgggcgatccaggcgcccaagttgcgggcggcctcttcgaaatgcgggttgtcgccgaagttcgacccgcagtacacggtgatgttcatggctctctcctctacggtggatttgatttgctcggagaaagtccccagcatagcaccactatcgttcgggagcaaatgagtcgaggggcggtgctccttacgagccgctatcgcttcacttaccttgttgtcacctttgctgcactgcttacgcgcgtccgttatactggctttgcaagaggagaagcgcggaggcaagcgaggaaaccggccatgaacgcagtcaagcattttctgggaaattacagcgagaacttcgccgcggcgctcgtgctgtggccggtgctctcgttcatgctcacgctgccgattctggcctacctctaccatcgcgacgggcggctgcgcttcggcaccttcgtgggggcctacctcaccgtgctctacgtctgcggcctcggctgcttcacgctgtacccgttgccccagggcgatgcgggccccggcatcacctacggcgtcgcccccaacttcaacccaatgaacttcatgaacgatattgcgaaggacggcctgaaggccgtgtttcagttggccttcaacgtggtgttcttcatgccgctgggctttatcgccgggcggcttttgcgcctgcgcttcctcccgtcggtgctgctgggcctggccgcgtccttactcattgaggtgtcccagctcacgggcttgttcggcatctacccctacgcctaccgctgctgcgatgtggacgacgtgatcaccaacaccctgggtgccgtcctcggctgggtgtgcgcatggctgctcggccgcgtggtgcctccggggcagctggccgacgcagagccgactgagcatcccggcttcgtgcgccgctgcgtggccctgtggatcgacctcgtcatcgtgtggctggtggcggtcgtgccctacggcgcggtggccgtgggctttgaggtggccggtctgaccccgccgacgtttccggatatgacggcgaatcagacggccgcccttatcatcaacggcctggcgctcatcacgcttgtcgtggtggaagtggtcatcccctggttccacgacggatctaccccgggcggctcgttcgtgcgcatgaccttcgagacccacccccgcacgacaggctaccgcgtggtgttctacgcggcccgctcggtcacccttgtgctcgcctacctatgggtgccgtggatggtgatcatcctgctcatcttctatctggtgaagcgggaaatgccctacgacctcattccgtaggggagcgtcttgcgccgtgtgccagccttcttgtggtggctaggcagctaggcgctccgccagaaatcttggatgaggccctggcgattctcgcaccctgttttctgcagaaggcggtgcacgtacaccttcacggtgctcggcgcaatggtgagcgtcgaggcgatgttctgattgtccttcccctgcaaaatgaggcgcagcacttcgctctcgcggtcggtcaggccgtggcgccgtgcgtaaatgagcaggttgtcgccgatgcgcgcggcgcgctcgtcgctttcgtcggccggcggcttctcgaagcgcagggccagcgagcgaacagcgtagccgatggccagaagggcgccggcgaggaaaagcaggttctccgcgtagttgcgctcggaggagatgaggatgggtcccagcatgaacccgtcggtgcgcagcacgaggaacagcagcgcgtcctcggccacgacaagagccgccaggacggccaccacgacgaaggccatgcggcctcgggccatgcgcgttcgctccgtctcgtcgcggcaggtcagatagcggaacaggccgaagccgagcatccagaacacgtagatcatgcgcagcgagtagaaccagaagcgtccctctggcgtgtcggcgcccatgagcagccccaggctcagaaggaggaacgcgatgggggccaccgccataaggctgcggcgccgctcgcccacgaagtcgcagacgagcagccagaagaaggtcagacaagcgtcgccgatgagaatggtggccaccgagcgcatgagcaggtagctcgcgtcggcccctgcgctggtgccgagcacgacggcggcgatgctgtcctgcagcatgaaggcgacgtcgatgaagtagcagagaaagcccccgaacgcgaggatcatcgcgcgcgaccgcgacaccaaataagccgagaagcacgtggcggcggccagaaccgaggcgagcataaccagaagcgtgaagtagtaggtggcgaattccacgggcgtctcctcggctctcgtctctcctcggctctcatcaggcgtttatcgaaggtgtatcggtcttggcgctccgattacgccccgttgcttacctctgatacacccattttaccgcttttctgtttagttgacctctttcatagtggttcgcgcgggcgataagctcgatcgctcatgggtcattcgcacggtacgggtgccgccaccgtgggacgacggggcgttcgttttcgccaggcggctcgttaagggagagagtcgtctcaagcgcagggccgcgtcgccatggggtggcccttatttggggacaccgagcgcacagggcgctcgtgggtacaagaccggcaagagaagggattgaagtatggaagagaaaaagaaaggcattgggctcattgggctcatcggtatggtgatcagctcgtgcatcggctcgggcgtgttcgccatcaccggccagctggccggcgtcgcctccccgggagcggtgctgatcgcatggctcatcgtgggcgtcggcttcttggcgctggcgttctcgttgaacaacctcaccgagaagcgcagcgatctgcacggcatcttctcctacgcggatgccggttggggtccgctcgccggcttcatctccggctggggctactggctgtcggcgtggctcggcaatgtggccttcgccacgatgatgatgtccaccatcggctacttctaccccgcgtttctgccgggcaacaccattccctgcatcatcattgcttctatcgtgatgtgggcgctcacctatctggtcattcgcggcgtcgagagcgctgccttcctgaacgccatcgtcatggtgtgcaaggtggccgccatcgccgtcaccctcatcttcggcatcttcctgttcaacgccggcatcttcacggccgacttctggggcaacgtgtacgacaacgccgtggccgccgggcagtacggccccgacgcggcgccgctcgggggcgtcggcacccagatcttcaactgcatgatcatcatgatgtggtgcttcgtgggcatcgagggcgcctcggtcgtgtcctcccgcgccgcccgcaagaccgacgtgggcaaggccacgctcatcggcttcatctgcctgatgctcatctacgtgggcgcttccgtgctgccctacggctacatgtcctccaccgaggtggccgcgctcgattaccccgcgctcgtctacgtgttctcctccatggctcccggctggggcggcccgttcatctccatcgccatcattatctccatcctgggctcctggctgtcgttcaccattttgcccgccgagacgacctccgagatggccgactacaagctgctgccggcctcgtggggcaagctgaacagccataacgctccttccatgagtctgctcatcgtgggcgcgtgcacccaggccttcctgatcgtgcttctgttctcggccgacgcctacgacttcgcgttctccatgtgcaccgtggctatcgtcatcacctgggccttcgcagccgcctaccaggccaagtggggcgtgcagaacaagaacatggtgcaggccgccgtcggtttcgtggccgtggccttccaggtgatcggcgtgctgttcaacggctggtccttcctgctgctgacctgcgtgggctacattcccggcttcttcatctacgtgaaggcgcgcaaggactacggcaacgccatcaccatgggcgagaaggtgtgcatgggcgtcgtgtccgccctcggcgtgctgtctctcgtgctgctcgccatgggcgtcatctcgatctagtcgataaaaggagcaagttccatggacatcaagactatcggtgttgaagactggctgaacgtgtgggagaagagcgcgacctacgatatcgcgcagtccacgatcgcctctatgacgatgggggagatcctgcagctggacggtcaggcgggtgccaccttctacgatcgcctgaaccaggagaagatgaactacggctggatcgagggttcgccggagttcaaggccgaggtggccaagctctaccgcacggagattgatccggactgcatcctgcagaccaacggcaccacgggcgcgaacctgatggcgctcatgcagctggtggagccgggcgaccacgtgattgcggagtaccccacctaccagccgctttacgagattccccgcaccctgggcgccgaggtggagtactggcacctgcgcgaggagaacggctggaacccctctatcgacgagctgaaggaactggtgcgccccgacacgaagctcatctgcatcaacaatgcttcgaacccgctcggcgcggtgctcgatcgcgagacactggagcagatcgtggagattgcccagtcggtgggcgcctacgtgctctccgacgaggtgtacctgccgctggagaacacggagaacttctggtctatggccgacctgtacgacaaggccgtggtcaccaactccatttcgaagacgtactcggtgcccggcgcgcgtactggctggacggtgtcgaaccgcgagctagccgacaagttccgcgtgtaccgcgactacacgatgatttgctgcggcgagttcaacgacgcgctggccacctacattctgcagaatcgcgaggccgtgctcgggcgcaaccgcgagatcgtgttccgcaatatggccatcgctcaggagtggatcgacaacgagccccgcgtcacctggcaggcgcccaagggcgtgtcggtggcctacatcaagtgggacatcccgatggacgacgaggagttctgcatcaagctgctgaaggaagagggcgtgctgctcgtgcccggcaaccgcttcgagctccccggcggcgcgcgtctgggctactgcgcgcccgaaccggtgctgcgcgagggcctcgcgcgtctcggccgagccctgcgccagttcgactaaccgcttttgcgttcgtcgcggctggtcggatcgatgcggccagcgtgcgacacccgccatttcacttcctccgaaacgtctgccttaaccttcgtttccggagctgacgatttgggccgcccctcctatctcggggcggccctttgtgcaaaatagggtacttctcgtagtctttcgagcgaaaagctgggaattatgcagataccacctggggaaacgcttgggaagagacgggaaggcccgcgagaaattacgagaagtgcccggttttgctcatttcaacgaaagaggcggctcttaacatgagagcgccgggcggtttgcggggcgcttggccccttcgcgggcgcgaaacccagtggcaacggaagccgtgccataatgggcggcgaccgattcccgcgatgattcgaggtttccgtgagcgatcccaagaccgtgcccaccatgggcgcccccgacgcgtccgatgccgtctacgatgcccgtacattgggtgcgccgaagatgaccgtcttcggcatccagcacatgttcgccatgttcggcgccaccatcttggtgccgacgcttaccgggctctcggtttcggccacgttgctgttcgcgggcttgggcacgctgctgttccatttccttgcgaaggggaaagtgccggcgttcctcggatcgtcgtttgcgttcattgcggggtacgcggccatcgcgcccaacggggaagcgcaccttctaccctacgcttgtctgggcgtggcctgcgcggggcttttgtacttggtggtgtcggcgctgttcaaggcgttcgggccccagcgcatcatgcggtttttcccgccggtggttaccggtcctatcgtcatctgcatcgggcttattctggcaagttcggccattgccaactgcgagacgaactggcctatcgcgctcgtggctatcatcattatcgtcattagcaacatctggggccgcggcatgatccgcatcattcccatccttctcggtgttgtgggctcctatctggccgcggccatcgggggcatcgtcgattttacgccggtggtcgaggcgccttggatcggtttgccggtgctgtgggacaacacggtgttcgcgctgttcggccccagcttcgacgcggggcttgccatcacggccatcatcaccatcatgcccttggccttcgccaccatcatcgagcacatcggcgacatgtcggccatcagctctacctgcaaccgcaacttcattgccgagccgggattgcatcgcacgctgctcggcgacggcctggccaccatcgtggcgtcgctgttcggcgcgccggccaacaccacttacggcgagaacaccggcgtgctcgccctcacccgtgtcttcgacccgcgcgtggtgcgcatcgccgccgggttcgccatcttgctgtcgttctgcccgaagttcgcggcggtcatctcctgcatgccggcctgcgtcatcggcggcgtgtcgctggtgctgtacggcatgatctcggcggtgggcatccgcaacctcgtggagaaccacgtggacttcatgctgagccgcaacgtgctgatcacggcgctcatcttggtattgtcgctcggcatcgcctacagcgccgctggtgctatcactttcgaggtgggcggcgtgacggtggcgctgtcgggcttggccgtgggttcggtggtgggcatcgtgctgaacatcatcctgccgggcaaggccgacttcgacgcctgggacggaggcctcgccgccgaggccgaagccgacgacgtgcccctgcccctggaagcggaagtgaccaacctgcccattcgggagtaaatcgcctgtccccttgtgccgttgtcccgtagggggcgaccttggtcgcccctctcaaccagcgcaatcttcctttgccgggacatgagggcagaccaaggtctgcccctgcggaggggtgcgaagcagacgcaagataaagggggtgcttttgctattcgtgctcggggagccacttctgaaggacgaaggcctcgttctccttctcgtcgcgagcggcgtatatcagggtgacgcgtgggtatttggccatttcggggctagccagcttcttcgcgaactttagcgcctcggggttcgcgttcagctccgccacgtacttttcttggaaggtggcccaatgggccgggtcgtgcccgaaagccttccgcaattccgtcgagggcgcaaggaacttcgcccattcgtcgtaatgcacccgggccttggtgaggccgcggggccacaggcgatcgacgagcacccggtacccgtcgctttcttcgtaaggttcgtacacgcgcttgatggctatcttcatgagaacgtctccttggggcatggtagataatgagcaggacgcagtaagcccacctgcgattatcgtgcgccatgcccatcgtcggcacctggcgcgtctcctgtaagcaaagtgcccctgcctcgttacgaagcaggggcgcttcccgagggttgattcgactttgcctgtagtgcgcgcgagtcgcagggtgccaatctggcaagttttcggcgttgttcgacgtatttcgcaccccggaggttcaagtagctgcgaggtcttcctccaggtatgtttccgacctgggaaaacgtagtgcaggccataatgcgtatcccttgctgcgtcccctgatgtcgaaaaccgccgaaaacttgccagatttgccgattgtttttgcgcggatgccctgcgaacgtctcctgaggcatccgaatgagggtgtctgacgctgcggatgtcgattcgtggctgaaggtggcgcgaggtgagtggccgctcgcggtacaatggcgtcgttcaatggaaaaggaggaacgccatgaccgtgttgtttgtgaacgcctgcctgcgcggggacgagtcgcgcacgctcacgctgtgccgcgagtatctggaaggcatcgagggtgtgaaggaagtgaacttgtccgagctgcgcctcgagccctactatggcgactcggcggcctaccgcgcgcagctggaggccaaaggcctgttcgatgaccccatgttcgacatcggcaaggacttcgccgaggcggacgagatcgtcatcggcgctccttactgggatctgtcgttcccggcggcgctgaaaatctacatcgagcatgcggccgttatgggtatgaccttccactacacggaagagggatgctgcgaggggctgtgccgcgccaagcacctcacctacatcaccacgggtggcggccaggtgagcaccatgaactacggctacgagtacctctgcggtatcgccggcatgttcggcattcccgagacgcgtttcgcctgcgctgaaaacttggacgtggtgggcgccgacatcgaggcgaacctgaacgaggctcgcaaagtgctcagccgcctgaaggcgacgcggtagggacgtttcgtgagacgtcgcctcgcggacttagaggtgtagctcgccttcaagtccgcaggatacccgctctgtaggaaactggtgacccaggtctaggccgctgcaggctcaatagatcggtagcagcggcggcgcacgatgacgtaggagacgagcatggccacgatcatgaacgaccaggtgacggggtagatcaccatgagggcgtcccaggtgccagacagcgggaacacccaggtcacgagcgccacgcgcagcacgcaggagccgaggatggtgatgatggccggcagcgtggaccagcccatgccccgcatggcgccggcaggcacttcgtagaaggtggtcaggcagtcgggcagctccacgaaccacaggcgcacgaggccgaagctaagggccgccgcatcggtggtgaacagtcccagggctcgggtgcccagggccgtgaacgtgactcccaggatgagcgacgatgcgaacccgaacagcatgcaccagcggaagatggcccggcagcgatcggcgtttttcgcggcgaagttctggcccgtgaacgtgacggcggtctggccgaaggcgttcacgaaaaagtaggtgtagtactcgaagttcagcgtggctgccgagcccgcgatggctgccgagccgaaaccgttgatggccgcctgcacgacggtgttggaaagcgagaacacggcgccctgaacgccggcggggatgccgatgtgcaggatgcctgccagctcggggccggaaatgctcagttcgcgcaagtgcaggcggaagggcccctcctcgcgcataagaaatgccactacgatgacggcactcagggcagcggcgatgatggtggcgatgccgattccggcggtgccccagctgaacaggcgcacgaaggcgaggtcgagcacgaagttcatcacgacggcggcggcaagggcgtatagcggccgtttcgcgtcgccatgggcccgcaaaagcgccgaaccgaagttataaatggtaaggaacggaatggcgcagaagtaaagtcgcacgtaggtgagtgcgtcggcgagggagtcttcgggcatgccgatggcgtccagcacccagggggccaaggcgaggcctgccgcccccagggccacgccggcgatgagcgagagcgtcatggccgtgtgcacgctcttcttgatgctgtggaactcgccggcgcccacgtgcatggccaccaccacattggcgccgatggaaagccccacgaacaggttcacgaacatggccgtcaccggattcacgccgccgatgcccgcgagtgagaagctgctgacgaattgcccggcaatggaggcatccgccgagttcagcagctgctgtaagatgctgctcagcgccaggggaatggcgaatcgcaaaatcttgcccggcaaggggccgttgagcatgtcgatgccgctgtcgcgcttatcgcgtcgacttcgcttggggcgggtggccgggctgtttggcttgtcgagcttgtcgcgcccctcgggccgacgcacgtctctctcgtttggtatgtctcgttgcgaagattccataacgagcgaatcataacgcgctcgctgtctccgagttccaggattacgccatcggcgcatgatgcgctcgcgacggcaatgggcatggttttgctatcgagccgtaggttcttctatgacctcccagtggccccctttcttggggccgatgtggcgaagcttgccggattcttggagctgcttcatgacacgctgcatatggcgagtagatacgtccagcgcattcgcgagctcgcgggccgacgaggaaggattcgcgtgcagcagctcgagaacgcgctcgtcgaggggcgcgcggttcttcgcgtcttcgggaaattgcgcgaggaattccaggcgcttctctagctcttcggtttcgcaggcgagcagcaggagcacgaacggagcatcatcgccgtcggcttgccagcgctccagggactccttatattccagggcgtgggatgccttaatggcgaccggggcgaacttgaaagactccagctgggcgttcagcagcaaacgtcccgtgcgtccgttcccgtcggcaaaggggtggatggcctcgaaggcggcatggaaccaggcgcaagccaaaagtgggctactctcctgaaccaggcggtcgaaatggaagatcaagtcatccatttcctcgcggatgcgcaaaggggaggcgggagtggttcgcgacgctcgtatgatggccggtgcgttgcggtagatgccgcgggcagcgggttgaaggtcgagagcgcagcgctcgtgagtgtccaggatgaggtctttgtcgaagggccgcttatcggtgctgtagcgggcgaggaagtcgtgaccctcgaaaatgccccgtgcggctatttgctcgcgaccgggctttccggggacgaactcgccctcgtaaatgatctccgtttctgcaagcgtaagcgtcgacccctcgatggcattcgagttgtaggccatgcgcacgaggaagtcctcttcgtaggaacgcagggcctcggggctcgcaatgagcctgcgttgccggcgccatgtgacggcgagagattcgacttgtgcgatttcctcgcggtagttgtctgagggaaacgaagtgctcagcattgatgcgcctggctttctcggtgtcgtaataaaatgcgtttcttttctcagcatgatacgtaatgtcgtaataaaaggcgagtttattacgacattgccaaaggaaatctaagaatgcgtacgctttattacgacatgacggcagagggcaatgggcgatgttttgtgggaagggccgctagtcttttacccttccagttcgcgggcaaggtagcggccggtgaggctttccgggttggcggctacttgggccggggtgccctcggccacgatgcgaccgccggtctcgccgccgcccggccccatgtcgatgacgtagtcggcgttggcgatcatgtccaggtcgtgctcgatgaccacgacggtggcgccgtgctcgatgaggttctgcagcacgccgatgagggtttccacgtccagcgggtgcagcccgatggtgggctcgtcgaagatgaagagggtgtcgtcctggctgcggcgcatctcgctggccagcttcaggcgctgggcctcgccgccggaaagtgccggtgtggcctcgcccagagtgagatagcccaggcccaaatcgtggaggatctgcagcttgtcgcgcaccttcttcagatgggcgagggcggaaagcgcctggtcaacggtcagcgtgagcacctcgggcagcgatagcgtgtgcacgctttcgaaatcgtcggcatgctcgtgtcccgccgccatatctccgcagggggcgggttcgcgggtcgcttctcgctccatttcggcgtcggcggacagttcgacgccgccttcgatggccatttgaatggcgtaggcctcgcgcccgtagcggctgccgcggcagtcgggacagggaatgtccacgtcggggaggaactgcacgtccagggaaatttgtcccgtgccgtcgcaggtggggcagcgcaaggatccggtgttgtaggagaacgcgcccgccttcagcccctgctccttggcgtccggcagagtggcgaaggcacggcgcaaatcgtccagcacgccggagtaggtgcccacggtggagcgtacgttcacgccgatgggcgtggcgtccaccagatcgacccgcgcgatgcccggagcgtccacggacagcacgtgtcccggcagcggcgtgccggccagcgatgccttcagccccgcgaccaggctttctagcacgagcgttgtcttcccggagcccgacacgcccgtcacgcaggtcagacgccctttcggaatgcgtgcttccagcggatgcacggtgtggatggcgtcggtctccagcgtgatggctccttcgtcgaagagatgttcgggtgcgacaggcgtgcgcacccgcaccttcgccgtgcctgccagaaacggcccgatgcggctggccgggttcgcctccacctcggccaccgacccttgggcgatgacgcggccgccgtcggcgcccgagccgggtccgatctcgatgaggtggttcgcgtagcgcagcacggccacgtcgtgatccaccatcaccacggagttgccgtcggacagaaggtcgtccatgacgcccagcagcccctcgatgttcgccggatgcagcccgatggagggctcgtccagtacgtagaggacgccggtggtgcggctgcgcacggcgcgcgtgagggccacgcgctggcgctcgccgttcgaaagcgtctcgctggcacggtcgagggtgaggtatcccagccccagctgctccagcctctggattggctcggtcatttcgctcgtgatggagtcgcacatcgggcgcatctccggcggaagccacggggccacgccaggcagccaatcgcgcagctcgtccagcgacaaggccgtcacctgagcgaggttgcgcccgtcgatggtggacgatcgcgccttctcggagagccgcgtgccgtggcagtcggggcacaccgactcgcagaggaacttcgccacgcgcgccatgcccttctcgtccttcgccttcgccagcgcgtttctcacggtgctcacggcgctgtagtaggtgaagtccagctcggtggcatggtctttgttcttggggacgtacaggatgtggcgtttctccatggggccgtgcagcacgatgtccttctcggcatcggtgaggtcgcggtagggcacatcgatgcgcacgcccatttcgcgggccacctgcggcatgagcgaccacatgaggttgcgccacggtgctaccgcgccctcttccagggtaaggttggggtcggcgatgagcgtggactcgtcgatgtcgcgcacgacaccggtgccgccgcaggtggggcacgcgccgccgctgttgaaggcgaggtcctcggcggaggggccgtagaattccacgccgcaggtggagcaggtaatgggcagctcggcggccacgttcagggtcggcgcgttcacgtgcccgttgggacacacatggcagccgaggcgcgagaacatgaggcgcaggtagttcaaaagctccgtggacgtgccgaaggtggagtgcacgccggggatgccgggccgctggcgcagggcgagggctgccggaacgtgcagcacctcgtccacggtggcgcggccggcctgggagatgcgtcggcgggtgtaggtggaaagcgcctccaagtagcggcgactgccctcggcgtacagaacgcccagcgcgagcgagcttttgcccgatccggatacgcccgcgatgcccacgagctgccgcagcggcacatccagcgagaggttcttcaagttgtgcacccgcgccccgcgcacctcaatggcggtaggctcggtgaaggcaagaggcgtggcggtttcgatgtgttccatggaggctcgattctcgcgcgatatgcaaagcgccccgcggcggggcggggcgctttcgaattctggagccaacgagcggattcgaaccgctgacctacgcattacgagaggcaaaagaccagatcagatagggtttttcgtatccatctgcgctcgcacagcgccctatcgtggtcttttgcgtccgttcgtgtccgtatgtgtccctgcgcattcgcagacgattcgcagacgattcgcacacgatcggaggccccagaaaccgaaagctgaaaggatgataccagatgactagcagggaagacgagcttactttccagatggagaaggcgagtgattctttaggggtcgttgtcgctgtgctccgagatatggccgaatgcggcgactccaccttgtgcgggaatatcgagggcgtgaaggtcaacgacgccctatacgggtgcgtgtacgtgctggagtcggttcggggtgagttgaaggccgcgatgttcagcaaggaggcggatagccatgctggcgactaaggaagggctgtacacccgcgaggatttcgccgacgagctggagcacggggggctccccgctacctccatgctggcccaggccgacgggctcgccctcgtgtgcgccctggcgcttgacagcgcggcatacgacggcccggacgatgacggggaagtgctctgcgaggtggccaagacgtgctcgtggcttctggtagaggcccggagggctatctgggtggccgacgatctgctggccgaactgtagggcgccacctacccagaacctcaccatagcgaaggcccgccaaatcggcgggccttcctgcgttatgcggcgtcttttttatgggcttgacatagttgctctatctcccgcaccttgcgggccgcgcgctccttgcgcttctgggccgatttgcgggcccggtacgccttccccgcttcccagtcgctcaagtcggccagataggccgtagcggccgctacggcctccctagggggcattcccgacacgtcggggacggctggcggggcgtcccacaccctgccgccccgcttcgcctcgaaaatcgcgtaagtctcgcgctgctcctcgggaaggcgctccatgagcgcggcggtctttgcctcgatgcggaggaggtttgccctggcgcggcatttcccgcagcgtcccgaactgtccagccgccgaacccagctcgcgcactcgtcgcaccagaagagcggcgtgcccacgtacacgaacggcacccccaggcgggcgcactccccggccacgtcccgcgcgtcgcggcggaggtgataggcgaggagggcgagcggcaccgttccggcgtagtccctcacgaacagcgtttcatcgagtgtccaatctctggccattgcgatacctccatcggtgatagcattccacttgcgcagcgggagccgcccgaagggggcggctcctttggtgtccggtggaagtcccgccttagcgaagccttggcggcgtctgcggggcgaccttgtaagaaccttgcatgtagctcggcgcggctacttggcgccgtactgctccacgacggcctccgccctgtcgaaagccttgtgggacgcgcccggcatgaacgtctcaaggccccactcgtcgaccttgaagtcagcgccgacttcccccagcttcatgattcgctcctcccggctggcccggaacgtctccagcccgtcctgaatctcgcggatggaaggggccgcgccgaactccacgatcgctccgagaccgttcttctcggcgatgcccgccagcgatgcctcggctgcggcgttcccgcgaacgaagctcgccgcagcctcgatgtcgtgggcggtgaccgacgggttcagcgccagggcgtcgaggtagcgcagcgcctccgcgctcggaggagtcgcgagggcggcttcaacggcccggcccagttcctcgaacaatcgggactcttgcgatacggcggtttctcgtggccaggcgatgcgggcgttgtacctgtccaccgcctcgtgcataacacggtggcgctccttttccgtgtacaccgccgccgcgtcgatgatggcagccagcgacgtggccgcattggtgatttcgtccttcagcttctgctcgattgcctgctttcggtctaggtactttcccattgctctaatcctctctctggttatctctcgatgccgaacgcggcctccatgcgccgctcgaactctatttccctcatgtcctctttcgatagcttgctgagcggcgcggaggcgtcccggattacctcgggtaccatgcgcgacggaacgcccagcgcggaagcctccaagtcgatgaagctgcgaaaggtgtcggcccattccgtcgcgctgtcgcgtaggcggttcagggcgtcttctagctccgtgcccgaaagctctcttctgtgatcgttcaactttcgatctcctttctctcgcggcggcttcctcgccgcctactcactagcaaggtttactcggctgcgacccccttccccttcattgcggggtttctatcttctgaagcccgccctctgtagtacttctgtaggcggttgagagatgcccgttcggctgaacaaactgtgaggggaaaggggcaaaactgtgagggcatttcgcaaaactgtgagggcatttaccctcacgcttcctataggaactgtgagggtatcgcctatggtggcgggtcgggctcctcgggcggtagcggcatcacggcaaagaggctcgcgcttcccttgcgtcctttcttcacgaggtcgagaagccctatctcttgaagctgtctgatggcccgcgacgcgctctgggggtggccgagaacggatgccgcccagtcgtgcggcaacagcactgcttgaacgtcggaggccgtgaggtcgaagcgcccgcagctcactaggtagtcgtggagcgccgccaggtcgctgcccttgagcaggtcgccgctctggattctccccaccacctcgggccacagcgttgcccaggcggcgttgatgcggctagctaaagcggcctccatcgctatgcgttcggtgtcggggcgtatcatcccgtatggcggtctgggcggcatcggctagccctcgcaatcgtccaccatggagcggcgcagcctcacgaagggacgcacctcggggtgtgcctccacgatgcggcgggcgagcgccggggctatcacgttgttgattcgggtaccgcgcccctcgcggtcggtgaagtccttgcgccgggcctcctccagaaggaggcgcaccgagaagcggcgctctgccgccgtctcctcaagggctcgccgctcgatgtagcgcagggcgtcggggttggcggccatccagtcggcgcacttggccgcaagctcggccccgcgcgccgcgcggtattcgctttgcatggccattgcctcggccaggtcgcgctcgatctcggcgcggggacgccgcgcatatgcccgtgcatctgctggcgcatatgctgctgcaaatgctgtcggtgtctctggttgggcttcggttgcgcttcggttggcgtccggctcgcctccggctgtgctaccatggtgaggcccgatctgggcggggctggccgctgtgctcgccaaagtgtcgcggtcggcccccttcttaagctgctccacgcttgcccctctccacgaactcggcgaagtcggccttcgccacgtaccagtaggccccgattttgaaggcgtttggaatctcgcccgttctcatcagcttgcgcaccgtcttcgtgctctgccggatgatctcggccatatcgtcgggcgtcagaaggtcgggatagcactcgaacatcgccgtcatctgcggggcgctgggcgcctccacgatcttgcagcccggcgggagctgcaccaccggggcgctcatgcggcctccacttcctcgaagagttttgaaggttcatctttccattgaagagcgttcgtgagcttcgcaatttgtcccggataaggcttgagacgctggctttcaatctgcgaaatggagctaacgtgcatatctgcgcatctggcaagcgccgacatcgaaagtccggcttcttttcgtgcaagggtcagtctgatcattggttttctcctttctttggtgttgacgtaaccaatcctgacgctataatcgtatcagcatcattgacgtttgtttgagattaactgttaattttggattgaagggcagagccgttatgaaccgtcacgaaatgacgctcttaggactaaacgaggagtttgcatttgtttcttctggcgacgagacaacgcccttcgattcgaaagccgccgctatcgatttgctgaaggtgaggaactggcgaggattggtgggttttctcgccaagcacgctatcaatcgtgaaatggcgtggtgctggaacgatggcttggacgtgcggcggctgttcggcggggcgccacaatacgcccatgatctactcgggcgctcattggacaatgtgctgtgtgaccccgctttgcccgattacctcgatcaagttccggatgagttgtgccgggtgataagcattcgcgagttaatccatttgagagatgcgttgagaggcgttacacgacttgcggcggtggctgacggctacgccgccccagacggtctaatcgcgctgcaccgcaagtctagcgggttaattcacggtgtaatagatgatgctatggccgggtatcgtcatcatgggctcttggacgatcagagcttagcggatggaagggttggcgagtacggaggaattcgctacggaagcggcgaatttgagtactcgcccgatgtgcttgacgacgaagacgcggcaaggtgggcttgcgggattatggccgccaacgccatgactcagatacgttttactggccctcttgaccttgacgctcttgtttatcctgaccattgcggcgaggagatgcaagggtatgtctattatcgcgacacgggcttttatctcttcgaccaagatacgcggttgtgctggtgggaggcgatttgcgcgcaggtgcttgaggcgattatgaagggaagggcgtcgatttgcgagaactgcggaacgcccttcgttggggagcgaaaaggcgccagaacgtgctgtgactcatgcagaacagagctatgcaataaacgtaaggccaaacccgccctttagggcgtttgggatagatgcgggcgcagagcagacaaaggaggtgaattgatatggcgaaaggcgatgggagcatcatcgagaaggcgcggggcgtctgggaggtgcaagtgcccttaggcaaagaccccatcacggggaagtaccgcaagaagtcgcgcaccgtgcgcggcaccaaggccgacgccaggaaggttcgcgaccagatcaggcgcgagcttgagggcggtctgaggcccgacggcgacaaggtgcgcttcctggagttcgtggccacgttcagccaggcgcggcgcaacgccgggaaggcgtcggaagaccgcatagcgaaggacgagaagagcctgaggctgtgcggcgagcttctgggcgacccgccgctgtgcaaggtggacgcgagggccatagaggccctgtaccccgccatacgcgagcggcgcgaggcccaggggttccgatgcgggaacagcacccttcacggctaccacgtgctgttgaagtcgttcttccagaaggccgttgactacgacctcataggccgaaacccgtgcaaccgtgtggaggcgcccaaggccgacaagccgcagcggcgggcgctgtccctagatgaggtgcggcggctgctggcggcggtcgatgccgaggagaagagcgcccttgaggccctggcggccaaggagcggcgccaggcggcgtggggcgtcgcggaggatcgcggctacctgctgggaatgcgcgaggtgtgccacgtgctggccgtgcgcctgggcatcgcaacgggcatgaggctcggcgaggtgctggggctcacgtggggcgcggtcgatttcgggcgcggcctggtgtcggtggcgcggacgctcaaggccgacggcaccttgaaggagccgaagaccgaggccgggaagcgcgtcgtggccgtcgatgcggtcaccatggcgcacctcagggcgtggagggcccttcaggccgaggcgctggacacgctgtgcgtagacgtgggggaggcttccccggtgctgtgctcggcgacgggcggcttcctcagcatcgcgaactttgagcggtggtggaggtcgttccgcaccgaggcgggctttcccgatctgcggtaccacgagctgaggcacacccaggcgacgcagctcctcgcccagggcgttgacgtgaagacggtccaggtgaggctcggccactccgacgcttcgctgacgctgaactggtacgcccacgcggtgccggagaacgaccgcgcggccgccgacaggctgggcgagctgttccgcgaggagcccgcgccgtgccgcatcgtggagcttaaaagcgcctgacttttgggcattcgcagacgattcgcagatttcaggcacttaggaacgttgaaaagagaacaggccagcaagtttttcacctgctgacctgcgcaaagtctggagccaacgagcggattcgaaccgctgacctacgcattacgagtgcgttgctctaccagctgagccacgttggcaaaagtgcttcttgcgaagcggctgtttagtatagcgaactggtcgacgctgcgcaagcagccgcatgggggaattccccagatgcgcacaatgacggtctcgaagtgcaggaatttacgctggctcgagcaaccggcgttgctctttcgggtgcggctggacgcgagggggggtgccagatgtgtgaatcggctagtcggtgtcttcgctcggttaatctggaaacgccgtggggcggggcgggggagggcgctccaacgctatactggtcgccatcgaaaaaacggggagcgtgagttgaaactgaacggttcgactcgcctgcgtgcgacaatccgcgcggctgtctccccttaagagcaacgaggtgcgtgtatgagcttgaggttttcgcttgcgaaggcggccggcgccgtttcaacctgggggttgcgccatgtggcgcaccgtccggcggccaacctgccggggaagatcgcgctcaagattgatccgtcgttgctcgatgagctgcgcggcaagtgcacgcaaggttcggtcatcacggtgggcaccaacgggaagacctcgacgaacaaccttctggccgatgcctttgaagcctctggccgcactattatctgcaaccgcaccggggccaatctggccgccggcatttcctcggcgctcctgcagcagccggccgcccagtggggcgtcttcgaatgcgacgagttgtggcttgcccatgtgctgccgcatctgcactcgaactacgtgctgctgctgaatctgttccgcgaccagctcgaccgctgcggcgaaatcgaccgcatccaaacgtccattgcaggcgcgttgaccgcctcgccggacaccgtgctcgtgtacaacgccgacgacccgctgtgcgcccgcattgccgacgaggtgcccaaccgcacggtcgcctatggtctgggcgagtcgatgggcttggcccaaaacaccgtcaccgacgcccagatgtgccagaagtgcgacggcatggtgcgctaccattaccgccagtacggccagctcggcgactatttctgcgaccaatgcgacttcgcgcgcccgacgctggacttcgctgggcgcgacatcgccatcgggcccgctggcgtgaccatggaggtctgcgggccggccggctgcgaagcggtgcatacgccgcagccgacgccctatgccgcctacaatcttgtggcctcttatgccctttgccgcgaggtgggcattcccacggccgatttccagcgggcccaggatgctttcaacccgcgcaacggccgcttgcagcgttaccgtctgggtggtcgcgacgtgctgctgaacctggcgaagaaccccacgggcttcaaccagaacctgaagatcgtggaagccgaccggggccccaagatggtggccttcttcatcaacgaccaggtagctgatggccgcgacatttcttggatttgggatatcgatttcgaagagcttgccggccaaccggatacggtggtgtttgccggcggctcgcgcgcccacgatttggccgtgcgcctgaagtacgccggcatcgaggcggcggtcgtcgagaacatcgaagacgctttcgcccgcctgggggcgcttaccgctgccggcgtgctgccggccgacgctgccgtctatgctattgcgaactacacggcactgcctccggtgcacgccgccctgaacgccatggaagccgccgaacccgccgaggccgccgaacccgctgcttccgatctggcatcaccgtcgcacgctgagggcgctgaccccaaggccccttcccacgacgcagccgcttccgcttccgccaccgccacttccgagcctcccgtcgttatcgcccatatgctgcccgacctgctgaacctctacggcgacggcggcaacgtgcgcatcctggaacggcgcctgcgctggcgtggcatccccgtggaagtgcgccgcatccagcacggagaggcggtggacttctcccaggtcgacctcgttttcatgggcggcggccccgaccgcgagcagaagcttgccagcgagcagctgctggcgatgcgcgacgagctggccgcctatgtggaaggagacggcccgctgcttgccatctgcgggggctaccagattctcggtcgccagtggctgtggggcgacgagcttgtgcccggccttggcctcatcgacatggagacgcgccgccccggcacgtcggccgaccgtctcatcgacaacatggtgctcgaatctccgctggccgcccatcccgtcgtgggctatgagaaccacgccggccgtacctacctgggcgagggcgtggaaggtttcggccgcgtcgtgtcctcctgcggtcacggcaacaacgatgacgatcgcgtggagggcgcccgctacaagaacgtcgtgggcacctattcccacgggccgctgctttccaagaacccggaagtggccgactggctgctcgcccgcgctctcgagcgccggacgcagcgcaccggaaccccggccgccgatctcgctcctcttgatgatagcgccgagctcgccgccaacgcctccatggtcaagcgcctgtcgtaggagacgcttcaatgttgatgctcctgctcggcgcatccgtggcgaagttgtgggcaatctgccgtcctcctatggcttttcactggtaatggggcccattttgttgcgccgttcggcaattctttgccaaaatgttacttcgaattgagcaattcttggctttgcggcgctgtgcggcttgcggttctgcttgccaggaaacacgaaccacgaaagcgagaccttccaggatggccgaaactccaggcaagaacaacccccgcgcgcagcacgcatctcagcccacggggaagtcgaacaatccaaggcattcgcagcctgtcggcgccaacaacccccgcaactcccagcccatagggaaggtgacgaacaacccccgtcattctcagccggtggggtcgaataacccgcgccattctcagcccgtcggctcgaacaacccgcggcactcccagccgcttcccaagcagcctgccctcgagggaacggtggccgacgccatgccggtgctgcctcccatggccgagcccaacccctattcccgcggggccacgggcgacgactacgcgaaggatcgacgccgcaagaagcgcaagcgcattctgctcggcgtgctggcctttgtgttggtgggcgtcctcggcgccacgggggccgcgtgggcctatatctccggcatcgaacaggagatgaacgaggacatcacgcctgaggttgtggaagccctggaggcgccggccgaatacgacggtgacaccttctacatgctgctcatgggcaccgacaagtcggccgctcgcgagcaatcgacccagtatgccggcgacaccttccgctccgactccatgatcctcacgcgcgtcgatcctcagaacaagaaggtcaccatggtgtcgatgcaccgcgataccgagattgagatcgagggctacggtctgcagaagctgaacgcctcctatgccatcggtggcccggcgcttgccatcaagacggtttcgcagatggccggcgtgcccatttcccactatgccgagatcaacttcgacggcttcgaagaggtcgttgacgctctgggcggcgtggaagtggacgtgccgatggaaatcaacgacgacgaggccggcggccatgtcgatgcaggcgagcagaccctgaccggcgaagaggcgctcattttgtgccgctcgcgccactcttacgacgagtacggcgacggcgaccgctaccgcgcggccaatcagcgcctggtgctgggcgccattgccaagaagattctctcgaccgatccggctactatggccaacaccatcagcgcgctttcccagtacatcactaccgatttcaaagtgggcgatatcgtggcgctggccacctccatgcagggcatcgatccgtcgaaggacatctactccgccatggagccgacgatcagcgagtataagaacgacacgtggtacgagcagcttgacgtggcggcgtggaacaccatgatgggccgcgtgcgcgaggggcttccgcccaccgaggccgatgaggtcgacgagttgaacggcaccgtgctctctagcgttggcgacggcaaggcggccgcgagcgacagcgagggcgtgcagggcgcaaacggcacgcagcgccagaccttcggcgagacgcgcacgggcatcgtcactatcaagaacggcaacggcatcaacggcgtgggcgccgaggcgctcgagcgcatcaagcccctcgggtataccgccgacgcctccaacgcgaacagcttcagctacgaggagaccgtggtcgtcttcgatacgcccgatcagcgcgtttacgccgaggagctcatcgacgccctcggctgcggccgcgccgtgcagaacactgacggcgagtacgtctacgacggcgacttcctcatcctgatcggtagcgattggcagtagtggggttccgcccgccctgcgggacgggcggacctaccgatgctgcggttccgacaggcacctggccttggcccttgttttgggctcggcgcggcacaaaggccgcttggcccaaaggcgggccaattccaggcacctgccgcaacctcgctgacttccttgggcgaacctgtggtaaaacagggaatggtgtatgttggcatagatttctggaatcgacccgaggagtcccatgcgatttgtttcgtggaatgtgaacggcattcgtgctgtgttgaagaagaacttcctggaggtgttcgacgccttcgacgcggatatcttcgccattcaggagacgaagtgccaggtcggccaggttgagctggatctgccgggctaccaccagtactggagcgccgccgaaaagaaggggtattcgggcacggcggtgttcacccgcgaggagccgctgcgggtactgcacggtttgggcaacgagtacctggacgccgagggacgcatcgtggcctgcgagtttccccagttctggttcgtgaacgtgtacacgccgaactcccagatggaacttgcgcgcatcgaccaccgcatggaatgggacgacgcgttccgcgacttctgcaaggggctcgaggccggcgtgctgcccgacggcagcgccagcgatccgaagccggtggtgatgtgcggcgacttcaacgtggcgcatgaggagatcgacctgaagaacccgggccccaatcgcggggcgtcgggcttctccgatgaggagcgcgggaagttcaccgaactggtggacgccggcttcaccgacacgttccgcctgctgcaccccgacgagacgggccgctacagctggtggagctatcggttccgcgcccgctcgacgaacgcgggatggcgcatcgactacttcctcgtgagcgatgagctgcgcgataaggtggtggcggcgagcatctacgacgacgtggagggctccgaccactgcccagtcggcctcgagctcgacctcgactaaatccattaccgtaggctgattccgtaggggcagcccttgggctgcccttgctcccgacaacggcgccgctcggagccaagggcggcgcaagcaccgcccctacgcaaagagtcaccaagaaaaggaatccatcatgctgaagataaccgtcgttgccgtgggcaagctgaaggagaagttctgggtggcggcctgcgacgagtacttgaagcggctgcgcccctacgcgaaggtgaccgtggccgagattcccgatgtcgatccggcgcgggccggcggtgtggaggcgactcgcgagcgcgaaggcgcaggcattctggcggccgtgccggagggggcgcacgtcatcctcatggccatcgagggaaagcagcgctcgagtgtcgacttctcccgccacctggacgatttggctctgcgcggcgcaagcgagctcgcgttcgtcatcggcggttccgacggtgtgagcgatgctgtgcgcgcccgggccgacgagacgttctccttcggccccatcaccctgccccacaacctggcccgcgtcgtgctgctcgagcagctctaccgcgccttcaaaatctcccgcggcgagccctaccacaagtagggtctcttctcgacgtccagtcaaaagtgggaaagcgttgtgcccagttttgggcagaagcccggctgccctcttcctatactggcctcattcgccaagagggggcgcaatcatgagggatgaacccttctctttcaggcgatttagcgttgcaatgcgcatcgctgctcttacgagagaaagaggaggagtatggaagagaaagagcaattcgctcccgctgagatcgtgaaggacggcaaggtcacgcgccgcaccttcgtgaagggcgcgggatggctgaccatcacgtccgccatcggcgccagcgcccttggctgcgcaccgtcgaagcagggcgccgaggaggagcccctggccgagaccggcccggtggccgatcccgaggagggcttcacctacaagagtgcctgctgctcggtgaactgcacctcgcgctgccaccttcgcgctcgcgtgaaagacgacaagatctacaccgtcacccccggccagatgcctggacgcgacgactacgccaactgctgcctgcgctccatcggcttgggaacgcgtactcacgatgagagcgtgcgcgtcatgcatcccatgaagcgcaccggcgagcgcggcagcggcgagttcgagcagatcacctgggagcaggccatcgacgagatcgccgagcgcatggaggccaccaaggcgcagtatggccctaaggcttgcggcttctactcgttcacgggcaacctgtcgaagctctcctgggaggcacccacccgttttgctggcacctatggcgccaccgccttcgacatcgagggcattatgggcgaccatggcgccaccatgggcatgacgctctgcttcggccagggccgcggcgcccacgacacgcgcgactacctgaactccaagatggtggtgctctggggccgcaacgtggccgacacccacacctccgagttccgctacctcgtgaaggctcgcgagaacggtgccaagatcgtcgtcgtggatccgcgcctgtgctccacggcggccatcgccgatcagtggatccccatcaaggcccaaaccgacccggctctggccctcggcatgatgaacgtcatcatcagcaaggacctgcacgcgaaggactggctcgtcgcgaactccgtggcaccgttcctcgtgcgcgagtccgacggcgcgctcttgcgcgacggcgagggcgaggacgccgcctggatggtgtgggacacggccgcgaaccaggcggtgcccaacaccaccgagggcgtgacggccgcgctttccggcaccttcgaagtgaacggcgaggcgtgccgtaccgctttcgaccacctgtgcgacgaggtgtccaagtacaccctggagtacacctccgagatcaccgggctggatcccgaggtcatcgaggccttcgccatggattacatcaacgcccagccggctggcattcgtatgggtcagggtatgcagcgcgtctataactcccactcgcccttccgcactgtggccacgctggccgccgtggctggctacattggcgtggaaggcggcggtgcgtcccacgcgggcggcacggcgtccatccgctcgacccccggcgtcaccattccggcgtttaactatgacgagtgggccgacacgggcgccaacgaggtgaacatggtgaagagctcgacgctctacgaccagatcatcaccaaagaccccaatcccatcgacttcatgtggttcgcgaactcgaacttcatcaacatgagccccgatgccaacaagatcatcaatgaggtgctgcccaacatctccaccatcgtgacggtggatccctactggacctggacggcgaagtactccgattatgtgctgccggcctgcaactactgggagaaatgggacttcctcgatcgctcgccctgggtgttcttccagagccccgcggtgacgccggctggcgagagcaagtccgacgtcgagatcatgtcgcttctcgcggccaaggtgggcctgggcgatttgtggtcgaagaccgacgaggaatgggtgcgcagcttcgtgaacgaggagcatccggcttgggagggcttcgatttcgacaaggccgtggaagagggcatctggggacgtcccgacggcatctacgactcccagattgtcttcgccgacggcgtgttcaagacgccttccacgaagttcacgttctacaacgacgacctggtggaattcgaggaggaagtgccctgctacaagcccatgctggaggatccgaagggcccgctcggcgagaagtacccgctcgtgtttctgcagtaccacgaccgcatgaacgtgcacacccagcacatcggcattccggcgctggcgggcattcaggacgagcctctgctggagatgaacccggtggatgccaaggcccgcggtattgccgacggcgacgtggtgagtatcacaaacgatcgtggcgcctgcaagatgaaggtgtttgtcaccgagggcatcgtgcccggtacggtggccacccaaagcggctggactcccgactacaccattgagggcaactaccagacgctgacccacttgacgttgaaccccacagaagagcacatttcccagacctgcacggcattctacgacgtgctggtggaagtagagaaggcgtaggtgcgacatggctaagcaatatggaatggtgatcgacacgactcgctgcatgggctgccagacctgcgcggttgcctgcaaggtatccaacgacgtgcccggcgagctgtattgggcccatgtggaaggactcgagggcgatctgtaccgcccgacgggcaccttcccgaaggtgaagatgaacttccgccccacgctgtgcaaccattgcgccgagccggcttgcgtggccaactgtcccaccggcgccatggcgaagcgcgaggacaacggcgctgtggtggtggatcaggacgtgtgcatcgggtgcggcacctgcgtgaactcgtgcccctacgaggtgccgcagattgacgaggaggccggcgtgtcctcgaagtgcaccctgtgcttcgatcgtctggacaacgaccatcgtccgtggtgcgtgcaggcctgcccggccgaggcccgcatcgtcggcgacctgaacgatccggaaagcgaagtgtcgaagtacatcgccgagaagggcgcggtgccttatttggaagagaacggcacgacgccttcggtctattacgtgtaagccctccctcccataggggcagcgaccgagtgccgctgcccctcttcgcttcgagggaaggcgctttggtacaatgaggtcgcggacgcgggggatcggacgcgagaggggaggggaactatgacgtggacgggaaagaacgaggtgctcgacgaggtcatcagccgtgccgagctagagcgcatgcttgacgaggcgggcgccacttatacctcgcggcgcattccggccggtgccatggtgttctggagcggcgagccggatggcaaccattactatgttgaaagcggctcggtggagctgtacggcgtcgatgccgctgggcgcaagaaagtcatcgaccgctacggccccggcatgttcttcggattccatattctgcgcgataccaatctgacgatgtcgacggcgcagtgtttggaggacagtcgcattctggccattcccaaggaatcgttcttcaagttgcttcgcggaggctcggatttctccgaatactgcgtgcgctatttgttcgggcttttgtccatgcagaccaatgagatgctgaaccagtcgttctacgtgacggcccaacgggtgcccatgctgcttgccaaattggcggctgagcgtcttgcagaaggcgcggcgcagcaaacggtggtgcttccctacagcaacaacgacatcgccgacatgctcggtgtgagccgcaactcggtcacctcggtcatctcgcgcttgcaggcccagggggtcatcgagaagcagcgcagcgccattcgcatcatcgatgcgcagcgtcttgtcgagattgcccagctcgagcaggagtagggcgccatgggccggaaacttgccccactgtttttcgccgccttcctcgcttacggctacaacaacatcttcatgacgctgaccccttcttttgtggtggccgcgggagggacattggcggaagcggggcttcagaacagcgtgtatctggccgcggcggtcctcttgcgcttcgccttcggcccggcggcggatcggtggggcacgaagccggtcatgctggtgggccttgcatcgtttgtgctcgggggcgttctgttcccgctgtgtgtcgagttttggcagatgcttttggtgcgctgcgtgcaggcggttggccttgcttctttctggtcgtcggccacagccaccgtttcggaggcggcgccgccccaggctcggggccgctggctcggcctgtatcgcctgacgacctccgcttcgcttcttctggggcctcttgtggcgttcggactcgtgaaggccgcggggttcgccgcatgctttcgagtgcttgctggatgctctgcggtcgctttggtttgcgttggcgccatgaggctccctcgccgccatcggtgcgagcgacttcgggtagcgtcgccctgtgcgaagggctcgtttcccctgtctggagttgtcggcatagcagtggccgggacgtttgtcgccgccatgggatacggcttgttgttcagttttggaggcaccttcatctcagccgccggaatgaccggaaacgagggatggtgcttcacgcttattggactcgggggccttgcggccaatcccgttgccggtatcctctgcgattgccgtgatgcgcgccggttattcggcgtccatgggctgctcatggggatgggcgttgcgctcttcgccgtggcggcatcgtctttgccagccctggtcgtttcggggctttgcatcggctatggctatgcgggcgccatggtgtgcgcccaggctatgattgctcgccaggtggcggaggggcgccaagcgacggcgcttgctctgcagcagaacgccatcgatgtcggcatcgcctccgcgagcgctctgtacggaggcgtgttctcggcgctcgggccttccgcagcagagccgtttctctttcaagcatgttttgtgacgatatgtggagttgtcctcgtggccgtgcgatcgggttctcgtgatgattcaaagggctcttctgcttgaaaaacgacgggtagcgtagttctgcaaacagaaggggcggccactgatcagcatttccccaggtcgcatttctcgaaagaggggaaagcgggcgtagcaactacgctacccgtcgttttccaagcagaaaccacccgcgaggcgagcgcacgaagcgagcggcgtcttacttcttcacgacttcgatggccacctcggccggggcgggcagctcggcggtgcagtgggggcagcgggtggcgcccacgttgatctcttccaggcagaaggggcaggtgggggcgtgctcgatgacttcctcgcccttggcgttcttcatgaagggcagcttcgccgtgccgtccttcatcttgttgaaggccttcacgatcatgaacacgacccacgccacaatgaggaagttgatgatggcgctgatgaacgcgccgaaatcgatgccgttctcggtgccggcgacggggatggtgagcccggcgacatcggtgccgttgccgcctgtgatgagcttgatgagcggattgatgatgtcgtcggtcagcgacgtgacgatggccgtgaacgctgcgccgatgatgatgccgacggccatatcgatcacgttgccgcggttgatgaattccttgaactcggccaggaggcttttcatggtcgatcccttctcgcgcgaaaccttctgccaaggtattatggcgctcttttgccgtgtgtccatagcgtcgtgataacatggcgccaaccgtttacaaggagttacgacaaccgtggatacagcgaaaatcgaagcaggcgtccgcctgattttggaaggtgtcggggaagaccccgagcgcgaggggctgctggacacgccggcgcgcgtggcccgcatgtacgaggaagtgctcggcggcctggaggaagatccggcgcgtcatttcgatgtgaccttcgatgaggggcatgaggaaatcgtgctggtgggcgacattccgttctacagcatgtgcgagcaccatctggcaccgtttttcgggaaggcgcacgtggcctatgtgcccggcaaggacgggcgcatctgcggcatctcgaagctggcgcggctggtggacggcttcgccaaacgcccccaggtgcaggagcgcctgactgggcagattgccgatacgcttgtggaggcgctgcacccggccggcgtcatcgtggtgctggaggccgagcacatgtgcatgagtatgcgcggcgtgaagaagccgggcgcgaaaacgaccacgcgggccgtgcgcggctgcttcgaaaccgatgccgacgcgcgttccgaggcgctgtcccttattttccggcattaaggcgatggccgcgctgtgtcgactgagcgcaagggcctgcctgtgtcatcgcggacgagcgcaaggcgtctgattgcgtcatcctaagcgagtgaagcgagtcgagggattccccgacgacccaacgagaaagaaggttttccatgaagtgcgtcatctccgtcctcggcaaagaccgctccggcgttgtggccgctatcgccaccacgctggccgactgcggcgccaacatcgacgacatctcccagacgattctcggcgagggccgcatgttctccatgaccatgatggtgacgctcgattccgccgtcgccgacttcaacaccgtgcaggagcgcttggccgccgacggcgagcgcctttccatgcaggtcctcatccagcgcgaggacgtcttccaagcgatgtacgagatttagaacgccgcttcgatcctgcatgcgctcggcccgcgctggggaagaattgccgctacggatgcgtgtcgacgggcgattgcgccgcgactgtgccgccgcccgaaattcctgctgcgcgccttcttgatcgttgccgatgtccatcgccagcgcttgaggcgtcgctaaagcccacgcgctcagaacaaaaaaagcacattttccaagacgtcgtaccggtttttgctcggccgtctatttgattaccgagaaatgccaggtcagcgagttgcatcccgagctttgcttctgagcgatttggaaaatgtgctattttggaagcgattacttggaaaatgtgtttttctgtatcgccgatttttgcacgtacccgattttgtccattatttcacaatttccaaaactgacgctgaaggaagccggaagagagggcgctgaaacgtgcgtcgccctcttggcgagacgttttctcctccagccacgtttcgtatcctccggaactgcagatggtagaatgctttccacaaatatgcgtaatcgaaggcaaatagggacggaagatgacccgaatttacacatgcaatgtgcccattgaggcggatctggtggatgcgttctgctggctgcagaaagggttcaccgaccagttcgtttactacgataagcagcgtgcctgccgctacatgggactcggccgctgtatcgcgctgcccagtttgcgcgatgtggaatacgagtacggcgagggcagctcgctgcacgaggtcgcaactggtgaggctgccgccgatcagccgccggtgttcttctcgttcaaccgtttcgacgccaccaatcccgctccggccgacgagctgatggcgtcgttcccgcggctgcggttcatgctgccggaaatcgtgctcatcgagaacgagcgcgggcgcttcttgcaggtgaactcgctgggaccggtgtaccccggccgcgtggcccgcttcacgcgcatggtggcttccgcgccgccccgccagcgtgcagccgttccgttcgcgctggagcccgattcgcgcgaggcgtgggacgcggccatggacgcggcgcttgcggccataggggagggtcgggtgtcgaaggtggtgctctcgcggcggttgcgccttgtggccgagcatcccttctcatcgaaggatctgctcgtaaacctcatcgacggcgatgcccgcggcacggtgcttctgtaccgttacgccgacgtcttcttttgcggctgcacgcccgagcttctcgtgcgtaaacgcggcgatgtggtggaatcgatgtgcctggcggggacatgtcctgccggagctacggcggcggaatcggacgcgctggcagaggcgcttttggccgacgggaagaaccgcgccgagcacgattacgtggtgcagctcattcgcagcgttcttgaccgcgtttgctacgacgtcgatgttcccgccgtgcccgagatcatgcggcttgcccacgtgcagcacctgttcgcgccggcccgcgcccgtgtgctcgctggcatcacgctggccgacctcatggaggatctgcatcccacccccgccgtggctggcacgccggtgggggaggcgaagatgctgctgcgggccatcgagccctacaaccgcggattctatgcgggagcctgcggtttcgtggacggcgccggcgacggcgagttttccgtggccctgcgcaccggcgttttcgacggcgagatgggctatgtctacggcggctgcggcatcgtcggcgagagcgatgcggacgccgagtacgaggaaatcgacctgaagctgcgcaccatcctttccgctttcggcgcgtaacctcttgctgcgcggttcttggggcgcgtttcgtgcgctatcatggacggacgaaacgcgcgaaaggaagtggcgatggccataacgacgactcatcagcaggatacggcgctgttcgtggcggcgttcttcgacgagatggtgcgctggggcgtgcgcgaggtggtggtgagccccggctcgcggtcgacggccttggccatggcggcctacgagctggagcagcgccgaccccaggatctgcgagtttatgtggatatcgacgagcgcggggcggcttttctcggcctgggccttgcgaaggcgagcggccgccccgtggcgctcgtgtgcacctcgggcacggccttggcgaactactacccggcggttatcgaggcggaaacgtcccgggtgccgctcatcgtgctatccggcgaccggcccccgcagctgcagggcctcggcgcgccgcaaaccacagaccagctgaaggcctatggcagtcacgtgcgctccttccgcgccatgcccacgccgcgcggccgcgaccgcgacatcgccttcgcccgccaggcggcccgcgaggccgtgctcgccgcgcttggcccgacggctacgctggctccctaccgcgagccggcgccggcaaaggaggggttgcgcgagtccgcgacgaccggtgtgcttgaaggggcggattctgcggtcgcggcggcttccctcggcaagcatgctgctgtttcagctggctccggagccgccgcgctgccgacggatcctgctgccaccgttgcgctgccgatggatcctgctgccaccgtcgcgatgccggcgaattccgcgatcgctggcgctcccgccgatgctcccgcgcgggatgctgctgacgactttgcgggcgcagccgctgaagaggccgattctttccagccgatcttctacaacggggccggcgacattgtgaactacaacccgaacgtgcaggtggcttcccgtgcctgtatgcacctggccggccccgtgcacgtgaacttccccttcgatgccccgctcaagcccgatttcgctggcgccgatttgcaggccatgcagcgcgccgctcgcgattgcttcgctctgggtgcccgcaatgccagcatcgccgcgaaggacggcgctcttctcgatttgggcccgcttgttggctctgccggcacattgcccccttcgagtgtcgaggccatcgagcgccttctgtggaaacgcccctctttggtgctcgccggcgagggctcctgtgagactgtggccgaggcagaggagatcctcgcctgggcgcgcaagctgtcgctgccggtgcttgccgatccgctgtcgggcctgcgctccatcgacgacccgcttattatcgacaactacgacaacctctgcgctcgcgccgactgccccgtgcccgaggtggtcatccgcttcggtcgctatcctgtctcgaaaagtgcaaccgctctgctcgagcgcgtgcgtcccgtctccctggccgttgatgttgccgagacgcgcgatttcaacgcggcgacggacgtgttcgtgggcacgacacccctcgggttcgtgcgcagcggatggcgcgccgagggccgcaaggcccagcaccgcttcgctgatgcctgggtcgccctcaacgacgaggcgcgcctgcgcattctcgccgtggaatgggacggcgtggccacccacgattccgaggccgcggaaggcgcctacgtgcgctcgcttctggagctggcgccggaaggctcgtgtctcttttcggcgaattccatgagcatccgcgccgtggacaccttctacgtgaaagacggcaagcccctggccgtgatggccaatcgcgggcagaacggcatcgacggcgtggtctcgacggcggtgggggtggcgcagcacttcgcccagacgacgtttctcaccggcgacttcacgctgctgcacgacctctccggcctggcgctccagcgcgagatgctgctccagcgccgcggacccgcagggacgccgtcgctggtcatcgtgcttctgaacaacaacggcggcgccatcttcgacatgctgccccaggcctccgccgacccgtacttcgagcggctgttcctcgcgccccaggacgtgcgcttcaccgaggctgccgccaccttcggcattccgtcggccagcgtgcacacggtcggcgccttccgcagcgcctacgagcagttcctcggcacgccgggcatcagcctcatcgaagtcgccctgcccctgcgcggcgttcgcgaccgttacgccccttatcagcgctaatgatggtcgctgtgaagaccgcgattccaacaaagcccccgtacgtcttgctgcacggtttcgcccaagcaccggccacgtggggcgaggtggcgcggcggctgcaggcggccggtcaccgcacctatgcccccgacttgtacgagggcaagggcgatctcaagctgtcgagctgggaaggagcaggggagggcgagaaagagacggaaggcggggaaggtgacacgaatgctgggggcatcgcggtagcggagcgcgacccgctgacctccctggaggcggtgtgcgaccgagcggcagccatcattcggttaatcgctcaggccgatggcgcgccggtgctcgtcggctattccatgggcggccgcatcgccgccgaaaccgtagtgcgccatcccaatttgccactggcggggttggttttggaaagcgcggggctggggccgtccgacgaagcggcccgggccaccttggccgagcgtaacgccacttgggcccggcggcttcgcgaagagggggtcgttgccttcatggactggtgggagacgctgccgctgttcgccacgcagcgcgaccttccgtcggaggcgcgcgccgccatccgagccgagcgtgaggcccacagcgccaagctccttgcccgctcgctagaagcctggggtgcccaccaccaagccgctgaagcggctacgctttctgccgtctccgatctggccaggcaaggcgttccggtgctctacgttgccggagcccttgacgagaagtacgccgcggtagccgcccgcgcccatgctgccggcattcctgtggtgctcgttcccaatgtcggccacaacgtgcatcttgaatccccctccgcgtttggggggatcgctgaaggtgttctcgctgaaggcggttttgttgaaggcgccctggcttgaaaatcacgaaagatcggatatcaggctgaaaagggatctttctcgtactttctaagtcacgtgcgcaaagccttctcgccggcttttctaaattatgagtcacaaacacactttattatgctaaagtgtcggccatgattttcgttcagggacataaaggcggcatggacgcggcggcgctcgccgtggcaagccagcacatcgcccagcagtcgtgcgatgcggtggcctgcgccctcatgagcgcgcacaaggctgcccagtgttgcaccgacgcggtcgagcgtgcgctggccagtgcgcacaaggcggctcagtgtatcgctgaggcggcccgcgctatcgccagccagcacgaggcccagcagtccctgcgcgaagtctccccacaattcgagttccgatacctttagcacacgggttttcgcccgtggctatttttttgtagccaagggcgaaaagtcgtgtgcgccatcggacgtatccgcgcaacgaaaggaaagtagaaggacatgatcgcgaaaattctcttggtaattgccttcgtggccgtggcggtggcggtgggcatctactgccgccggcacacgggcaccgtggacggcttcattctgggcggccgcaacgtcggcccgtggatgagcgcctttgcctacggcacgagctacttctcggctgtggtgtttgtcggctacgcgggccagttcggcttcaagtacggcatttcggccacctgggccggcatcggcaacgccatcatcggctcgctgcttgcctggtgggtcttaggcccccgcacccgcgagatgacccatcgcttgcaggcctccactatgccggagttcttcggcaagcgctataactcccgggcgctgcgcattgcggcggcggccatcatcttcgtgttcctcatcccgtacaccgccagtgtctacaacggcctgtcgcgcctgttcggcatggccttcgcgctgccttacgacgtgtgcgtcatcggcatggcggtggtcacctgcgtttacgtggtgctcggcgggtacatggccacggttatgaacgacttcattcagggcatcgtcatgctgctcggcatcatcgccgtcatcgtggcggtcatcctgaacaacggcggcttctccgaagccatcatctctctgtcccagattcccgccgagggctcggccatgcagggccccttcgtcagcttcttcgggcccgatctgttcaacctgctcggcgtggtcgtgctcacctcgcttggtacctggggtctgccgcagatggtgcagaagttctacgccatcaaaaccggtcccgccatcaagcagggcgccatcatctccactatcttcgccttcgtggtggccggcggctcttacttcctcggcggcttcgggcgcctttacgagggccagatcgagtacgccgccaacggcacgcccgtctacgactccatcatcccgacgatgctgtccacgctgcccgacgtgctcatcggtctggtgatcgtgctcgtgctgtcggcgtccatgtcgacgctctcgtcgctcgtgctcacgtcgtcttccacgctgaccatcgacttcatcaacggcaacatcatcaagaacatgtctgagaagaagcagctcatctggatgcgcggcctgctcgtggcgttcatcgccatctccgcggtcatcgcgctgttccagtatcactcctcggtggtgttcatcgcccagctcatgggctactcttggggtgcgctggccggctcgttcctcggccccttcctgtggggtctgtactccggacgcatttcgaaggcgagcgtgtggtgctcgttcgctgtgggcgtgggtctgaccgccgtgaacatgggcctggcgctgtccggtggcacgccgcttatcgcgagccccatcaactgcggcgcgctgtgcatgatcatctcgctggccatcgtgccggtagtgagcttgttcacgccggcggtgtctttccaaattaagccgccgaccaccgaaggtgccatcgaccgcgagtacgaccgcgagctcgcccaggaggagctggaaagcgccaccgccagcgccgctgccgacgcataaggggcagcagccgcaactgaagaagagaaacctggaaagtcccgtgtgatcgcgggacttttctctgactaactcggatatacttatgctgttctgtcaccagaaggccggggggcagggcaccggcgacggccgcgtttcgttgtcacgcgaagagcgctcgcaacgttcgcattgcgtattcgtgcgcagagagctcgcaacattcgcctcgcgcattcgcgcaccgagtgctcgcatcgcactccggcgtcgtgcgttcgcgggtgtcatgccctcggcctcttgaggaaggaaggtcatggaagggttcgaactcattgccacgggcctgtggtccattgtgccgccgattttggcactggtcctggcgctcatcaccaaggaggtgtattcgtcgctgaccatcggtgtgttcacgggcatgatcatctaccagttcacactgaacggcgtcggtggcgagcagctcgtcgcctcgttcaccatggtgccccaaatgatggccgagcaaatagccggcaacggggcgttgctgctgttccttgcgcttctgggggcgcttaccgtggtcatcgctacggccggcggctcccgcgcctatgcggagtgggtgaccacgcacgtgaagaacgcccgtgccgcctcgatcctcacggcgctgctcggcatcatcatcttcgtggacgactacttcaactgcctcactgtgggcgccgtcatgcgcccggtgacggacaagttctgcgtcagccacgagaagctcgcctggatcatcgactccacggcggccccggtctgcattatcgcgccggtatcctcgtgggcagtggccgtgggcggctacatgggcgaggacggcttcaacaccttcgtggcctccatcccctacaacttctacgcgctgctcaccatcttcttcgtgttcttcatgctgttccttcagaaggacttcggccctatggccgcggctcaggccgatgccgagggccgcattccggcggagggctcggcgcttgaggcggtgtccctcgcccgcatcgccgacaaggcccaggtcgatttggaaggcgcgccgaacattcccaccgtggtgaccgaggagggcgacatcgacgatgccgccgccggggccatcgaggagtacaagggcctgaacatttccgatcgcggcaccatttgggatctcatcgtgcccatcctggtgctcatcgtgttctccatcctgggcatgatgtacatgggcggcttcttcagcggcgtcgatttcgccacggcggtcggcgagaacccggtcatgggcctgtgcatcggcgcggtggtggcgctgtgcgtggcggcggccatgttcctgccgcgcaagctcatgaacctgggcggtttcgtggaggcgatgtcggaaggcgtgcgctccatgatcggcgccatcatgatcctcgtgctggcctggtcgctcggcggctgctgccgctatcttctgggtaccggcgagttcgtgtccggctttttgaacgggctgggcgtggggctcgaccttctgccggcgatcatcttcctggtggcggcgttcatcgggttcgccatgggcacgagctggggcaccatcgcgctcattctgccgatcatcatcggcgtgttcgatgccgctgacccgctgttcctcgtggccgtgggctcggcgctggccggtgcggtttacggcgatcatatctcgcctatctccgatacgacgattctgtcctcggccggtgcgaagtgcaaccacctgcgccacgtggccacgcagattccctacgcgaccctggtcatgatcgtgtgcttcgtgggctatgtcatcgctggcttcacgaagagcccctggatctcgctggcgctgggcgtagcgctcatcgtgatcgccgtgctggtgcttacgcgcatggaggcgtcgaagaaggcgaaggcatagcgaagacggccgaccgtgcagctgcgcctgtgaaggtggctgcgggatggcgcccaggcgatgcgatcacaggtgcggtcgcatcgcctgggcgcatacttactagagcagaaagggccttgtttttcgtcgttttttgcgtttgttagcgctatgagcacgttggtccaagagctaagaaaggggatatgcaatatttcataagagaataaatgaaatagtatatatcaaatttccaatgatctgaatgtggccttagcgtgcaggaacagagacacttccgatgctaacaaacgcaatttttgccaaattatcggtagagaaatcgtctggcgaatggcatggggagggctccaccatggagccctccttgctctgatgcaattatggaatgcgatgggccgtccgctgtgcggtcgcctacgccgccgcagcagcttcggcgagcaggcgctggctctcggcgatgaggcgcccggccagaaattccttgcccatggcctcgttctgagaagcgtccagcagcatttgaagcgtgatgctgtcgaagtaggcgtcgtagccggtgagaaccagattgtacgcttgcttgatgccctgcaccatggacgcatcggcgcgatccttgcgacgggtgcgcgtcgtgtccttggcgtcgtcgtccagcgcgttcaccacttgcagtagggtgatcttcgaggggtcgttggccaaacgatagccgccgtgcttgccgggcctcgcctcgatgatgccggcattgcgcaaaagctgcgcgagctgaatgaggtagtcacgggggatcgacatgtcctgggcgatatccttcgacgagcaggtgtgcccctgcgcggccaggtacaagacggcgcgcagtccataatctgttgatgctttgaattgcactgcagcctcctaacgtgtgaacgcctacgggtctgcagcttgcgctccatcgacgcgaacgaacggctcgtgccgacgttgcgtcacccgcaggtgtgtcgggagcggtcctttttgttcccggcacttagcagtatgcgagccgcaaaacgcaaatacaagggatgtaccaaacgatgagcgcaccgattcgcttacgtaaacaccctgttgaattcagtaatcgatgagcgtttaagtggggaaggggagcgcaaggaagctgacaggagaggctcggcgggcggatggagcggacggaacggacggctatgcgagccccagcacctgcatcacgagcagcgccacggtgagcgccgccaccacaccgacggtggcccacagaagcaccttcgacacgcgtccgcttcggtagtcgcccatgatgtacttgtccgccgagatgatggccatgagcgccagcagaatgggcaaaatgacgccgttgacgaactgggccgtcagcatcatgcccaacagattcacatcgggaatgagcaccacgatggccgagaacgcgatcacgaaggtgaagatggatttgaacgtgggggcctcgcgccacttgaaggagacgcccgcctcccagccgaaggcctcgcagatgacaaacgccgtcgtgaggggcagcacgcaggcggccagaaacgacgccgcgatgagccccacggcgaagagcgcctcggcataggggccggcgaagggggcgagcgccgcggcggcgtcggcggccgagtcgatagtgatgccggcggggaagagcaccgcgcccgtggtcacgatgatgaaccaggccaccacgcaggcggcgatggtgccggagacggcgtcggctttctgcgagaagaggtctttgggggtgaggcccttttccaccacgttgctctgggagaagaacatcatccacggcgcgatggtggtgccgatcatggcgatgacgagcgagatgaagctcacgtcgccgacgaaggtgggcactacggtgtcgtgcagcgcctcgctccagttcggttgcgcgaggaatgcggccaccacataggtgagaaacaccagcgacagccctaagaacacccgctgcacgcgcttgtaggagccgcccaccacgagcagccacacgcccaaggctgccacgggtaccgagatgtacttcgacacgccgaacatctccatgcccgaggcgatgccggcgaattcggagaaggtcgtcgccacgttgccgatgagaagcgccagcatggcgaaggcggcgatgcggatgccgaagcgctcgcggatgagggcggcgaagcccttgcctgtgacggcgcccatgcggccggccgtggtctccacgacggcgagcagcacgcacatgatggggatgacccacagggtgccgaagccgaagttcgcaccggccgtggaataggtggagatgccgccggcgtcgttgccggccatggcggtcacgatgcccggtcccatggccgccagcaccagcagcagcttcgacggctttttcgtcgcagcggggccgatctgctcgccggcgggaatgcccgtatcggcgatctcctcggctgcctggtgccgcgtgctctcttcggcgcccaggcgcccggcggccgtcgtgcggatgtccttcgcgttcatgacagcctcctagtagtgcaggccgccgagatgcagcgagcccgccagctgcagcaaaatcagcgagtaaaggaacaggcccatgagagacgcaacggtaatgccggcaatcgacagcacattcatcttcgtcttgtcgcccgccacgtcgtcctcgatggcgtcccaggcgtcgtcggtggtgacgatgccgagcagggtgccgtgctcgtccaccacgggcatggccgggatatcgtacttgaagatgtcggcggccacgtcctcctcttcctcggagggaagacagctgatgatgtcgtcgtacatgatgtcgcccatgaggcggtcggcgttgtacagcacgagcgtgcgcagggagtttacgccgagcagcttgccgtattcatcggtgatgtacacgtagtgcaccgtcgggtgatcctcgggcagcgcgcgcagcacttcgatggtgtcggccacggtggcggttttcggcacggccacgaactgggtggtcatcatgccgcccgcggtaccgtccttgtagccgagcagccggcgaatttccgcggcgtcttccacgcccataaggcgcagaagggtctcggccttctcgtagggaaggtcgcgtacgatgtcggcggcgtcgtcggggtccatgttgccgatgagctcggcggcccgggcgtcgggcaagtcgtcgatgaactcggcctggtactcgtcttccatctcggagatggcctcggtggcgcggctgtcatccaggtgcgcgaacacgctggcgcgctgctggggatcaagctgctccaggatgtcggccacgtcggcgggatgcagctcgtccaagcggcggtgggtcaccgacagctgcacttcggacaggtcgcggtcgagcaggtccatgtagttccacgcgatgagctgctcgtccaccttcttgtggaagagcttcgccacgttcacgacggccttttccagcagcggatgcagcccgcgcaggatgccgcgcacgcccacttcggcgccgagcaggcgcagctgcgtgccggactgcgaaagcttaaggtcgttcacgcgcacgaccttaaggccctgggtgtcgacgatctggcggtccataaggtcgcgggcgagcagcacctcgtcgggctgcaggtagctgaagcggatgtcgtgggcgtccaccgacagcgtgatgccgtcgtcgtcgaaggtgtcgacgtacttgcgccacgagatcatgaacggcacgcgcccgggcccctggaaggccaggctcgtgatgcgcggaaagacctcgccggtggaaatggccaggtcggatatggtgccgagtcgctcgccttgggcgtcgaccacgggctcgccgatcatttgagaaagatagagcatgcgtgttcctccgtgcggtaggcatcagcgcatcggaatggggcggcgtgcgcgagtcgctgactctgcgagattaagcgcgatgacgcccagggcgatgggtgatgctcagcagtcgtcccttccgacgaccgcgcggaggcgagaagccggaagtctacatactgtgaggtttcgattttcgaaccttcaagtacgttcctttccttggcctgacaaaaaaagaaccgctcgaggcggcttctattctgttctgaacgatctaaaatggtgcgccgtgagggattcgaacccccgacgtactgattcgtagtcagtccctctatccagctgaggtaacggcgcacttccgaacagcaacgattatttaaccatgaccccaaagccttgtcaacgagaattttcaacttttttgaaaatgcgccgttcgccgtgcggagtggcggtcgtggaagcccccgcgcgccccgccttgtgcaggcgttagaatagtccgatacccgtgtagcgaccatttttccgggagggtgccccatggccatggaaatagatgaagccgtcatccgcgtggacaaccatgccgaaatcgacgaggtcgagcccatcgagatcagcgacgacgaggctcgccgcgtgcgcctgtacgagaacttctaccaggtgaacgccatcgatccggcgctgtatgcccagcacgacgtgaagcgcggcctgcgcaacgccgacggcacgggcgtgctcgcgggcatgaccaacatctccaacgtgcacggctacgtaatgtccgacggcgagaagatgccggccgagggctcgctgcgcctgcgcggctacgacctttacgaccttctgggcgatttggacccgacgcgccgcttcgctttcgaagaggtggcctatctgctgctcatgggcgagctgccgacgcaggagcgtctcaaccgcttcgtggaagtgatcgattcccagcgcgagctgcccgacggattcacggccagcacgcttatggtggacacctcacccgacctcatgaacatgatggcccgctccattctgcgcctgtacgcggccgacgagtccgccgaggaccgctcgcccgagcacgagattcacacggcgctctcgcttatcagccgcctgccgcgcatcatggtgctggcctactacgccaagcaggccgcctttaaccacgaatccatgatcatgcaccgcttcgtgcccggtcagtccacggccgagaccatcctttccatgctgcgtcccgatcgctcgttcacggcggaagaggcccgcatgctcgacatcatgctgtgcctgcacgccgagcacggcggcggcaacaactcgtccttcacgacccacgtgctctcctcggcggacaccgacccttattccacctatgcggcggccttcgggtcgctcaagggccatcgccatggcggtgcgaatcaccaggtgcgcgccatgcaggcggagatcaaggaaaacgtgaagaactgggaagacgacgacgaagtggcctcctacctggcgaaaatcgtgaacaagcaggcctatgacggcacggggctcgtctacggcatgggacacgcggtgtatacgctttccgatccgcgcgccgtcatcggcaagcgcttcgccgagcagctggccgccggcacggaatacgaggccgagctgaacctgctgaaatccatcgagcgtttgacgcccgaggtgttcgcgcgcgagaagggctccaccaaggagctgtgcgcgaacgtggacatgtactcgggcttcatctactccatgatgggcattccggaagatctgttcacgcccctgttcgcctgcgcccgcatggccggctgggcagcgcaccgcttcgaggaaatcgccgccggcaagcgcatcatccgccccgcctacaaaaacaccatccgcggcaccaagccctacatcccgatcgagcgacggtaggggggcccacggtacctttcggtggtgtgggtttagctcaaccgccttgaatggtaagaccctatggatacttgctggtatagcgtattcgaggatgatctgtgggtaagatgccctcatggaaaagaacggcatcatcattatcgagccgggcgtggatgtctggcctcatgagaaacgtactgccgaggcgcttgcggccagtggcatgtcggtgaaattcctgcgtagaaagcagggcgatcacgtgcgtaccccggacgtggtcattgacggagagacgtgggagatgaagtctcctcaaagctccgatatggacaagattcgcaagaatcttcgcaaggctctggggcaatcgagaaacataatcttcgactcgcagagaatcaaaggagcgcccgacttgggggttgagcgcgagcttcgtaagcaggcagtcgccatgaggcagatctgaaagttgcttttcgtgaacaagaagcgggaagtgattgacatcaagtagaggcttgcgtatattctcaagcagcaaagcactggcatggtgtccacttacaccatcgtcggtgctttacttttgggatgcatcgggcttgctctggttcgactttcttctcctgttttgttttgagaaagagtagcattctggcaggcaaccaagtgtgagacattttctaaactaaacttcaaaaaagccccgagcaattcggggctttggcattttctggcggaggcggtaggatttgaacccacggtacctttcggcacgacagttttcaagactgcttccttaagccactcggacacgcctccgcattattgagcgctcgccattgtgtagcgagcgtgacgcacaggataccacatccccgctgcgattgtgaggaatcgtccgttttgatgctctgcgcagtggctgctcgcgctggcgtgccgaccctctttgcgaaaacatggcgcgatttccaggttttcactttcgagagattcaggcagggcgcgatttcccgatttccgccggattttggctcgcagagggggctctcaggtggaaataaggaaatcgcgccatgtcctgggctcgcagaggggactctcaggtggaaataaggaaatcgcgccatgttttcgggctgcccctctcgcgctcttcgcgttcggtataatccccctcatgaatgaacatcgcacaaccgaagagcagaaggcgcttgatgcgcagtatatggcgctggccttggaagaggcgcgggctgccggggcggcgggggaggtgcccattggggccgtggtggtgtacgagcccatcgaccgcggcacgcgccgaccgctcgccgagccgcgcgtcatcgcccgggggcgcaatcgccgcgagactgatcgcgatccggccgggcacgcggaatttctcgccatgaaagaggcggctcgcgtgctggatgcctggcggctaaccgattgcaccgtctacgtcacgctggaaccctgcatcatgtgcgctggtctcatgcaccaggcgcgggtggctcgctgtgtgtacggcgcgcctgatcagaaggcgggcgcggtgggcacgctgtacgatatccatgccgatacgcgcctgaaccaccagttcgaggcaacgggcggcgtgtgcgaagaggagtgcgtggccctgctgcgcgacttctttcgcgcccgacgcaagaaagagaaggaacgcgaatgaccgagaatacgcagcgcaatcgcgaggcggaagtgaatctgctggcggcggcccgtgaggctcagtggtcggcggccgccttcatggggccgaacacgatgaagctggtgtcaccggcgaaggtgaacctgcttttggctatcggggcgcgccgcgaggacggctaccacgatgccgataccatcatgcatgcgcttgcgctgcatgacacgctgtatctgcgtgcggaaggtgtttcggccgacgagttggcgaagcgcgttgccgaagggggcgcccgcgccgacgtcgcggtgggcggcccggcggacaacctcgtcatgaccatcgacttggctgaccgcacgggccaagacctcgctgtgccggcggctgacaacctcgccttcaaagctgctgatcgcctgtcccgggcggtgggccgcgatcttcccgaggccatccagctgcgcatcgagaagcacattccggcccagggcggcttgggcggcggctcgtcgaacgcggcggcggtgctcgtgggcctcgcgaaggcgtgggatcttgcggccgatgacgagcgcgtggccgacgttgcccggtcgctcggagctgacgtggcattcttcctccatggcggctgcgctctgctcggcggcgtcggcgaggtgctgcagcgccgtttggaaacgtcgcggcgccccgtggtgctggtgaaaccggcggagggcgtctccactgccgaggcctataagcgcttcgacgctgcgccgcgcccggtgcccgaagaagagctcgcccgcgaccttgctgccacccgtgccgacgatgtggcgctcgccaacaacctcgcccccgcggccgaggcgcttctgcctgagctgtccgtcgtccgtgcatggctcgccgaacaggcaggggagaacaacgtgctcctctccggtagcggctcggccaccttcgccctcgtagacaccttcgccgaggccagccgcatcgccacggccgctgcggctcgcggctggtgggcgcgcccgacgagtctctccggcctgcgcgccgccgttgtcccttcgcgataaagagcgccgggtaacgaatggccacgtcgtcgttcatcagctgcccttttcgtatacactggcactgccgcaatcacgtgcgctagtgtccaaggcatctcgccgatgccgcccgaagagaaaggatgagaagtgggttttctcgctcgcctgtcccgcgttgtccctctgctcatcgtcatggcggtggcggcgggactcatctacgtggtggtcacctaccgtcattccccggcccgcgccaaagaggtgctcatcaaaatcttcacgtggttcaatggcatcgtcgtcggcttcttcgccttggtgtcggtgtacgccttcttcgacaacgctccggcggtgctcgatctgtcgctcagcttcatggttgtgggccttgtcggcctcctcgtcacgcgcctcgccaactggcgcttcctcgcgcatcaccccaactatcgcaaaaagcgcctcgccgccaccacccgccgccgctggccgtggcaacggtaggagttttagaagaggtggatgccagttgagactcgaaatggcatgaaggggctgccagttgggcctagaaatggtaaaaaatgccagttgaggccccaaatggctagctgtctttgtccatttcgggcttcaactggcatcaacccgcattttccaagcgtaaaggagcgggacgctcggaaacggggatcggggcttcgcaaataaaaaactccccgcagggagttcgagaaaaggcaaactggcggaggagtagggattcgaaccctagatgcccttgtggggcatactcacttagcaggcgagcaccttcggcctctcggtcactcctccgcgtaacaatgcatcttacccgagcgctccggtttctgcaacgaaaatattcctcgttgctcaaagaatcctgctgatttgcgcacagaccgacgtgtgctggcgatgccgcggcgtctcggcgcgccggaatcgatcgcttgggcgagagccgccgacgaagcgggctatttctggtaccctgttcacgaaggaaaacgcgcaggccgctggggcgtccgcgcacattgccagggaaaggaaacgcgcatgatcggtcgctacactcgtccggaaatgggtcgcatctgggagcttgagaacaagttcgccatttggaaggagatcgaggtgctggcctgcgaggcccaggccgagctcggccaggcgggcatcacgcgcgaggaggcgcagtggatccgcgatcacgccgacttcaccgtggaggagatcgacgagatcgagaaagtgacgaaccacgacgtcatcgcgttcaccacttgcatggcgggctacatcgacgccgacattcccgagggagccgacaagccgagccgctgggtgcactacggcatgacttcttccgacctgggcgacacggccctgtcctaccaggtcacacaagcttgcgacatcatcatcgacgatatcaagcgcctcggcgaaacctgcaagcgtcgcgccttcgagttccagaatacgctgtgtgtgggccgtacccacggcattcacgccgaacccatgaccttcggcatgaagttcggcagctgggcctgggctttgaagcgcgccctcacccgcatggaggaggcccgcgctgtggccgccactggcgctatctccggcgcggtgggcacttactcttccatcgaccccttcgtggagcagtacgtttgcgagaagctggggctcacccccgacccgctgtccacccaggtgctcgcccgcgaccgtcacgcccaggtgatggcggccctcgccgtgacggcctccaccctggaatccatcgccatgcaggtgcgcctgcttcagcagtccgacgtcatcgaggcggaagagccgttcaccaagggccagaagggctcttcggccatgccccacaagcgcaaccccatcacggccgagcgcgtgtgcggcctcgcccgcgtggtgaaggcgaacgcccaggtggccttcgacaacgtggccctgtggttcgagcgcgacatctcgcattccggcgccgagcgcgtggtgctggccgacagcttcacggcgttggactacatgttcggtaagatgcagtggatgctcgacggcctgcagacctatccggccaagatggagcacaacctgtggcgtacgaagggtctcatcttctccagcaaggtgctgttggcgctcgtggacgccggcatctcccgcgaggatgcctacgtcatcgtgcagcgcaacgccatgaaggtgtgggaggacattcagaacgccgttgacggccccacctaccgcgagcgtttggaagccgacgacgaggccatggcgctgctttcccaggagaagctcgacgagatcttcgatccctgggacttcctcacccgcaaggacgtcgtgttcgatcgcctgcaggagctggagttctagtagctctcacttacttccggcaaggggcgaccaaggtcgccccctacggttcaacctgggaagtcactttgcggagccgggatctgccgtctcttagacctcgcttataagaggagtctccgagagccgtcccgtagggggcgaccttggtcgcccctgagttcggaggccagaggattcagggactcgaaagccttactgcgcggccccgccagtgttgtcggtgagcatgtcgatgccctgggcgagcaccgaggcgtccatggcgcccatgtaggcgccgatgatgttgccctcggcgttgatcaagtaggtctgcggaatggagctcacgccgaaggcggtggctgccgagttgttggcgtcgaaatagcacgggaaggtgtagccggcgtcggcgaggaaggccttggcgctctgctcggtctcgccgttcatgccggtcatgttcacgatgacgaattccacatcagtgccgtgctctttccacgcggtctggatgtcgggcatctcactttggcaagggccgcaccagctggcccagaagttcagcagcactggcttgcccttgaagtcggccagggtgagggtcgctccgtcggcgtcggtcatggtgaagtccggagccggggtggtggctgcgttggtgccgttgccgtcgccggtgtcgtcggcggcatctacctcggtttcttgaacagcatcggtgccggtgacctctatctgcttgttgtcggccgctggcgcgagagcgctgtaggccacgcccgcgccgatgagcagcacggcaaagacgatggcggccacgatgacgccaacatgcttcttgcggtcggccttctcgccctccggcgtggcagcagcggctttctcttcggcttccagggacgccaagcgctcgccgatggcctcgccccgctgctcggccgctgagggctcagctgctgcgggggtcgcgcttgccgccgtttcggctggggtgctgctatcggtcggggccgctgtcgtctcgactggggcgccggcatcggtcggcatcttctcgttctcgctcatgttcgaacctttctccttcgggctggattccgcgggttagctcagcaggcgcaagaagccgccgagcagtcccgtcgccatgagcacgcccacggcgaccagaaaccagccgcataccttattaatgatatcgtaatgctgcttgatgacggtgaaagcgcccttcagcttgtcgatgagcgcggcggccgccacaaacggaatgccgaggccggccgagtagcacagaagcagaataacgccctgtgccaccgacgcctgctgcgaggccagcatgagcgccgagccgaggaacgcccccacgcacggcgtccatccgacagagaagatgacgccgaacagcaccgaggagaaaaatcccagctggcgccctgccagcgggttcttcgcaccgtggaagaggttgatcttgatgatgccgaggaagtacagaccgaatgcgatgaccaccagaccgcacaccacgttgacggcgctctggtactcgatgaagaacgcacctaccgatgaggccaaagcgcccatggcgatgaacacgcaggtgaaccccagcacgaacccaagggcattgcgcagcacgatggacgtgcgcacttcctcgccggcggcaaagtaggtgacatagatggggatcatgggaagcaggcacggcgacacgaaggtgatgatgccctccagaaaggtgatgagataggtcacaaatcctcctcctgcttcgctcgccgttttgcgatgtctcgcattattccctatttgcgagcgacgtgcctccgtcttcacagaaagtgaagtgaccgttacgtgcttcgacatcgtgcggcggcccgttgccgcaaggcgtttctggcgctatgctggtgggcgtaagtgaaattgcgagtgcgtgcgcgattggctcgaagggattgagttgttcggagggaagtagtgtgactgttttggctgattccatcacgcgccgtcgttttgtgtggttggcggctttggccggcggaagcctggcgttgggcggctgcgcgggcgacgggtcgaacggggcggacgattcagctggcgaaggcgcgggcgagagccaaggccccgaagatgctgcggccgtcgcgcgtgctgctgcggacgagcgcatcggcgccatgacgctcgagcagaaggtggcccagctgtttatcgtgacccccgaagcgctggtggaaggtgtgtcccaggttacccaggcgggggatatgacccgcgagggtgttgcggcccatcccgtgggcggcatcgtttacttcgcccagaacctgctcgatcccgagcagacgacgaccatgctcgcgaacgtgaagcagttctacgctgacagcggcaatgcagcgccttttgtcgcggtcgatgaagagggaggcgcggtggtgcgcgtcgccggcaacgaggccttcggtgtccaggacgtgggcgacgcttctgctctcggcagcgctggcgataccgaggcggccaagcgcgccgccgagcagatcgccgactacctggcgccgctcgggttcaaccttgatttcgcccccgtggccgacgtggtgaacccgttgcgcagcgacaccatgggtctgcgttcgttctcgagtgatgccgccgtggcggccgatatggtgcgggccgaggtggaaggcttccgcgacaagaagatgctctgctgcgcgaagcacttcccgggtattggcgcggcggccggcgattcccacgagggggccatcaccatcgaagcgacgagcgaggagttggaaacggtggatctcgtgcccttccgcgcggccatcgaagcaggggtgcccatgatcatggtggggcatgtgagtctgccgaacatcatcggcgacagtacgccggccccgctcagttcgaccgttgtccagggcatgctgcgcgattccctgggttacacgggcgtcgtcgtcaccgactcgctttccatgggcgccatcaccaactactacaccccggcggaagcggcggtcgcggcgctcaaggcgggttgcgacattccgctcatgcccgagcgtttcgacgaggcctaccaaggagtgctcgacgccgtgcaggcaggcaagctgactgaagagcgcctcgacgagtccctcatccgcatactttccgccaaacaagagtacttcgggctgtaagcttaacggccgcgttcgcagggggataaagcgcgcagcgggcttcgcggcgccctcccgtcccgatcgcggacaagctagagcgcccttacgccgctggttcccagatgcggacgaggcagtgcttctgctgctcgccgccgatgggggtgtagtccacgttgcagtaggtgacggcgcgcgtgcccatatgcgtggaagcgaggaaatcgttgtagtcgcccgatccctcctcaaggggcagcttcacatagcgtcgtcctgcaagatcgatggccaccatgaagctaccgccgcgcaccatgagccagttgccgcaccagcagggcggggaaagcgggttcgctgcgaaatggaaccagggcacggcgctgtaggcctcagtgccgaggttggtgcaggcgatgggcaggtacggcgcggcggcgtctgcctcgcccgtctcggcagcggcttcctcagcgttggctgccgcgagcgagacggcctcgggggattccatgggcaagtaggtgcccaaattcgcgataccctcgccgtagttgtaaatgccgtcgaaagcgaagctgaagccggttttgccccagccgcattccatcggcttcatggacgagggcagaacgcaggcgtcggtaacctcgccggtggcggcgtccaggtgggtgagctggtagtaggtgccgcttgtgcgggcgcggggcgccagcgcgagactgtctccgcaggaggtgggcgcgcaggccatgcgtccctgggaggcgtacactacctgggaatcggccgtgccgaaggcggcgcgcaaaagctgcgaatcttccacgcgggcgttgccgtcgagctgcggaaggcgctgccagaaagcgtagccggcggcgacggccaaggtgggcatctcccagttcacgtcgccctcgtcgagcagctgcggctcgcccagcgttgtgccggaaagcgatgccgcgtacacgcgccagacattgtccaggatgtcggcttcggtccagacgacgccggcgctgttcgcgcgcacatcgtaaatctcgaaaccctcggcctcgcccacggcatgctcgatgatggtggtgcactcggctgaggacaggtcgaggagccccacctcggccaggggcttggcggtttccgtgggaagcaggcaggcggcaacggcgtcgtcgctgcaccagacgagcgtgccgaagggcagcttcgccgagccggccagcgtgacggcgtcctcatagttttccatctcttccaagtcggtctgcgcggtgacggcgttttcgggcaccttaagggttttcagggcgtcgtcgtcgccggagcgcccggctgcccaagcggccccgccgcccacggcggccagcgcggccacgcccgccacgccgtagaggaaatgacggcgcgtcagcaagacctcgtggcctccgggcaaggagagggatgtgggttgttttgttgcaacgcgccgcgtgggcgcggatcttctctgtggcatgggactattgtgtcatttcgcatacgcctcggcgaccatacgaaggcaaacgctacaataaacgcaaacacgactgctgggctgatatatgcgctgtcaactgatgaaatcgcaggtcagcgcaatgaagctttggcatcctaggaactgcaagcgaacatgcaaggagagtatccccatgagcaacgagacgcgacgcattcttctggttgaagacgagaaggccatccgcgatgcggtgacggcctatttggagcgcgagaactactgggtgaccgccgtcggcgacggccaggacgccctggaagagttccagaagcatcacttcgatctggtcattctggacctcatgcttccccgcgtgccgggcgagcgcgtctgccgcgtgatccgcgacacctccgatgtgccgatcatcatgctgacggccaagggcgaggtggaagaccgcatcatcggtctggagctgggcgccgacgactacctggtgaagcccttcagcccccgcgagctggtggcccgttcccgcgcgctgctgcgccgcgtgcacgccgattccgagccccagcgcgaggtgctcgagttcggcgagctcaccattgatgtgtccggccacaaggtgctcgtctccggcgaggagatcgatctcactgccagcgagttcaagctgctcaccacgctgtcccgctaccccggtcgcgtgtacagccgcatggagctcgtcgagaaggtgctcggctacgacttcgagggctacgagcgcaccatcgactcccacgtgaagaacctgcgcgccaagatcggcgacaacccccgcaacccgaagtggctccacaccgtgcatggcgtgggctaccgcttcgaggatcccaccaagaacggccagtagccgcccctttcgcgtcgttgccgtcgggcccgttcggctctggcgtcccccgtccgcttcgaaggagttccatgaccgagacggaagcaaaaccgcgcattctggaaaccgctgaagaggtcgccccgccggcggcctcttctccttctccggagcgcaagaaggaaaaaaagcacctgcgctggtcgaacctttcctatacgacccgcgtgaccttggcctttgcccttattgccgccatgactgcccttgtggccatcggcgtggtttccttcgtgtgggaacagcacttccgcacctatacggccgataacatgcagacgctctgcgacactacggcggatcgcatcgcggccatctacgaggagaccggcgatttgtggaaccccgagaccacgcgcccggccgcccaggccaccgagctcacgagcggtgtgggcgtgcgcgtgatcgacttgaaggggagcaccgttttcgactcatccgtcatcatcgacgagcagcagggcgatgtgttcaagtccttcgcgccgcaggacacctcgcaggtggccacggcctatattaaggttgatggtgagaaggtgggcaccgtgcgcctgtgggtctacggctccgaggcccttatgcgtcagcccgatcaggagttccgcgacaattcataccaggccatgttcattgccggtggcgtggccattgtgcttgcgtcctgtatcggctttctcttcgcgcgcaacttggtgtcgccgatcaaccgcattatgaagacggcccgggccatcggcgacggcgacttgtcggctcgcacgcatttgaccggcgaggacgaggtagcccggcttggcgagaccttcgacgtcatggccgagtcggtcgagaaagatcgcgacctggagcggcgcctgacgaccgacgtcgcccacgagttgcgcaccccgctcatggccattcaggccacggttgaggccatgatcgatggcgtctacgaggccgacgaggagcgcctagtcaccgtgaattccgagatccagcgcctgtcgcggctggtgaacgctcttctgaagctgtcccgtttggaaaaccgcgccgagcccatgaaggaggaggtcgtcaacgtcggcgagctaatctccggcatcgtcgccacccacgagatgttcgtgtccgattccggcctcaccttggaatacgacgcccagcccgacgtcatggtggtgggcgacgccgatatgatccgccaggccacggcgaacctgatttccaacgccgtgcgttacacgccggaaggcggccacatcacggtgtcggtgaagaagggcgacatcatggcctccattgccgtgcgcgacaccggtatcggcctttccaaagaggaggctcgcatggtgttctcgcgcttctggcgtgccgacgccggccgcaaccgcgagagcggcggccttggtgtgggcctggccgtggtgaaggagatcgtcgaccgccacggcggctgggtgcaggtggaaggcgagaagggcaagggcgcctgctttaccatccacatcccgctgtatgacgaagacgcctccaagcaccgccgcaactccaagaagcgcaccggccacaaaaagcccgcgaaagcgagccgataaaactcgctgctggccatttctatccccgaatcgacgaagtttacgtaacaaccgttcattcgtggctgcttttcgccgagatggcctctttggaagccatctctagccgcaaatcgccgaagtttacgtaacaaccgtcgatttgcggctactttttctggggagggtgccgatcagcactctttaggggtactttactggacgggggtcctgagagggtagggccaataggggcgctttatcggacgggagtcctgagaagggatcaactgccgttttctgcagaactccgcctccgaagagccataaggtttgtcccgtcggttccgtcctttagggatgctgtgccgtgtgggggacggcgcggcgcgggtgttctcatttgtgccataatgtccggtatgcgaaaaatgctcgggcatttgcgttcgaacggcgtccgctgggcgacgatcgagaggggcggcgctcgggctcatcaaggagaaagggcgttccatggcgggaatcgacatcacccccgacgcgcagggcaaggtgcgcgatctgtacgatttgggcgacaagctgctgcttgtggccaccgaccgcatttcggccttcgactacattctggaggacgagattccttacaagggccaggtgctcactcagctctccaagttctggttcgagctgctcgatggcgtcgtggaaaaccacctcatctccaccgatgtggccgacctgcccgatgagtttcagccctatgccgactatctacgcgggcgcttcatgctggtgaagaaagccgacatgttccccgccgagtgcatcgtgcgcggatacttggccggcagtggcctgaaggagtacaaccgcgagggcaccgtctgcggcatcgaactgcccgagggtctcgtgaactcctcgaagctgcccgagcccatcttcactccgtccaccaaagccgaaatcggcgaccacgacgagaacatctcgttcgaccgtctcgtggaaatcctcggcgaagaggatgccgccgccctgcgcgatctggcgctcaaggtgtacaccaccgccgccgatcacgcggccgagcgcggcgtcatcatcgccgacacgaagttcgagttcggccgcctcggcgacaccatcattttggctgacgaggtgctcacgcccgactcctcgcgcttctggcccggcgacacctacgaggagggcagcgaccagcccagcttcgacaagcagttcgtccgcgactggctcaccgcccattgggacaagactggcaacccgccgcgtttgccccaggacatcatcgacgccacctcggccaagtacatccaggcttacgagaccatcacgggaaagacgtttgacccggcgacgttctagcacgcaagaaaaggtcacggcaactgccggcgatctcaccgcgaaggaaggatcgaccagggcatttttcctgaagcgacctggaggagccgggtaagtttcgggtccgtgaccgccaccacccgaatgaccacttgaaggagaaccacagcaacatgtcccagcgcaaccctatgaacgagcggtacacctccgaagaccgcaccggcgtgacccgcaagtcggccgcctcggccaagccgaaggccaaggccgccgcctcggtcaccgtgaagtcggcgaagaagacgcccgagcagcgcaaggccgaggagaaggccgcccgcaaggccgctgccgccaagcagcgcgaggtggagcgcaagtattacaagcccgacacgccgcgctacaagcgtctgcgcgccatctggtgggtgctgctcattgcggctatcggctgcaccacgctgagcttcgtcggccaacagtcgctgccgccggcggtgggcgtggtcacgctcatcttggcctacgtgttcatcatcgccgctttcgtgctcgatttttggaagatcaagaaagagcgcgtcgcctaccaggagcgcatgctggcgcttgaggagaagaacgccaaggccgagaagcaggcgcgccgtgtgcagcaggccaagcaggtgaaggcgaagggctcggggaagaaccagaaccgccatgcggctcagaagaagggcggcgaggtcgaggaagacgccgacgccggtgccggagagtccgatgaggctccggtgaagccggcccgccgcggcctgttcggcagcggtttccgtctttccaaccgtgagaagatgcaagccgagaagaaggctgcgaaggaagctgaaaaagccgagtagcacccccaccgtagggagcgacctcggtcgcccctcctcaagtgggatgatcccgcttgggagggtagatcaaggtctgtccctacggaaaagttcgagcgcccgtcccttgaagagagaggcacattcatggtatctcgcgtctatgttgagaagaagcccgggtttgatggcgaggcccgcgccctggcagccgagctgcgcgacatcgtcggcatttcggggctgaccggcgtgcgcctggtgaaccgctacgacgtggaaggcgcgacggacgagttgttcgccgcctgcgtgcccacggtgttctccgagccacaatccgacaccgccaccttcgagctgcccgaggccaacggcgcggcggtgttcgccgtggagtttctgcccggccagttcgaccagcgcgccgattcggcgagcgagtgcatccagctcatcagtcagggcgagcgtcccgatgtacgctcggcggtggtgtactacctggaaggcgatctgactgaagacgacgtggaggccgtgaagcgctacgtcatcaacccggtggaggcccgcgaggcctcgctggatacgcgcgacactctggccatggccttcgagcgcccggctgacgtggaggtcatcgagggcttcactacctttgccgatgacgagctggcccgtttcatcgacgagcgcggcctggccatggatctggccgacatccagttctgccgcgcgtacttcgccgaggagggtcgcgacccctccatcaccgagatcaagatgatcgacacctactggtccgatcactgccgccacaccaccttcggcaccgtgctgaatgaggtggaaatcgccgacgccaacgtgcaggccgccttcgaccgctacttggagctgcgtcgcgagcttgggcgcgacgaaaagccggtgtgcctcatggatatgggcaccatcggcgcgaagtggctgaagaaagagggcattctcaccgggctcgacgagtccgaggagatcaacgcctgcaccatcaagtgcaaggtggatgtcgatggcgaggagcaggactggctgtacctgttcaagaacgagacccacaaccaccccactgagatcgagcccttcggcggcgcggccacctgcgtgggcggcgccatccgcgaccccctctcgggccgctcctacgtgtaccaggccatgcgcgtcacaggcgcggccgatcccacggtgcccgtggccgacaccattcccggcaagctccctcagcgcaagctcgtgaccacggcggcggccggctactcctcctacggcaaccagatcggcctggccacgggtcaggtgcacgagctgtaccaccctggttacgccgccaagcgcatggaaatcggcgcggtggtgggtgccacgccggccgaccacgtgcgtcgcgagaccccggcgccgggcgatgtggtggtgcttctcggcggccgcacgggccgcgacggcatcggcggcgccacgggctcttccaaggcccattccgtggaatctctggaaagctgcggggccgaggtgcagaagggcaacgcgcccgtggagcgcaagattcagcgcctgttccgccgcggggacgcctgccgcatgatcaagcgctgcaacgacttcggtgccggcggcgtgtccgtggccatcggtgaattggccgacggcctggacatcaacctggatgccgtgcccaagaagtacgacgggctcgatggcacggagctcgccatttccgagtcgcaggagcgcatggccgtagcgctggcgcccgaggacgtggacgccttcatcgcgctcgcccacgaggagaacctggaggccacgccggtggccgtggttacggaagagccccgggtgcgcatgcattggcgcggcgacactatcgtggacgtgagccgcgagttcctcgcgagcaacggagcgccgaagcatgcggcggtggccgtacccgcgccggccgacgagagcttcgccgaaagtgcctgcgaccgcgccttcgaggcgacaagcgagttgaccgaccccgtggtggacgccgtgtgcgacgccgactcgctggaagtgtccctcgcggcgctcatgggcgacatcaaccgcgcctcgaacaagggcctcgtggagcgcttcgactccaccatcggcgcggccacggtgctcatgcctttcggcggcgctcgccagctcaccccggcactcgccatggtggcgaagctgccggtgctcggcggcaagaccaccacggtttcaggcctgtcctggggcttcaacccgtacctttcgtcctacgatccctacgccggcgcctacatggctgtgctcgattccgtggcgaagctagtggctaccggtttcgagcgggcgaacatgtacctcaccttccaagagtacttcgagaagctgcgccaggatccggagcgctggggcaagcccatggcggcggtgctcggcgcgctcatggcccagatcgatttcggggtgggcgccatcggcggcaaggactccatgtccggttccttcgaggatttggacgtgccgccgacgctcgtgtccttcgcgacggctatcggcaatatcgaccgcatcacctcaccggagctgaaggaggcgggcgacaacctcatctgggtttccttcgaggatgcgctggcgtcgagcgtctgcgcgaccttcgacgcggtggagcacctcatcggcgcgggcatcgtgcgggcgtgcgcaagcggcgcctacggtggcttggccgagacgctggtgaaggcggccgtgggcaacggcctgggtatcaccgtggacgaggacattgacatgggccagctgttcgagccggcctacggcacgttcgtgatcgagctgaccgccggcgaggatgctcagtccgtcgtcacgcgcttggaagacgccggactcgacgccaacgtggatgtggtggagcttggccaagtgaccagcgcttacgagctgacctgcgacggccaggtggccgatctcgccgtggtgcaggaggcctgggagcgcggaggcgggcttgaaagcgtgttcccgtaccgcacctcgccggaagagcgcgcagcggccgagacggtgcccgccatcagcttcgagggcgaggcggccccggcctaccatggcccggcgctgctgggcgacacctccggcgccccgcgcgtggtcattccggtgttccccggcaacaactgcgagtacgactccgctgccgccttcgagcgggccggtgccgtgcccaccgtgtacgtggtgaacaatctgacgcccgaggccgtggccgagtccaccgccgaactggcgcgcctcattcgcgcgtcccagatcgtcatgattcccggcggcttctccggcggcgacgagcccgacggctccgcgaagttcatcacggcgtttttccgcgcgcccgaagtgaccgaggcggtgcgcgaccttctgcaggcgcgcgacggcctcatgctcggcatctgcaacggcttccaggccctggtgaagctgggcctggtgcccttcggcgacatccgtccgatggatgccgactgcgccaccctcaccttcaacaacatcggccgtcaccagagcacgctcgtgcgcacgcgcgtggccagcacgatgtctccctggatgagccgcatggaagtgggggagatgcacaccgtcgccatcagccacggtgagggccgctttgtggcgccccccgcgctgctcgactccatgatcgcgcaggggcagatcgccacccagtacgtggatgcggccggcgtgccgtctatggatctggcggtgaaccccaacggaagcgtgctcgccatcgagggcatcacgagtccggacggccgggtgctcggcaagatgggccacacggagcgcgccggcgcgggcctgttcaagaacgccttcggcaacacctaccagcccctcttcgagggcggcgtcgactacttccgcacgaagtagttactgccacagcctcacttcgggctccaactgcacgccggtggtttcgtggacgcggcgctgcacctcggcgatgagggccagcacgtcggcggcggtggcgtcgccgacgttcacgacgaagccggcgtgcttggtggatacttgcgcgccgccgacgcgaaggccctggcagccggcctcttggatgagagcccccgcgaagtgaccctcggggcgcttgaaggtgctgccggcgctcggcatctccagcggttgcttgctctcgcggcgctcgcgcagctcttccatgcgcgcggcaatggcggcaggggagtcggcgcgcagctgcagcgtggccccgagcaccacccagccctcgcgcatcatgcggctggtgcgatagccccacgcggcttccggcgctggcacgttcgcgacgcgccacgactccgcgcccgcaggcaccaggcagcgtacttccacggctacgtccgagaactggccctcgtaggcgccggcgttcatgatggctgcgcctccgatggtgccgggaatgccgctggcgaactcgtagcccgcaagcccggcatcccgcgctgcggcggctacggcggcgttcgtggccccggctgctgctcgcacgaggccgccgggcagcacctccacggcggcgaagttgtccgccagcagaagcgtcacgccgtcaagtccctcgtcgggcgcgagcacattggagccgagtcccagcacacgccagggaatcccggccgcctcgcaagtcgacaccacgcctgccacctcgtcttcggagcgcggcgtcacgagccactgcgccggccccccgatgcgaaatgtcgtatgctcgactaggggttcgtcaggccgcacattctgcgaaccgacgatatcctgaaggctcttctcgaagctcggggcgctcactgtttgttcctcctcaactgagtgacggcttagaggagacggagggtgttctgaccgagcgaggactgtctgagcgaatcagaataccctgcggctccgacacgcggggaggtgcaacctctccgtttgccatagcgatcgggttaccgttggtgacccgcatggctcattgtactagaatacgcccatgacgaaatcgctgacatatccgcgcgatcaccaaaacgtccccgcccatcgccgctcgcgcctcgcgcccgcgttcgtaattgcggccgtttccgcgtccgtccttgcggatgcttccgcacgcacgaaagcggggcgctaggctatggcgcgcagggttcccgaggttaagcccacctcgccggcggcggccatcgtgctcgtgctgctgttcattgtctgcttcattatcggcctgtgggtgcttatggcgctcacgcgcatcgtgctcggttaggggcaacgactatgtggcagcgattcaccctctacgacttgcgcgttatcgggcactacctgggaacgctcctgttgttcttcgccgcgctcatggctcttcccttggcgacggcgctggtctttcaggaatgggagccggcggcgcgctacctcgcggcaatcggcatcaccatggtcgcgggctgcagtctgcgctttctgcgcatcgagcccggacgcctcgatcgccgccaggcgctggcggtgaccggtttcgcctgggtcgtcctcgcgctgttcgcctcgttccccttgtacttctcggggcattacatgacctacctcgatgccatcttcgacggcgtctccggcctgaccaccacgggcgcctcgctcatcgtcgatttggaccacctctcctacgccgacaacatgttccgcttcgctatgcacgctctgggcggtctcggccttatcgtggtggcgttgtccttcgggcttttcggccgcggcggcggcgcgtcgctgttttcgtcggagggccgcagcgagcacgtggtgcccaacgtggtgcagaccacccagttcattgctcgcatcaccctggtcatcgtctccgtcgccacggtgatcatcacggcgttatgcctgttcatgggcatggagcccacccgcgccttcctgaacgcgctgtgggtgtctacctccgggttcgtgaccggcggtttcacgcccatgcagctttccatcatgtactaccattccttcccccttgaggcgattctcatggtgctcatgattttgggctccatcagctttgtcattcacgccgaggtgtggaaggggcgtccgctcccgttttttcgcgacatcgagacgaagacgatggtgctttggataggggtcatggccttcgtcttcacggccacgctcgccctgtcgcccttcgatgacatgctcgcgcttttgcgccgcggcctgttcatgatcatctcggcgttcaccacgacgggctttcaggtggtcactaccaaccagatcaccaccgctttcagcaacggcgccttcctcaccctggcgttcatcatggccgttggcggcgcttccggctccacggccggcggcatcaaattctcgcgcatgggcatcatcttcaagtccatcgtgtcgaacgtgaaggagacgctggcaccggattcggctcgcgtcgtcgtttcctacaatcacgtgggcaggcgcaccttgacgccggaaatcgtgaaagaggccatgacggtgttcatcctgtacgtgatcacctacgttatcggcgcgctggtgggcattgcgcacgggttcgaggccattcccgcaatcttcgaatcggtgaccatgacgtccaacggcggcatcatcacgtcggtggcggggcccggcatggcgggaaccctcgagctgttctacatcttccagatgtgggctggccgcttggagttcatgacgctgttcgcccttattgtggaagtggtggcctccctggtgccgcggccccgaccgaaggagcgctcatgaggcggcggtgtatcgtgcttctggcgattgcgctcgcggcggttctggccgcgccgggtcctgtggcttgggcgacgggggctgccaacggcgccgcggcggcttcctctgatggcggtgtgaccaacgaggatgtgccgacggacgacacgggcgtcgtagaggccggcgaaggcgctgggaacgaaggcggcggaagcgaaggcgcgggcggcggcgcggtgcaaggcggaggcgccgagggcgaaggagcgagcggcggcgcgaccgagggcgaaaacggggccgatggcgaggacggccaggccgtcgacaagcccgcgcgcccgaagcttcccgacccggtcttcagcgaggacgtgaacgaggacaacctcgtgaacccccagcagaagcccgatagctccttcatctacgatacgtccatctccgccttgcagggggccgactcctacctgaacgaccagaccgtgcaggtgacgggcgaggtgatcggcgatcgcattcgcgccgagttcgatcccggctacagctggatcgtcctgcagggctccgatagggttcattccgaaattcccgtgttcatggatacggagtccaccgagatcatcgacacctacggcgcctacggccgcaagggtaccacgctgcaggtgcgcggtaccttccatctgatttgcccggagcacgagggtttgaccgacttgcacgcagatacggtcaccttcgtcgagaaaggctcggttaccgaacagcccttcgacatcggcgcgtttctgccggggcttatgctggttgccatcggcttcatcatgctcatcgtgttccaccagatgagggaggggcagcgctgatggctgaggcgcgctatcgcggcgaagtggtgaagctggaccgggggtacccgctcgtgcgtttgggagacggcgagcttctgcgctgcgagcacgcgacggccctggtgaagggggagcgccgacgggccgttatcggggatgtcgtggaagtggcggtgcccccggctcacgacaagggcgtcatcgaggccatagcgccgcgtgcccgcgagttcgtgcgcaaggatcccaccgaacgcgccgtgccccaggtgctcgccgccaacttcgagcgggtcatcgtggcccaacccgtgggcgaggtgaacctgcggcgcctcgagcgcgagctggtactggccttcgagacgggggccgaggtgaccgtcgtgctcaccaaggccgacctggccgatgacgccgccacccgggccacggtggaggctgtgcgggccctggctgctcccgcggccgatgtgctcgttgtgtccgaggacgacccggcatcggtggaggccgtgcgcgcgcttctggcgccgggcaccaccacggtgctcatcgggcgctcgggggtgggaaagtccagcctggtgaacatgctggtgggcgccgaggtcttaagcgtcggcgcggttcgcgagggggatggcaagggccgtcacaccacggtgagccgcgagattgtggaggtgcccggtgccggtcgcatcgtggacatgccgggcgtgcggggcttggggctgtgggacgccgaagagggtatcggcgccgccttccccgatgtggaggcgctggccgcgcagtgccgcttccgcgactgcacccaccacggggagccgggctgcgcggtgcgcgcggccgtggaatccggcgagctgacgccggagcgctacgggtcctaccaggcccttcagcaggagatggccgccatgcgcgaccgtcgcgaagaggcgcgccgtatgaacaaggaaaaggtgagcgacaccaagcggcgccgcgcaggtgcgcccaagggcaagcgtcggcggtgatagcaaggcgccatcgcgacaacgccctgtgtaagcgcagaatgtcgatgaggatgcaggctcgttccattcatgacattttgcctaccgagattgccgtcggatgcagacgcgctaaaatgatgtgacactcttcgactgaactcgaaaggacctccatgaatcccgtcgtcgtcattcccacgttcatctacccccgccgccaccgcggaggggccgatgtggtgagcacctacgaccatcctaccgcccccaaccaagaaggggagctcggccgctgcctggagtcgctggcgaaggtggagggcctgggactcgtggtcatcctcgtgtccgccgacgtgtcgttggaagtgcaggcggccgagaaggcgcaggccatcgccaaccgccatccggacgtgaccacgctcgtcatcggcgcggcggagctggcgcttatcgagcagcgcatggcccagcagaacatcgagcgcctctccaaggaaatcggcctgcaaggttacggcgccatccggaacttggggttgctcgtggccaacgtgctcggcttcgatgccgtggtgtttttggacgatgacgaggtgatcgacgatccgaaattcctagagaaggccatgtacggcctcgggaagctcacgcgccagggcgtgcccatcgtggcgaagacggggtactatttgaacgaccaagactcctacctctcgaaatgggaggacaagtggtacaaccgcttctggcagcagggccgcgccttcaacgagtggatcaccaaggccatgcgcggcccgcgcctgtcgcgctcgaaccatgtgtgcggcggctgcttggccatccacaaggaggcgttccggcgcctcgccttcgacccgtggatcacccgcggcgaggacttggactacatgcttgacctgcgcatgtatggctcggatatctggttcgacaaccagtgggtcttgcgtcacctgcccccgcgcaccgcaagcgagggcacgcgtttccgccaggacatcttccgatggctctacgagtaccgcaagctggaatactcccgagcgctcatcgaccttcagcaggtgaagccggcctcgctcgagccctacccggggccgtttttggagccgggtcttctgcgccgcattcggctcacggcatggatgcgcagcttcggacgccccgacaagaaggcctaccgtctggccgccaaggccgccacgggtgcggcttcggcctacgccgaggccaactgcgcgaagtacttcgagttccagtacgtctggcccgaggccatgaatcgtttggaaagcgaccagctgctctccgaggccctggtgcgctcggccatgctgcgcgcccaggatgtggcggccgcggctccggccccggctccggcggccgcgaacgtcccgacgggcgccccggctgctgcggacgtcgcggcggaggtcgtcgcaggcgaggctgctggtgtgactcccgcgactgccccggcccccgccagcgtcccggcgccccgacccgtgccgcacacgaacatcgacgctggcatgaccacccagatccgcctggatatggaggactagcaccgtggaggctatgattttgttggccgccatctctctggtggtcggctttgtcgtcggagtgctctcgggcttgctgggcattggcggcggtgtctttctcgtgcccatctttaagctcgggtatcttatggaacctatgatgtgcacggcgacctcgctttttaccattatccctacgtcgatttcgggagcaatttctcgtatacgcaacaagacgtgcattccgaaactcggtattgcagcgggtcttggtggcgcatgcatgtcgccgattggcgtctggcttgccacgctttctcccgaatgggccattatgggcgtagccgcgctggttctcggctattcggcctttacgatgtttcgcaaggccttggcggccccgaagaagccgaaggaccccgcgccttcgagccgccctgagcgcggtgctgaaaaagcggcgtcggaaaacctcgctattgcatcgaccgttgaatctgaaggcgcagactcggaggtggttccttccattggagggcgtcagctgctgatctttttctttatcggtatggttgccggactggcttcgggctatgtgggcgttggcggcggcttcatcatggttccgatgatgatctccttggcgcatctttccatgcgctacacgtccggtacctccctggttgcggtgatgatccttgcggtgcccggggtaatcacccaggcgatgctcggcaacgtcgactggatcgcaggagcggccgtggcctgcggttccattccgggcgctatggtgggggcgaagcttgtccccaaggttcccgaacggacgctgcggttcatgttctccttcttcctcgtggtggccgccgtcctgctcgtcgtgaaccagctaggggtttggggctaggtcgtttccctggcgttcctaagtttgttatactggcgtcaattatggcggcgatcagggggtacgattatggcgaagcgcgaatcgggtacggtgtccacgcggggcatcggggtgcccaagttcaaccaggaaatgctcgcggccaccattgccgccctggcgggcatcacgctcgtgtggacgttctcgcagccggagttccccgtgcccgtgctcatagcggccggcgccgtgttcaccgtttccatcgtcatggtcatccggctcatgatggatccggattccgtgcgcgccctgcaatccgatgccatgctgcaactggcctcgtccatgatcgacgctatgggcgacgggctcaccgaggaggcctcccaagaggtgtgcgagcttctgcttccgaacacctcggccatcgcggtcgccctcaccaactgcgagagcgtgctcggctatgccggctaccaggaggcccacaacccggcgggcatcgccatccgcacgagcgccacccacgagtgcattcgccgggggaagacgctcgtgctgctgacgcccgaggagattgggctgccggcgcctatcgagcagaaccgtatcaaggccgccatcgtggagcccctgttcgtcggcggtcgggtggaggggacgctcaagttctactaccgtgacccgcgcaaaatcaccgagacccagcgctctatcgcccacggcttcgcccagctgctcgccacccagatggccgccgtggaaatggagacccagcgcaagttggccgcctccatggagctgaagatgctgcagacgcagatcaacccccactttctgttcaacaccatcaacaccatcgcctcgtttatccgcaccgatcccatgaaggcccgcacgcttctgcgggagttcgccgtgttctaccggcgcaccctggaggactccaccgagcgcatctcgctggctcgcgagcttgaccaggtgcagcgctacttcaacttcgagctggcccgcttcggcgatgcgcgccttgccttcgaggtgaacgcgagccccgcgctgctggacatgatggtgccgccgtttctggtgcagccgctcgtggagaacgccatcaagcacgccatgccctcggagggcaagctcaccattacggtgagggccgacgccgatggcgacgacgtggtcatcgtggtgagcgatgatggcgtgggcatgactgaggagacttgcgcgaacatcacgcaggtggagtcgtccaccggtctcggcattgccgtgaagaacgtgcacgaccgcatgatcggcttcttcggccccgatgcgcagatggtgtacacgagcgtgctgggggagggcacccaggtgacgctgcgctgccccggctgcgccaaggcgccggcgtctgcggcggcatcggcggaagcgctcgcagcgtcgttggacgaggtggccggggaagcggcggaaagcgcggagaaggcggcgcgcaacaacgccaccatggccgagctgaccgagcttgtggcccaggtgtcggaataaagcccgatccagcattttttgtcgacaagatgttggtgacggacgggagaagcccttctcgcaatgtgctggaaaggggcttgttgacccaaaaaagctggattgacctgctcggttgaattgcgaagccagccgaacgccccgcggtgagtaggcgttttcccagatagccggacggccccgcgaggggccgtcctccttttccccaggaaagatagggggcgaggggcctcggccggccgtccggctggatttgggcgcgcggctccgcgggcccgcgccggggcgcttccggactcagcgggacgggcctggggaagggctgctctgttgtcccctcgggctagatcagcggatccgcccccctctccagccgggcgcggttgacggcctcgacgccgagcagcagctcgccgtagggcacctcctcgacgcccagcgcggccgtgagcgcggcgccgtcgcccccgtaggcggccaggagcgcgcgcagcgggggcatgaacgccatcgagggcctcggctcggagttgagctgggacatgacggccgccatgtcggcggcctccaggtcgt

SEQ ID NO: 10683 - DNA, 3509 bp, Unknown
  gut microbiota DNA sequence
ggggtcttccaacgagatttccttcagcgtgctcgatgccgcccgtgaggctcgcgatgccgaggagcgcgatcggcgcgagggaggctcgggcggcccttctcttttcacattggggaaagggaagaagcctcggccaacaccggtcaaagggcagtccatcgtcttgtctggcgaagctcccgcatctccatcagcctcttcttccgctgttgatagaaaaatgaggggcatcgtgcccgtgttcgtggtggtgtgcgcccttttggtcatcacgctggtgggcggccaagctcttatgtcgatgagggagcagcagaagtctctgcttgataccctgaatgatcaggtcgacatcatcaagagctgcgatgaatcccttcttcccttcgacgaactggttattgagcagtgcgatgccaagcgcctttccccctcggcgacgggagacgccgcgccttccgcagaagcgctgaacgaggggtatcgtgccgttgtcgcggagatcgccccgatgagagcccagttagaggactctatcgcatccatggagacgctgcagtcgtcgctgagcgacaatgacgataaggaggcggcctctcaggtggtgacggccgctcgctcgcgccttaatatgctggatgcgggggtcagtatcatcgaggagtcgatgatggcgacagaggcgttcctcaaagcccgatcggggtggaatgccgtgataaacgccgatgcggctattcgtgaagccacggcgttggctgaagagatgagcaaggagaacattcttgcctcgcaggctaagggcaacgaggccctggcgtttttggaagaggctcagcaggatttctctcaagccgaagcggcctatcccagtcttgatttggcagcctttaaagcctacgtggctaaaagaatagaatcgcagcaggcagcccttgctgccgacgaggcctatctttcccgcaacaaggaagagctcgaggctcagaacagccgctataacgcgttggaggaggaagcggccgccttggcccaaaaactcggggaagatgacccggagcaaatcgttgctcttcgattctacgaggagatcgaggccgaccagggcgcctatgaagccgagcgcctaaaagcaggaaatgctgatgcctttcttcgtgaatatctcggaacggcctcgtaatggcgtatacttacgataattatgtccatagaaccctcttcaccgaggaaaggcaacgtacatggccgaattgaacgaacatgtcgcatatctgtctcaggagatcggcccccggccggcgggtactgaggaagaacagcgtgcggctctttacataagtgagcagttttccgccgaggccggtctgacgactgctatggaagacttccagtgcaaccccgacagctcgcttcctcgaacgctgtgcagtggtgtggcagtattggtgacgctggtggcaacgattgttggggcgctggctgttcccgccatcgtggtgtccctcatctgcgctgcgttggcagctgctgaggtgttcgataagccggtgctttcgcggcttttgaaccgtggtgtgagtcagaacgtcgtcgcgcgctacctgcctgcgaaatcgccgacgcgagcgagtcggagacgcaaggtgatcgtggtggcgaactacgacagcggtaaggtgcgacgcgatttgaacggcgcgatgccggcggtgctccccatcctttattgggttgagctggcgatgctggtggtcatgccgctgcttttggcgattcgaatggtgctcgctcccgacggtaccgtgcttgtggtgttcaacgtccttctggctgttgccatggtggtagcggttttgccggttgcgtcgtttctgcttgagaagttcgcgaactacaacgagggcgcaaactgcaacgccgcaggagtggcggtgcttttggaagtcgcctctcgcgtcgctgccgctcgggatttccccgatgcgcccgagccaacggttcatggcgaggcggccgccgtgtcggcgggacttgttcccgagggtgcggagattgtctaccatacggggaatacttccgaggatttgggaacctccatggagtcggctgccgagcgcctggcggccgccaaagctgccgtagcggcgttgtcggggaaaccgatgtctgcaacgtctgctgaggtggcaacagaggatgaatctccggcgaagggagaggacaacggtgccgtggaggtttctccggaagagagcttagctccatcctctgccgcggccgtcgtccctgttgctgctcctgcctacgtggcgcctgctgagcatcaagtgcctgaatggttcaaaaagggtcaggagcaagccaagaagcctgctaaggaaaagcccgtgcagcggtcgcgctacgccacggctttggagcgggccgaggaagaaattaacgcgcgcgaagagcacgagcgccgcaacctcgacgagctttccgagcgtatgcgtgttatgcgcgcttcggtgcaggcggcttcggcagcggccggcgcaacgcccaccgagattatggacagtgtggttgcggacgagagctccgatgagatttctgcttcgccttctacatcggccgttaatgaagagacatcgccctcggcggccccggtattgccagccattgaagtgccggcagttgaggccgatcaattgccgtctccttcgaacaacacggtctccgcgatgttggccgacattcccgccatcgcatccgagccggcctcttcggaagccgggacgtctgcctcgaagcctgtcgtgcctgctgtaccggctgtacctgttgtgccccagccgaccgatgaccccgatgtgacggtgcgagatggccagcgtccgttgacgggcgccactgtggcggttcctcccattgatctttcgacgcctggtgctcctgctgcgccggcgggcgggcagcgcgtggtggtgccctcggtgggagaagtggccgagaatccggctccagctccggccgctgccccccgccggcgccgtgctattacgctgcccaatatcggcatctcccaagagcttccgcgcatctccatggatgattgccagcaagccgctcctctttcagaagatcgccccgagcatgatggtcgcgtgcatgacttgagcgccgtcatcccctcggtgacgacgcccgagccgtcgccgactgtttcaggcacgcgggaagcggcgctgctcgacgcgctgccgtctttgggaaggacgacaacgacgactgatccagcgctttccggcagcatcagtcttgcgggcacgttttcttctatgggggcgacgggagcggccgcgcctatcggcgatgagcttttggagaatgcctccgagaacgatatgtatgtcgaagatgttgatgattctgcttatgtggagcagatcaccgagacgggagccatggctggtcctggttatgtggagatgcccaagagccgcttcggcggtatcttc

SEQ ID NO: 10684 - DNA, 430 bp, Unknown
  gut microbiota DNA sequence
atgcccgcgaagttggagcagcgcgcggcggctgggagagtttccgcgaagaaggcgatatccaggcttacgacgaggagtatttggatgccgacgcaacgacagcgttttctcccgaatttgacgacgattttgccgaggacggcttcgatgcacctcgctcttcccatcgccgcggccgccatttcgagggtggggcgttctcccgcgatcaatttgacgatgagtccgaaggcgaagaaaaccagacaagtgccgccgatccgtccagtgtgttcggtgaagggctgcccgccgatttcgtctttgagccgacgccggaaatcgagcagatcgagcagttccacagcgaccgcatcgatatggaagtgtggttcgtggcgctcggatccgaacttgccggcaatggcggcatgaaagcgtttatggc

SEQ ID NO: 10685 - DNA, 672 bp, Unknown
  gut microbiota DNA sequence
tcaagggcgcgcttatcgtggagctggaggcgttgggggccggcgagctaacgctgatcgacaaagagggcacctatgttcccaagaaggcctcgagccgtatgaaacgtttggttcgcaaggccggtcaggccaccgggttgaaagtgcccgaggctacgatggaatggcgcaacagcgcatcggcctacgccttgaagcacggccagcaggccctgcatttggcgggcatggatggcaggaaaccggcattcttcgccgaagaggacgatgtcattgaaaacatcgacaacgacatgttagccttgaacagcgattttgtcatggaagtgctcaagcatatctagcgacgaaatccaggtatccgcccccgtagctcagcggatagagcgtcggtttcctaaaccgtgcgtcggaggttcgagtcctctcgggggcgccatgatgtgaacggcggagcttcggctccgcctttttttgcgacgcccatacggtcggcgcgaggaacgaaacgggacattcccgcgtcatttttacggttcgcttggtttaccatggccccagcgaccgaggcaatgtgtgcttaccgtgatggagaaatgcaggttcaaccgcagcggggaaagctctgctaagatagcaaggctattcctgctccggtgtgtgccttca

SEQ ID NO: 10686 - DNA, 723 bp, Unknown
  gut microbiota DNA sequence
ccatcgtgcagcacaagctggccatcctgcgcgacaagcacaccccttccaacgagttccgcgatgtcgtgcgcgagctctcgctgtttgagacctacgaggccacccgcgacttgccgctcacgaacgtgttcatccaaacgcccatcgcgcccttcgacgccaagcagatcacgggccgcaaggtggccttcgtgcccattttgcgcgcgggcctcggcatggtggacggggcgctggaagtaatcccccgggcccgtgtggggcatctgggcatgcagcgcaacgaggagacccacgagcccgagagctattacgacaagctgccccgcgacatcgcgagccgccgcgtctacgtgctcgatcccatgctcgccaccggcggttctgccgaggcggccgtcaagtacctgcgcgaggcgggcgtgtcgggcaccatccgctttttgtgcctcgtctcggccccggagggcatcgagcgtctgctcgccgccgacgatgatctcatcatctacacctgcgccatcgacgacggcctcaacgagaacgcctacatcgtccccggcctcggcgacgccggcgaccgcatcttcggaacggagtaatctgaccggattgatttcggcaaaggctgagcaggcacgggggatggcgggagtctccgcgcgcaggttgcgcagcgaacggaacagcccagtgggctgttccgccgagcgagccatt

SEQ ID NO: 10687 - DNA, 177 bp, Unknown
  gut microbiota DNA sequence
ggcatgcgcgcgtagcgcaccgagtagaacgcgttgcaggccgcgacgcccagagcgcaggcgagccacgactttcccgcgcccgaggcgccagtgatcagcacgttcctgtgcgctttgacccactcgcagttcgccagctcggcgattttcaccttgtcgagtttgcggtcggcg

SEQ ID NO: 10688 - DNA, 1064 bp, Unknown
  gut microbiota DNA sequence
gtcatcttgatgggcttgcccagttccacacgacgacgatcgatctcgatgtcgagctgctcggcgatggcggcggccaccagaggagcagtgacggaaccgaagagcacgccctcctcgcccacctgggcgataacgcgcaccgtagcgtcgttcagcttctcggccagagcgttggcatcggcaatacgagtctcctcgcgcttggcgatgttcttcttgcgctcctcaagctgcttcaggttgcccggagtagccttcacggcgtagccctgggtcagcaggaagttgttggcaaagccgcggttgacgtcgatgacgtcgccctcgccgcctttgccctggagttccttcagaagaataactttcatggttctcctcccttcgcctagcggttgcggcgatcgccacggccgctgacagcgggaacggcatagggcatgagagccatgacgcgggcgcgcttaacagcttccgcgatgtcgcgctggtgctgggtgcaggcaccggtcacgcgacggggcttgatcttgccacgatcggtaacgtacttgcgcagcatttgagtatctttgtaatcgatatactccacgtcgtccttgcagaactggcaatacttacgacgaggctgcttagcgtaatcggccatattaacctctttcgtttcgcttaaaacggaatgtcatcatcgtacacggaagaggaagcgtcgataaccggagcagcgggcatgggcgcgggtgccggagccggtgcgggcatgggagccggagcactataggccggagtcgtcggagcatagccctggttgccgccgaaatcgccgccgtaggactgagcgccgccgccgttgcggctcgacatgaattcgagctcgtcaacgatgacttcgagcttgctgcgcttctgaccatcgcgctcccactggctccagcgaagcttgccctcgatggccaccttggtgcccttggacaagtactggtgcaggctgcgagccctattgccgaacatggtgcagtcaacgaagttcggataatcctcccactcgttggtctgagggttac

SEQ ID NO: 10689 - DNA, 397 bp, Unknown
  gut microbiota DNA sequence
gatcactcgattaatgctcatttctacctcttctcatggtgagcgcttaagaacgctcagtttccaactagtcgcgatcggtgcgggcgacgatcatgtgacgcacaacggcatcgttgatgcgcagcacgcgatcgagctcggcaatgctctgcgggtcagtatggaaatcgatgagagtgtagtcgccatcagacagaccgttgatctcataagcgagtttacgcttgccccaattgtcgacgttgtccaccacgccctgggcgtcggtgatcgtcgtctcgatacgcttcataacgccagcgcgcgtctcgtcgtcaatcgtcggagcaacaataaacagcagttcatacgccttcatcagctcacctcctttggactttacggctccgggctg

SEQ ID NO: 10690 - DNA, 195 bp, Unknown
  gut microbiota DNA sequence
tcgaaggtgtggagggtaaggggggtgaagtcgtaacaaggtagccgtaccggaaggtgcggctggatcacctcctttctagggagactcctagaccgcctccccatcccagcatccggctgcgagggctccgaagagagtccccgcgcaccttgacagttgcatagcgcgtgacatgaaaatgtcaacatgatc

SEQ ID NO: 10691 - DNA, 200 bp, Unknown
  gut microbiota DNA sequence
acgacctggaggccgccgacatggcggccgtcatgtcccagctcaactccgagccgaggccctcgatggcgttcatgcccccgctgcgggcgctcctggccgcctacggcgacgacggcgccgcgctcacggccgcgctgggcgtcgaggaggtgccctacggcgagctgctgctcggcgtcgaggccgtcaaccgcgcc

SEQ ID NO: 10692 - DNA, 1208 bp, Unknown
  gut microbiota DNA sequence
caggcgccctgacgattcggagcgtcgcgcggcgagaatgcgctgcgacgcgactgcggtcggcgcggggagcgaaacgggacattctcgcgtcatttctgcggtttggctctgctaggctcttgctgaaagcctgatagaggaggagccatgcagaagcgccggagaagagtcgacttcaccaacagctggatgttcgggcgggtcatgaccgacgagtcgatatgccgcgatgtcatcagggccgtgctgggcatcgaggccgtgcgcgtagagtacctgaacgccgagcaagtactcgacccttccccggagggccacggcgtccgcatggacgtgtacgctcgagagggcggctcggaggagcgggtctacgacctggagatgcaggcgcagcgggagcctctcctcgggaagcgcttccggtactaccaggctgtcctggatgtgagggagcttcccgctggggacgactacgaccggttgcccgagagcttcgtcgtcttcctgtgcagccaggatcccttcgggtacgacctgcccgtctaccacctcgagcgccgatgcgacgaggtccccgaattgcggctcggggatgcctcgcactggctcgcgctgaacgcccgggcatgggaggacgcgccgggcggcgatctgctcgatctgttaagatatgcccagacgggcaaggccctgggatcgctctcgcgcaagatagaggcagcggtcgggcgggccaacgaggatcgagagtgggtggacaaggtgtggtcggtgagcacgatcgtggagaacgccgcgcggcgcgagcgcataaacggccgcatagcctgcgaggaggcgcgcgaggaaggtcgccaagaaggtcgcgaggagggttccgcgcgattcgccaccctggcatcccggctcatagaggccggccgtgtcgacgaccttgcgcaagcggcgtccgatcccgctcgtcgcgacgagctcttccgggaactgggagtctgaagttgctcatcctctaacagcaaccaatgtgctttcgtctctcgccctcggcgaaatatacggtgcgttcgtgcaggtggggttcacttgcttgcaggtttgctataatgggccgacacgtcatcaattgcactcgaatcagaagaggttgatatgagcgagcttcttgcccagctgtggacgccggagatgcaggcggcctttactgt

SEQ ID NO: 10693 - DNA, 2399 bp, Unknown
  gut microbiota DNA sequence
gccggtgctgggcttggtggcctactgcttgctgcgccctccgctgctccagctcgatcgcgacgagcaggagctggagatcgcgctcaaacagcgccagctcatgaagtacggcgaatgcgccaactgcggctatcccgtagaggcggacttcgtcctgtgccctaactgccacacgcagctgaagaacctctgcatgcgctgcaaccacgcgcttgagccctcttggacggtctgcccttactgcgccacacccgtgggcgcccctgctccgcatgccacgcgtcagcgtcgcccctccggccaggcgcgtcagagccgcccggccagccagggttaggtttttcaacaagttagcctaaaggcagagccgcccccgtgcggctctgttttaataggggagcatcggaatcccggtgcttcgaaacggagtcggggtagtcaacgccccggcggaaaccgcgcaggcgctctgtgcgcgcccggcgcgaggaaaggagttccatgaacatcgtactgcccgacggatccgtcaaggagctggaagagggcgccaccgtcgccgacgtggccgcctccatcggcgcggggctcgcccgcgcggcgctggccggcatcgtcaacgacacccccgtcgacttggacgccgtcgtctccgacggcgattccgtggccatcgtcaccgccaagagcgacgaaggcctcgagctcatgcgccattccacggcccatcttctggccgccgccctcaccgatatgtaccccggtgtgaagttcggcgtcggcccggccatcgagaacggcttctactacgacatcgagctgcccgagggcgtgaccgtctcgccggacgacttcgccgccattgaggcccgcatggccgagatcgccaagtccggcgccgccatcgtccgttgcgaggtcagccgcgacgaggcgcgggagatcttcgccgaccagccgctcaagctcgagctcatcgacgagctgcccgaggacgagaccatctccatctaccagctcggcgacttcaccgacctgtgccgcgggccgcacgtgcccgacaccggcaagctcggcgcctacaagctcaccaaggtggccggcgcctactggaagggcgactcggacaacgagatgctcacccgcatctacggcacggcgttcttcagcaaaaaggagctggaagagtacctgcacaacctggaggaggccgagaagcgcgaccaccgtaagctcgggcgcgagctgggcatctacatgatggagcccatggccggcgtgggcctgccgctgtacctccctaagggcgcgcgcgtcatccgcaccctgcaggagtggctgcgccgcgatctgtacgagcgcggctacgaggaggtcatcaccccgcacatctacaacgcggatgtgtggaagacctccggccattacggcttctaccacgagaacatgtacttcttccagattaacgagggtaccgatgaggagccgcgctactccgagtacggcgtgaagcccatgaactgcccggggcacgtgatcatctacaagaacgagctgcactcctaccgcgacctgccgctgcgctacttcgagttcggcaccgtgtaccgccacgagatgtccggcgtggtccacggcctgcttcgcgcccgcggcttcacccaggacgacgcccacatcttctgcaccaaagatcaggtggtcgatgaggtggtcgccatcctggagctggtcgactacatcatgggcaccttcggcttcacctacgaggccgagatctccacgcgcccggacaagtccatcggcaccgacgacatgtgggagcacgccaccgagtcgctgaaggaggcctgcgcgcgccggggtctcgcctacgacatcaacgagggcgacggcgccttctacgggccgaagatcgacatcaaggtgaaggacgccatcgggcgcacctggcagtgctccacggtgcagatcgacttcaacatgcccatgcgcttcgggctgacctaccgcaccgaggacaacaccgaggagaccccctggatgctgcaccgcgccatcttcggctccatcgagcgcttcctcggcatcctcatcgagcactatgccggcgcgctgccgctgtggctggccccggtgcaggtggccgtcatccccatcgccgaccgccacaaggaggcggcggccgagttcgccggcgagcttaaggccgtgggcggccgcgtggaggtcatggatcagaacgagcccatgaaggtgaagatcgcgaaggcccagagccagaagatcccctacatgatcgtcatgggcgacaaggaggtcgaggagaagctcgtcagcgtgcgcgagcgctcggagggcgatttgggccagtgggatcgccagaagttcatcga

SEQ ID NO: 10694 - DNA, 1949 bp, Unknown
  gut microbiota DNA sequence
cgttccgaaggagcgagcgcgggatcgaaggggccggatgccgaagggggcggaaggccggtggcgagaggagatgggcatgaggagaacgttttccacctatggcgccaagatgcgccaggccaaccgggaggcggtggcgaccgtcatcgcgctggcggtcatcgtggctgtgtggcttgtgggtggtatcgggcttgccggctgcggcatcgaggtgttctcgacgccgctgtggatcatcggaggcacaatcggtccgtggatcgcggctatcgtctgcgccgtcgtgcttgcccgctgcgtcttcgcggatttcagcctcgacgatgacgccgaggctgtagtcggtgcagccactgccggcgcaacggacgctgaaggggaggaggcccgccgtggctagtctcgcctccctcatcccgcttatcctcttcctcctcgttgccctggcggcgagcatcgtcgtgcgtcgccgcgctgatgcggccgggggcggcttcgtcaacagctacttcatcggcaaccgtgcccttggcggcttcgtgctggccatgaccaccatcgccacctacggctcggtgagttcctttgtgggcggccccggccaggcgtggcagatcggcttcggctgggtgtacatggccgtggtgcaggtgacggcgctcgttttgctctacggcatcttcgggaagaagatggcgctcatctcccgcaagctggacgccgtcacggtagtggacgtcatccgcgcccgttacggatccaatgcgctggcgaatttgtcggcgctcgtcatcgtgctgttcttcgccgccaccatggtggcccagttcgtcggcggtgcgaagctgttcgaggcggtgaccgggtactcctacctggtgggcctggcgctgttcggggtggcggtcatcctgttcaccaccatcggcggtttccgcggcgtggccgtgaccgatgccctgtgcggcatcatgatgctcgtgggcatcgtggtgctcgccgggggcattctcacggccgggggcggctacgaggccatcatgacctctatcaaggagacttctccggagatgcttgagccctttgccgggggcgccatgccgccatctctgtacttcacccagtggctgctcgtgggcgtgttcaccttcgtgctgccccaatcggtggtgcgcaccatgggctataaggacgtgaagtcgctgcaccgcgccatgatctggggcaccgtcatcatcggcgccatgatgatcggcgtcacctcgctcggcgtgcttacggccggtgttcttacggaggacctcgcggcctacgggggcagcgtggacaacatcatcccgacggtcatcacggcctcgctgccgccggcgctggcgggcatcgccatcataggacctgtggccgcgtccatttccacggtgtcgtcgctgctcatctcgtcgtcctcggccatcatcaaggacgtctacctgcactggtgcgacgaccgcgggcacatgccctcccagcgctccgtcgccctttccagccaggcggtgacgctggcggtgggcttgctcgtgttcgtgctctccatcgtgccgccagacgtcatctggaagatcaacatgttcgccttcggcggcctggagacggcgtttctgttcgtgcttgtctgcgggttgttctggaagcgggccaacgccacgggcgctctgctctcgctcgccggcggcacgttggcctactgcgccgccatggccgcgggcttcaaagtggccgatttgcaccagatcgtcatcggcgtgacggcagccggcgtcctcatggtggtgggaacgctcgctggcaagcagaaagaagacgcccgcatggacgtcttcttcccgacggactagggccgcggtcggtcaacacggcgcgcccggatccttttcgggatccgggcgcgctttttttatgaa

SEQ ID NO: 10695 - DNA, 17406 bp, Unknown
  gut microbiota DNA sequence
aatcctacccctccatattttcaattctgaattccttttcctatctttgcacccgctaaaaaaacacgtaatcagcatgggtttcaaggaagaaatattaaaacgacgcacgttcggtatcatcagtcaccccgacgcgggtaaaacgaccttaacggaaaaattattgcttttcggtggcgccattcacgtggcgggagccgtgaagtcgaacaagatcaagaaaacggccacctccgacttcatggagatcgagcgccagagaggcatctccgtggccacttccgtcatgggtttcgagtacaaggacgtgaagatcaacattcttgacacccccggtcaccaggacttcgccgaggacaccttccgcgtgctgacggcctgcgacagcgtgatcatcgtcgttgactcggcgaaaggcgtggagacgcagacccgcaagctgatgcaagtgtgccggatgcgcaaaaccccggttatcgtgtttatcaacaagctcgaccgtcccggacaggacccgttcgacctgctggacgagatagagaaagagctgcaaatacaagtcaccccgttaagctggcccatcggtaacggcgaccagttcaagggcatttacaacatacaccgcgagaatctttgcctctactcggcaagcgtgcagaccatccaggatggcatcgagatcaacgacatcaactccggcgaactcgacgagcatatcggcgagcgctcggccgacaaactgcgggaagacctcgaactcgttcgggaagtataccccgccatagaccgcgcggcgtacctcgacgggcaagtggcccccgtgttcttcggatcggcactgaacaacttcggtatccgcgagatgctggactgtttcatcgagatcgctcccagcccgcttccccgcgagacggacgagcgcctcgtgcaaccggacgaggagaaattcaccggtttcgtcttcaagattcacgccaacatggaccccaaccaccgcgaccgcatcgccttcgtgaaagtgtgttccggcgttttccggcgtaacaccaactacctgcacgtcgggctgggcaagaacctcaagttctccacccccacggcattcatggcatccaagaaatccatcatcgacgaggcgtatcccggtgacatcgtgggtcttcacgacacgggtaacttcaagatcggcgacacgctaacggaaggcgagaaacttcatttcaagggtattcccagtttctcaccggaactattcaaatatatcgagaacgccgaccccatgaaatccaagcaactggccaagggtatcgaccagctcatggacgagggcgtggcccagctgttcacgaaccagttcaacaaccgcaagattatcggaaccgtcggcgcgctccagttcgaggtcatcgagtaccgtttgttgcacgagtacagcgcggcctgtcgctgggaaaatatcaatctttacaaggcttgctggatcgaggctctcgacccgaaggaactggaagatttccgtctccacaaggcacagtacatggccaaggacaaatgggggcgcgatgtcttcctcgccgaatcgcagtacatgctgcaaatggcacaggcaaactacaagaaactggtgtttcactttacatcggagttttagggtttataaggtttataaagtttataaactaagaaaacattcaaggcgtgatctcaccctagaatctcgtcggcgtcgcgggcgacacggagatagacggaagtggaaaactcgtcctgcccagaacccgccatgtagggataaaggtggacgatctcgtccggggagaggggcttgccggttgccgtcactggatcgggcagcgtgaacgtggctacccgtccggcgcgggtgacgttgggcaagtgaagtacgcggggtgcgtcgggcaaggaatcgtagaagtagccgatgacaagcgtgtccttgtccctcgtatcgttggggatgccgtggggtcgccactcaatggtgatctcccagccgcgacgggtgacgcgggtgaagagcggcacggcgagccaccctacgctgaatatgaaggcgcggaaattcgccacgccgttctcgtcgcacgcggtgccgttgaccttgtggcagagattcgcaggagtcatgttcgttgtcttcgcgagggacacccacgcgttgaagtcctgcagctttcgcgtgaggattttcacgagccgcgacacgagggcgaacacgctggcccgctggcgctggttcaaggtacgggcggcgcaccggcggtcacgttcctcgctcgacccggggaagcgtttgctactacaatggcataatttacctttccggtagtacgtggtcaccccgtcgcaacgggtggtttccggtcgcttgccgaccggccgcgtgatttttttcttctttttcataacacctccttgttaaacgttcccgtaatcctccaacaatgcttaaaggcaccttaacaacaaatatactaaattttcgataaattaccaaatcatgcatggtaagtgttcgattctgtatcgaacacttatcgaacacttatcgaacacttgtcgaacacttaccgaatgactaccgaaggtgacgttaacctacagtgaagataaccagcatcttacacgagaactggcaggaatcccattatttcttacttttgtcaagaaaaaaggctctatttatacccccgcgcgttccttgatttcccaccttcatgccctgacacgaaacgagcctgcacgagctgttgttaccgataaatttaatacctttacgctggagcaagaattgaatatggacgaaacattacgggaatttttcaacgacgtgtacgagatcacccggcagatcccgcggggaaaagtactcacctacggcaggatcgccgcgctggcgggacgaccgcaacacgcccggtgggtaggccgggcaatggcacaatccccggacgacaagaccctttcctgccatcgtgtcgtgaacagcgtcgggcaaactgccccgggatggccccaacaacgcacccagctcgaaagcgagggcgtcaccttccgggccaacgggtgcgtggacatgaaaaagcacttgtgggaaatcttaactgcgcctcattcaggaggctcctcgtaacgatttataatttcaatgatgttgccgttatcgtcccggatagtgtcccgcacccgtttagccggtctacgctgtatgtacgggatacgaatcttgtttttttccgcgcgggatagcttgtcgtaatccttaatgcccatgcagtggccgaaggaaacgtgaaaaatggtcaagtcttcgtggaaatagactttcgcagaataatcggtatagaatctctcttcttcctcgttgtaaggatattccacggtgtaaaacacttgccccgcgtaggcctctataaactctggataaagatcgttccatgctttagatactcgcctgtacctgataacaggttcccggtattcccggtaatactccggtccatgcttcaacacgacctgcttcgctaacttgatcagtttcttgtcaagtttcattttggcgatgctgtctttgataattaccgtgtcttgttcttgagaatatgctatacgattgattcccaagagacaaagcacgatgaatgatatgaatttcagtttttccatctttatatattatttaaggtgtttctcttctgtccggaccataaacgtacattttcatcggattatttgatatattcacgggacttcccgccaatactgtatatgaataatcatacacgatccccggcaggtcgctattattatcatctttagatggtccaggtggacgttcaagtccgtgtacggcccaagtcatgggataatgagaatgtatcgttccaactatcaagtcaaaagtttccctgggatcatagctttgttctgaataaacaaaacgaacagttcctttgccgggagcagtaagttgtattggatcacccgggattgttgatccgcaatgatattctcctgttcccgtgttcaaatagataaaacaaccgaactctcttgttgtatgagtactttgatttagcctgctataatttacggtctcattccacaattcaatcgctcgattttgtaccactggtaaatctttgaatttggaaatggaaggacacatctctgtaacatagactatattagaatttacttttcccgtttctccttcaaagtgtacaatcgcgccgaattcgaaccttcccgcagaaatagctttacgcggacaaatccattctgtcgtctcgtataaaactcctccttgccttgtccctaccctgtttacgagatactcgatatttgttattttaggaataggctcttgttttgtgtgataaatgtccactatcaaataatatacatcaccaatttcaacttcaccggtgagttcacttgttgttaagttcaccacaatatgccccgggtcatccggtgttattggaggtttttccgtgttaccacccgtgttgccacccgtgttaccacctgtatcaccagtgttacccgtgttgccacctgtactaccacccgtgctaccacctgtactaccacccgtgctaccacctgtaccacccggggtatccatccacagaaacgtaaaggttgcaatgatattcatatcactaagacaacgtgctaattcaatgtaataaatcactgcaatgctttcactaggggctagtacaaaaataatatcttcttcaactattatttctataccgcgatgtacataacgagcgacttcatttgcgatctcctcgaaaccatccgtgttaattccattaataatagcaaatccctcatcatctagataattatcggcctccaatgtataagatgcataataacaaccaccacttccccttgaaagaggtgaatatagatctgaatttgcttgattaactatcaatttttcatcaataatgatgccattttcttgccatttccgggatatcgaagatttaagtataccttgcataaaaatatcggatttaatgtcttctttttctaacacgcaagaagcacctattgaacactccgacaaacatttgttatcttcaccgatttctaccgggagagctaccattcctattagcgtgctatcttttaataatggcaaaacatactgccacccacggctcccatggtatacaagtgcaacttcattgggtggaatatcaccgagacgtgtcagctcttcccattgccgttttccatcagaaccggatagtaggtgatccatgaaagcttgcccgatcttgtccaatttttccatttgcacgtcataccccacgtaatcgtcgttacaagataagaatatggtcaagataaaaaaaaatactggattttaaataaccaaaaatgattctccttttcataacgttaatttgagtacaacaaaacttttaacaactctataatcgactgtataaaaattctatttctacaacttccaaaacttatgttattttactattgtatcgatgatctctaatctcacctattacggcattttatagttgcattatttttctgcaatttaaacatatttctataattaacaaaaaatacacttgcattttttatgttccgtttgcaaaaaactatatcatactatattaagaaatacatacgttcatccattttatataaattctaaattagaaaaaattgtagagttcaaagaacgttctggaggaatatatagtaacttttcaagacctatcattgcaggtcttgaaaataatccgtagctttgccgtgaaatattctgaaggggtgcctaagaagcgagggatttcccgatacttctacctgccgcgagaaggcagggtaatacaacgggctgagattatacccatgaacctgatccgggtaatgccggcggagggaaagagttataatacacgtgcaaattccgtttgagagcaaccctgatgaagttagtaaacgattaaactatcaggttatgcaagtatttataaacgacaaatccttcgaatgcgctcccggcacgacactccacgaagttctggcagccaacgctatcccgacgggcaacatcgccatcgccgtggactttaacgtcattccccgtcccgactggggaaaaaccgtactccaagacggcagcaagattatcgttatcaaggcagtacagggaggatgaaagaaaagataaaagttaaaaactaaaagttgaaagataaaattagtaaattaattaagatatgagccaagaatttaccatttcaagcggcccgctacccgggtcggaaaagatttacgtgaagggcgagatgttcgacatcgaggtgccaatgcgccggattaacctcacgcccacggttgacacggacgggacgaagatcgagaacgagcctgtcgtggtttacgatacatcgggaccttacacggacccgaactacacggtggacctgcacaagggactgcccaagatccgggaacaatggatcgccgaccggaatgacaccgtgaaactggaaggattgagctccgagtacggccgggcgcgccaaaatgatcgctcgctcgatgccttgcgtttcgaacacgtgaacaccacgccgagagtggcgaaaccgggacaccgcgtgtcacagatgtactacgcccgccaagggatgattaccccggaaatggaatacatcgccatccgcgagaaccagatggtcgacaagatccgggaggcttacaagaaagagaaaggcgagccgctgggcgcgaacttcccggagtatataaccccggaattcgtgcgtcaggaagtggccgccggacgggccatcatccccgcgaatatcaaccacccggagagcgagccgatgatcatcggacgtaacttcctcgtgaagatcaacgccaacatcgggaattcccccatcacctcgtctatttccgaggaagtggaaaaagccgtgtgggccttccgctggggagccgacacgatcatggacctgtcgaccgggaaaaacatccacgagacacgcgaatggatcatccgtaactcgcccgtacccgtgggaaccgtgccgttgtaccaggcactggaaaaggtgcggggcaaggtggaagacctcacgtgggaaatttaccgtgacacgcttatcgaacaagccgagcagggcgtggactatttcacgatccatgccgggttgcgctggcaccacgtgccgctgacgctgaaacgcctcacgggaatcgtgtcccgcgggggagccatcatggcgcactggtgtacgacccacaagcgggaaagtttcttgtacgagcatttcgaggaaatctgcgagattctcgccaaatatgacgtcggggtatccatcggtgacgggttgcgtcccggttgcatcgccgactcgaacgacgaggcccaacttgccgagttgaaaacactgggagaactggcccgggtggcctccaagcatgacgtgcaagtgatcatcgagggaccgggacacgtgccgatgcagaaaatccgggagaatatgcgactggaacaggaatggtgtgacgaggccccgttctacaccctcggaccgctcgtgacggacatcgcccccggttacgaccacatcacctccgccatcggtggtgccatgatcggctggttcgggacatccatgctctgctacgtgacccagaaggaacacctcgggttgccgaaccgggacgacgtgaaagaaggcgtgattaccttcaaactcgccgcccacgccgccgaccttgccaagggacaccccgccgcttactaccgggattacgccatgagcaaggcacgtttcgagttccgatggaaagaccagttccatctcgcgctggattctgaaaaagccttacgtttccacgacgagacgttacccgccgagggacacaaagaggctcatttctgctccatgtgtggggaacatttctgctccatgcgtgccagcgagaagttgagaaaaaaattaaaataatgccatgttgatcatcatcacccctccacacgccctgccttacgaagagtgtatcgtgaacaagctctttgaaagcggattgcacttgctgcacctgcgaaagccgggagctgaccgggaaacgctggaacgttacattcggggtatccgaccacgtttccgggagcgtgttatcctgcacgaccacttcgaactggcggaagaatacgggttaagagggattcacttgaaatacaacgaggcacggacgttcaccgggcggaatcgattcgcgcacgtgagcgtgtcgtgtcactccttcgaggaaatcgacgccctgcctttcgagccaaactacgtctttctcagcccggtatttgacagcatctccaaacccggatacccgtcggctttcaccccggaatacctgaaggaaaacttgcaaaagagacgcgtacccgtgatcgccctagggggaatcaccgcagaaaaagtcgcggaatgtcggaaaatgggattccgcggggtcgctttgctgggacacgtgtgggaacagccgtcggaggccgtcgaccgtttcaccaatatcttacccgacgaggtgctaagtattgccgggtttgaccaaagttccggggccggggtgacggctgacatcaaaacgttcgaaagttgccgggtatatggacttggaacgagcagttccatcaccttccagaatcaaaacacgtatctcgggacgaagtggctcacgccggacgagatcatccggcaatgcgacgttctcttccgggagttcaaccccgcttacgtcaaaatcgggttgatcgaaagtttcaacacgctggaacaagtggtgaactatctccggacggctctccccgaggtaaggattatctgggacccgatactgaaagccagtgccgggttccagttccatgaccgggagaatctaacacagttgcaggacatacttcggaagatatacctgattaccccgaacacggacgagctgaaaacacttttcgggaatcacccggacgtggaaagcctgcaagcgctggcccgcggcctgaacctcaatatcctctggaaaggcggtcataacgacggggcgctggcctccgaccggctggtcaccccggacaaggtgtacaccttctcggtgacacgggcaagacacgggaaacacgggacgggatgcgttctttcctcggctatcgcctcgtatctcacgctcggctatccccttcccgatgcttgtcggctagggcagcactacgtggcgggatttatccgctccaacgacacgaacctggggatgcataaccgcgtggaaagcaccgtcccggaagttgacttgtatcggattcccttgcaatacatcaccgactacaaggaaggggtttctattcccgaacaggtagaggccgtgtgcaaggggggatgtcgctgggttcaactacggatgaaagaggctgaccgggaagagtttacccgcatcggacgcaccgtgaaagagatttgcaaacgtcacggggccttgttccttgtcaatgacaacgtggacatcgcccttgaactggatgccgacggggtacacttgggaaaagaggacatgaatcctcttaaagcccgccagattctcggttactcgaagatcatcggaggaacgtgtaacacgtttgaagacgtggtgacccgttttcgtcaacaggtagactacatcggtctgggaccgttcacgtacacctcgacgaaaaagcgcctcagcccggtcctcggtctcgaaggttaccggaagatcatggaggcctgccggaaagagggtatctatctccccgtccacgccatcgggggcatccgggaggacgacattcaaccgatactaaacacgggaataacaggtatcgccctctcttccttgcttaaaaacagcgaggatataacggggaagacgagagaaacgatggaacaattgaaaataaaagaactccctccccccttcggggtactccctctataaacagagggaaagttgagttactcttcatctttgggaagagtcaccagctcctcctctgtttatagaggaggtggcagcgaagctgacggaggagttcaatctaaaatctaaaatttaaaattagtatggctttaaaaatagcagacaaagaatttacctcgcgcttatttaccggaaccggtaaattcgcgtcgaatcaactaatggaagatgccatactggcatctgaatcacaactcgtaaccgtcgcgctgaaacgcgtgaacatggacggtaaggacgatgatattctggctcacttgaaagcacctcatatcaccttgttacccaacacttccggcgtgagaaccgccaaagaggccgtgttcgccgcgcaactggcgagagaggctctcggcacgaactggctgaaactggaaatacatcccgatcccaaatacctgttgcccgaccctattgaaaccttgaaagcgaccgaggaactggcaaagctgggattcgtggtgttaccctacattcaagccgatccggtactttgcaaacaccttgaaaatgccggggccgctaccgtaatgccgttaggcgcaccgatcggcacgaacaaagggctggtgacccgcgacctgctggagatcatcattgaacagagcaatgtcccggtaatcgtggatgcaggaatcggggccccctcccacgctgccgccgccatggaaatgggtgctgccgccgtactggtgaataccgctatcgccgtatcgcctaacccggtagaaatgggacgggcatttaaactggccgtggaggccggacgtatggcattcgaggcaaaacttgccaaacaataccgccacgcacaggccagctccccgttaacggcatttttggattaaatgagttcataaggtttataaaccttacaaactattaaatatcaagtgaatgacttcattttacgataccttgaaaacctacgactgggacgatgtgaaacagaacatcatggataagtcgaaaaacgatgctatcgcggcaatcaataacccgcatcgcacgttagatgattttatggcgttgatctccccggcggcaacaccgttgctggaggacatggccgtggaggctaaccgcctgaccctggaaagattcgggaacacgatccagttgtacattcccttgtacgtttccaattactgcacgaatttctgcgtgtactgcggtttcaaccacgataacgatattcaccggaaaatgcttactctcgaagaggtacaggcggaaaccgacgttattaccgggtggggattcaagcacctgctgctcgtgtcgggcgaggcgcctgccgtgaccacggtggactactacgagaaagtgatccgctcggtacgggacaagttctcgcagatcgcccttgaagtgcaacctctcgacacggacgactacgcccggctacacgaggccgggttgagtttcgtgtgcgtgtaccaagaaacgtataacgaacaacaatatcccaagtaccaccccaagggacggaaggcaaattaccgctaccgtttggaaactcccgacagggcatgcacggccggggtacagaaaatgggtatcggggcattgctcggtctggaagactggcgcaccgactcgtttttcacggccctgcacttgaaatacctggaaaagacctactggcgttccaaatactcgatctctcttccccgcctgaggccacacgccggggctttcatgcctaaagacccgatcaacgacaagcagatggtgcaactgatatgcgcctaccgcttgctggatcagcaggctgaaatctccatatccacgcgggaaagccgggaattccgggatcacgtgatgcacctgggagccacgtccatgagtgccgggtcgagcacggagccaggcgggtacgtcgttccccacaaggaactggaacaatttgccatcaacgacaaccgtaccccgcaagagatggtcgaggccatcaaggcacaagggtatgaacccgtgtggaaagattgggacacttggatgtagttaacaataatagggtttggtagccgccaaaccttattattatatgcttgataacttcttttaacttttgaaaaacaataaatattcttctccttttgttacgtttgtctttttaatactctaaaatcattttaattatggtagttgcatatttgcgagtcagcacaaacaaacaacatttggaaaaccagcaggaggagatcaagaaatttgcagcccaccggggacttgatattgacaagtggtatcacgacgttgtcagtggaaaagtacatagtaatgaccgaaaactaggcgaccttctggaatctttgcaggaaggtgattgccttatcgtcacggaagtttcgcgattgagcaggacattgattgacataatgaatatcatcaatacctgtattcaacgtaaaattgttcttcatagcacgaaagaagggtacactttcgagaataacctgaacagtaaaatcctaggattcgcattcgggctagtcgcggaaatcgaacgtaatcttatatccatccggacaagagaggctctcgcggtaagaaaagccgagggaaaaaaactggggcgcccgtatggcagttgcccgcagttgaacgtgttgatacaaaacaaggagaagattatcgaactcatggataacagcgtaccttacaagaaaatagccaagaaatataaagtatccatctgcaccgtcaaccgatttgtcaaacaacacattaacgaaagcaagtaacaggagtagaacaaattagaattttaattaccaatgccactaaccaatcaagaacaaaaacgttataatcgacacattatcctacacgacattagaattcaaggacaagaaaaaattaaagaaacgagcatactagtcgtaggagccgggggattaggctcacccatactatattacctcacggcagcaggagtcggccatatcggcatcatggacgacgatgttgtttcggaatccaacctgcaacgccaaatattatacgacacgactcacgtgggaaccccgaaagtcaccgtcgccaccacgaaattaaaacaactaaatccattcacccggattacaccatattttacccggttatcgctggataacgcactggaaatcatttccaaatacgatattgtgatggacgcaacagataatctccacgcccgttacctaattaatgatgcctgcgtgaagctgggaaaaccgttcgtttacggcagcatatgcgagttctgcgggcaagtgtccgtgttcaattaccagaacggccccacttaccgggaccttttcgagtacaatgacgagatcgagaatttctcgcaaccgctgggtgttatcggggcattaccgggaattgtcggttcccttcaagcgaacgaggcaattaaaatcatactggagaaacccggcgtactttccgggaaattactgactattgatatattgaataacacgtacctaacttttgccatccggaagaaggaacgaagagaggaatccttgttcaaataaaaaatgaactggcaatgccagttcattttttattttctctcgtaccccggcttaccgagcagcatgaacatattgttcttgtaggcctccacgcccggctggtcgaaggtgttcaccccgaggataccgccggagatgccgcaagccagctcgtagaaatagaatagctgacccaagtagtactccgtcagttccgggataatgacccggatattcggtaccccaccgtccacgtgggcgagttgggttcccagttcagccatcttgtttacctcatcaacgcatttcccggctagataattcagtttatcgaggtcatgggcatcgcaaggcacttgcaagctgtatttcgttttatcgatggaaagaactgtctcgaacagattacgacgtccttcctgtatgtattgtcccatggagtgcaaatctgtcgtgaaatcaacgctggcggggaatatacccttattctcttttccctcgctttccccgtaaagctgcttccaccattcggcaacgtaatgcagtttcgggttgaagttcaccgtgatctcgatcacgtaccccttttcgtagagggcattccgaacagcagcataagtggcggaaagttctgctccgttacctttgctgtacgcccgcatatccacggcccctttgactaaagcccgaacatcaaaaccggcaatggccacggggagcaatcccacgggggtcagcacggagtagcgtcccccgacattgtccggaataataaaagtctcgtacccttcccgatctgacatcgttcgcaaggcaccctttttctcgtcggtaatggcaacaattctctccctcgccacggtaattccctcctgctcgattaattgatctttcaataaacggaaagccacggcaggctcggtcgtggttcccgatttggaaatcacgcatataccgaatttcttatctttgaggaacgcctgtaactcgtatagatagtcctcgctcacgttatttcccgcgaaaacaactttcgtaccggaataagcatcaaaactaccggacatggcctcgatcaccgccttggctcccaggtaagatcccccgatgcccacgatgacaacgacatcggtttgctcccttaacttgttggcacaagcagaaatacgatccaattcatcatccgtgatgtgaacgggcagatcgagccaacccagaaagtcactccctttacaagttccgtcttccaagtcctttagagcttttgttgctttttctcgttgcacggcgatctcttcttcccctacaaacgataacaccttcgagtagtcaagttttatgcgatccattgttttcatgttttatatattattcctccttcctggctttcagcatatctcggaaacgagaggcactctcgtaatcctcgttcttcactgcctcatccagtaaacgggttaattcttctatcgtgaagttatactcggttgtttcagatttctccggttcaacaggcttttgcccgctaaattctcccgctgccaaatcggagatcgggatggctgtcttggcaatcacgctggccgcgatgtaaatcggacaattatagcgcaaggcaagagcgatggcgtcagaagtacgcgaatcaatcttcagtaattcctcgccattcctgaaacgcagttcagagtaaaagataccggattcccaacggtatatataaacctcttccaaaaccactcccagattatccgccagactcttcatcaaatcatgcgtcaagggacgttgcgagtgcaggtgttccatctgtatggcaatggattgagcctctgcgatcccgataatgatggggatgcggaaggcatcgttctcttccgccagaatcagcgcgtatgctccggtttgtgacatactctgataagataacccgaaaacttttaacttaatcctgtccataagccttgtataactttagatctacgattttctattcttagttgttacaattaatgtaccattccggctcgccagcaccggattcaacgctacgattttttcaacggagccctgtatatacgggccaaaccaccgaggcttgtttcgcgatacttggcctgcatatcgcaacccgtctgcatcatggtctccaccacgtcatcgaaagacaccttgtgccggccatccgagaacaaagaatagatcgcgcattcccgcgctttctgcgagataaaggcatttcgctcgatacagggaatttgcacgtacccccccacgggatcgcacgtcaagcctaagttatgctcgaatcccatttccgcagcatactctatctgcatcggggaacctcccaatatctgggccgccgcaccggctgccatagcgcaagccgttcccagctctccctgacatcctacctcggccccagaaatagaaccgttggtcttcacgatgttaccgatcaacccggccgtggccagaccttttataattcgtttatcactaatctcctgatcgtgtttcaagaaaaacaacacggaaggaacgaccccggccgacccgcacgtgggtgccgtcactatcttacctcctgccgcattctcttcggcaactgccaaagcggcagcaaataccattcccatatggcgcagggttcctgccgattgctgggcccgcacgtggtaggaacaagccttgcgtgccaacctcaagttaccgggtaacactccctcgttttccaagccgttatgaatacttgtaaccatcactttccaaacttcttcgagatagtcgaagatttccggtccctcgtgcagttccacgtactccacgaaagagcgtccctcggccttgcaccactccagtatatccgtcattttcgtatcgggatagacatcctcctccttgaaggtttccagttcatcccacaaagcgccaccaccgacactgtatacttcccaacgatccacgacttccccgtttctcaatgcctcgaacaacatcccgttcggatgatggggcagggatttcgtggattcccatataatttccgtgtcgtccggccgattaatcattttctgaatggcaacatccgttccgtggcccactcctgtcagggccaaactcccgtacaaggtcacccggtagcgctcggcatccggattcttttccttaaaataatgtgcggcacgtcccggtcccatcgtgtgactggaagaaggcccgtacccaattctaaatatttctctgattgatttcacgtcctaattattgttatagattttattaatttcctgatttatgattttagatcaggtgatttcctccctatactaatgtttttctgaatcataaatcgtaaattaattgatttacaattaaaaaaaggcaggcctgtaagccgggttctgtaccttgcggtttctatcatttatctactccgaggatcactccgcggctctagcgacctaccccctggcatcggtcgggcaaacctaagcgccagtgtacatggtcttgcaactcgtgaggtgtacggctaccccgatcacccgggataccggtgggctcttacctcaccttttcacccttattccgcgaacggaacggttattttctgttacactactgccccctctcggagaccttcccgttaagaagcacgatgccctgtgttgcccggactttcctctctccctcgcgggacagcgatagaacggcctgcctttatattttagatttacgattttagattttagattccaaccgcacaaggccaacgtttctcactctaaactcgtta

SEQ ID NO: 10696 - DNA, 55931 bp, Unknown
  gut microbiota DNA sequence
ccatataacagggttgaaaaagtttacttgctcccagtaaactttttccagaaaaatacatttgtatttttatctttttttcctattacggaaaaggaaagccccgaacggcaaacagattccggcaataacgatctggtaagccccgtataaaacacgagtgtcgttagccagcgcattaccggcaaccgacatactccctccttccttgtccagaccgagcgtgatcatctgccataaaactacgaatgcggcaagcagcgaaaaaaacgatccgagatacaacaagcccatagacatatcctgctttgcctctttccgcaaaccaaaaagaaaaacaagggcaaacatgataaacgtgaaccaaccaacggtttgataccccatgatcattcccaaactaccgatttcataccaaggcagaaacgtcgcaatcataccaatgatggcgatcaaaaaaatgacaattttttgcttactcataacatccgatatttttattttcaatataaatttcactctttctaaatagggtttacgtgacgaataatgatgaagttatcaatactttatttaaaacaagtataaactcgttttttttgaaaatatttaccgcttttacttgaaaatcgcaagaacaatgagtagtttcgcgcataaatattggaacgagagaaatattcgaagaacgtgcgccataaataagctaaatgattaaaatataatatctaactttaatgtttttttgttatgaaaccaacacatattgaacacatcggcatcgcagttgccagtttagatgaagcaatcccatactatgaaaaagtattaggtttagaatgctatgctattgaagaagtaaaagatcaaaaagtaaaaacagctttctttaaagtaggacaaactaaaatcgaattactggaatcaactgacccggaaggccctatcggtaaattcgttgagaaaaacggaggtggtatgcaccacatcgctttcgctgttgaagatgttcaagccgcattgaatgatgcacaagctgcaggttgccagttaatcgacaaagctccgcgcggaggtgcagaaggattgagaattggattccttcacccgaaatcaacattcagagtattaactgaactttgcggaacgaaataatttcttttaaataatcagctcatataaattttgataatatgacaaatcaagataaagtcaaagagttaatcgaattacgcgcgcaggcaaagcttggcggaggggaaaagcgtatagaatcccaacacaaaaaagggaaatataccgctcgcgaaagaatcgccatgttgctggacgaaaatagtttcgaagagtttgatatgtttataacacaccgttgttataactttggaatggaaaaaaccaaattcttgggcgatggtgtggtaaccggacaaggaacaattgacggacgtctcgtatttgtttttgctcaagacttcactgttttcggaggtgccctttccgagatgttagctcaaaaaatttgcaaggtgatggacaaagccatgaccgtgggagctcccattatcggattgaatgattcgggtggagcccgtattcaagaaggggttaactccttagccggatacgcagaaattttcgaacggaatattctcgcttcaggagttatcccgcagatttctgcaattttcggtccttgcgccggaggtgccgtgtactctcctgccttgacagacttcatcctgatgactgaccaatcatcatatatgtttgtaaccggtccgaaagtagtgaaaactgtaacgggagaagatatcacaaccgaagaactaggaggtgcagaagttcactccacgaaatccggtgtttctcatttcttggcagaaaacgaagaagagggaatctctatcattcgcgatttgctttcttatttaccttccaacaacttggaagaggctccgattgccatatgcaatgacccgattgaccgtctggaagatcggttaaacgagataattcctgataatccgaatttaccgtataacatgatggatgtcattgaagccatcgtggataacggaaaattcttggaagttcacaaacgttatgcccgtaacatcattgtcggattctgccgtatgggtggacgttctgtcggtgttatcgctaaccaaccaaacttctatgccggagttcttgacattgaagcatctcgtaaagctgcacgtttcgttcgtttctgcgactgtttcaacattccggtgttgactttggttgacgtaccaggattcttaccgggacgcgtacaggaatatggtggtattatcactcacggggcaaaattgatgtttgcttacggagaagcgactgtacccaaagtaaccgttactttacggaaatcttacggaggtgcacatgatgtgatgtcatgtaaacaattgcgtggagacttcaattacgcttggcccacggctcaaatcgccgttatgggagccaaaggagctattgaagtattgtacggtaaagaattagccgctatctctgatccggaagaaaaagctaaattcattgccacaaaagaagatgagtataactcggctttcgcaaacccgtacaaagccgcttcatacgggtatatcgatgatgttatagaaccgcgcaacacgcgtttccgtattatccgtgctttccagtctttacagaccaagcgcgttgttaacccgatgaagaaacattcaaatataccgttgtaagccatatgatcacattagcaataaactggggttacgcactcctcgttacaggcgtagggatgctgacagtattcctgttattggttcttttgatcgtgattattaattttcagacaaaactcacgagtcaagtaggaggtcatacaaaaacagtccaagagccggaaaaagcagccgtgacaacggatactcatcccaccccacacgaacaagctgccattgctatggctatgcatctatattttaacgctcatgatgaagagcctcatgtaatcacgatcgaagaagttgaaaaacgttattctccgtggagctctaaaatttatggcatgagaaatcttaataagtaaaataaacagattatgaataaattcaaaatcaccatagacgaaaataatttcgacgtaactgtaaatataacggatcatgacaaagctacggttgaggtgaatgggatatcttatgacgtaacttacgaaagcaagaatacggttgctcctgccgtaactcgcaaaccggcagcgataccgacatcaaccacgtataagagttccgcacaaactacaacttccaacaagacgaacgcaattaaggctccgcttcccggtaccatatccgcaattaacgttaaagttggcagccaagtaaaacgcggagattgtttgcttgtaatggaagctatgaaaatggaaaataacattgtagcaactagcgacggtcaagtgaaaacaattcatgttaccgtaggtcagagtgtttcacaggaagatccacttgttgaattggcttaattaccgtaaaacatttgaaaatgaaacaagtagaaaaatacctgctaaaagtagccttattactcggaatatttatcatgccttttgccgccagtgcagaagagattgatatgaaagaaaaagtagccaaattcctgaatgacactggatttgctcaactttttgccggggattggctatgtttagtcatgatagttatatcttgcatactattttatttagctattgtaaagaaattcgaacctttgttattattacccatcgcctttggtatgttattgacgaacttacccggagcagggttatatcatccggaacttttcgaaggaggacatgtacattgggaaaatttctcgatttccaataacgttggtttgctggattacctttatttaggagtaaaactaggaatttatccctgtattatttttatcggtgtaggagcaatgacagattttggtccgctgttggcaaaccccaagagtttccttctgggagcagctgcccaacttggaatttttgcaacattcttgggagcccttgccctcggttttacctatgcagaagcaggctctatcggtattatcggtggtgctgacggtcctacagccatttacttgacgtctaaactggcacctggattgcttggccctattgcagttgcagcctactcatacatggcattggttccggtgatccaaccgcccattatgaaagcactgaccactcaaaaagaacgggaaattgtaatgaaacaattgcgtaaagtttctaaaaaagagaaaatcgtattcccgatcgttgtaaccattttcgtatcattacttttaccctcggcagcacccctaatcggatgtttgatgctaggtaatttaatgcgtgaatgtggagtggttgatcgcttaagtaaaacggttcaaaacgagttaatgaatatctgtacgatatttttaggaatttctgttggagcaacaactactgctaccgcattcttgaatttccaaacattggctattctgatcattggtattctggctttcagtattggtagtgctggcggtgtattactagcaaaatttatgaacttattcaccaagaacaagatcaatccgttgatcggttctgcgggagtttctgcagttccaatggcagcccgcgtatcacagaatgtgggacaagaagctaacccaggaaacttcctgttgatgcacgccatgggtccgaatgtggccggagttatcggttctgccgttgcagccggtatattattgtcattcttaggataacttaatatcttggactacctcaaaataaatttgaggtagtctttttatattctgtttattatacattattttcttttggacattaaataattcattctattcatgggacttagaggtttcggcagcgacaatttttccggtgttttaccggaagtattcaaagcactagaagaatccgcctttggacatcaacattcttacgggaaagacaagtacacagcaaaagccatcgaggattttaaacaaatcttcggagacgatgttgacgtgtatttcgtttataatggaacgggagccaatatattgagtctctcggctttcactcattcatataatgcgatcatttgtgcggaaacagctcatatcaacgtggacgagtgcggggctatcgagaaacaaaccggcagtaagttgttgactgttcctacatttgacggtaaactcaccctcggattgattcacaatcatatgcatggatttaacgaccaacatcacgctcaaccgaaaatcatctcgctaactcagtgtacggaactcggaacagtctacacgcatgatgaattaaaagaaatttgtgacttcgcccatgcccacgatatgtatgttcacatggacggcgcccgtctggcaaatgccattgcatacctaggatgtactccagctagtatcacgagagacgtaggaatcgacgttttaagcttcgggggaaccaaaaacggcatgatgttcggggaagctgttgtcttctttaacaccacgatgtcgaaagaggttaaatatatccggaaacagttgatgcagctacattccaaatcgcgctttatcgccgcccagttctcggctgttctaaaagataatttatggttgaaatcagccgcacacgcaaatgccatggcacaaaagctcgctaacgcagcagagcagattccttccgtgagcatcacgcagaaggttgaggcaaacgagattttcgctatcatcccgcgagaaaagattaccaaacttcaagaggagtgtttcttttacgtgtgggatgaagatgcggccgaagtaagatgggtttgctcgtttgacactacagaaaatgatgtcatcgaattcgcaaacctattgcgtcaagaattatgctagaagatggatagagaaattattaccactgaagacggaagtaccaccctgtatataccggaactgaacgagcattatcattccattcacggagccatacaggaatctactcatatatttataaaagcaggcattgaatactacgggcagaagaatatccggattctagaggctgggtttggaacaggtctaaatgcttttctaacgttgcttgaggcgagagataatgaacgcaaagtagtgtttcacacgttcgagaaatacccgttgacacctcaagaagtggaacagattaattattccgacctcttcaccccggaagatgctcccctgtttcaacaattacatgacgcaccttgggaagaggatgttgtcatcaccccttatttcacactccacaagcaccgggcagatttcgaagaagttaattttcacgaatatttcgatatggtctttttcgatgctttcgcccccgacgtacaacctcgcctatggactgaatctatgcttaccaagttttacaaagcgcttaaaccggaaggaattctcacgacctactgcgttaaaggaaccgtaaaacaagctctccgtaatatcggttttaacttgaaacgtcttcccggtcccccggggaaacgggaaatgttgagagcggtgaaataaattttaaattccagccgcacaaatcaacgctttttcaatcgtaaatcggaattcataaattgtaaattattcgaatgttttccaaagacttaaaacaattacttgacgagaagtatttagaatacaataaatcggaattctttatagaaaccgatccgattcagataccgaagtgtttcgaagaaaaagaggacatcgaaattgccggattcctggcagcatcattagcatggggacagcggcccacgattatcaagaaatgcaaagagttgatgcaattaatggattatgcaccccacgatttcgtgatgcaggcggaagctcaagactacgaacgtttctgcaatttcaagcaccgcacgtttaatagttacgattgtgtttactttttaagatccctagcgaatatttatcgccatcatgggggattggaaaccgttttcacacgggcctaccaaaaacatcaagatatgtttgaagttctaaaagagtggtattctgttttcacctctttacctgccgaggcaagagtattgcgacatattgctaacgtggagaagggttcagctgcgaagagggtaaatatgtttttgcgctggatggtgagacacgacggagaggtggattttggcctgtggaaagatattccgacctcagccctattgatcccgcttgacctgcacacgggtaacgtgagtcgtcaactaggactacttacccgtaaccagaatgaccggaaagccgtggaagaacttactgcacgtctccgggaaatggatcctgtcgatccgattcgctatgatttttcacttttcggattaggggctttcggagaaatataaccgttctaatctttaaagcgtttcaagtccgctgaagtaaatccccattccggagtcagaatatttcccttcccatcgagggtgtaccacggagatttatcacgttctttcaggtttaccagcacctgaatatcttgagccggcatataactttggaccagcaaatataacttttctcctgttgcgggattctctgccatatcgaccacgatgaccgcgtgcccgggtgaaccgccttgaataagcacgtccccgatctgcatggaagtcaccggtacggacgttaattccttcgccaaagataaagtcccggcataagcgaacaccacgtccagataggctctaaaagttttataagagtaatctttttctttggatttgtaccaagaaacttgatttcctttcacgctgatccggtaaccttctgcccatttcgtgtaatcggcacggaaaccgttcgtgaagttaaagtggatccggtcatacgctttatgcttatataggtattccgcctgcaaacgaatcacggcatcggcacattgttgcaaatcccgcttaccgatctccatatccaccacggcacaatacacgcttcggttccatttctcccggccatcgaaataatgcactttagtcccgtgagaacgcaaaggaaggttcctcaggtattcaccaaaagaaccttccttcacgtttaccctcgcgtatccctcggggggaacaatccgggtatggatttcttttccatccgcccggagcaaagtgttctgccctatcccttgcagacaacaaaacaggacgatgcagaggataatgcaatttttcatattaatccagtaacattccagccgcaacttcttcagccactttcttggaagttaattgctccaaaatagccagaccgaatttgaaagcatacgccggacctctacccgtgatcacgttaccatcaaccaccacgccatgaggttgcatttcggctcccggtaaatattcttcaaatcccggatagcaagtcattgtatatcttttgttcatttttatcttactcaacaccaaagccggagctgcacaaatagccgccacgtaaccacctttgtcaaagtgtttctgaatcatttgcaccaatgccgtacaatctcccagattcttggctcccggcattccgcccggacaaatcaagaattccgcctcttcttcttccacgtcactcaacaaaagatcggccaccacaggaactccatgcgcacctgtaacctctttcttatcggaaatagaaaccgttttcacttcgatcgttccccgacgtaaaacatctacaaccccgagagcttctacctcctcaaaaccatccgctaaaaataaaaatgactttctcataattcttgtagttttaaatgattctccaaaattacgaaaaatataacaggtttcaaatcctaaatgacaaactactccttcacacgcaccagtttcacggcatcagcaatgatcagttgcttcttaactggtaatttatcatccggcacgccatgaacttgcactaaaccggcacttttatcctctgcatcagccttgatctccccacccctgtcatccagaatcacttgagccttcccgaccggaaaatcgaattttcccaaggaaacccacccgaccggaataatatccgcttccacgatcacctctttttccatcaagctattacataccttgtaatgcagcaaagaacccgtgaaaacggaactaatcgggggataagtaagtgatgaaacctgatgataaaaaaagacttcatatttcccggtttcctttatatctgccgtccagatagcctttcccgtcccggttccggaaactttaccaaaagcactccgcacggggattccatagctttctgccgtgaacatttctgtccattccttcttctccaatgacgccttaaaagtcgatttacgctcctttgtcaagaacggtaatcttttccgctccccggaatcaatcaactggaattgttcactccggttatcaacaatgatctcgccggaattttcgaagaaacgacgatcaatatcccaaatgccctccatgccttcccttattttggaaattccttcttttactaaaggaatattataatcaccgggaaaattagccgccaaattcgtcccgatgtaaccatgatccccgttcatgataaattttacctccttgcatactccggccggaatcatgtaatatttctctctcaggggcatattaaaatccacggcaatgcctccttctcgtttcgacataaattcatccaccgtttcatcatcagcaagaattgatataaccccatccatatccgacatattccatactttaaaacaaacttgatatttcgggaagccatccgtaataatttgctgtacctgaatatctcttatatcaaaagacgggagcccctcccgttggtataatttatccataaacggaagtaaatcaacccctagatcaacctgaaaattccgagcgatctgttctaaagtaatttcttcaaattgagtgccggaagagagctgttccgagaattggtacaacttttcgggggcaacagaagtagataaataagctgccaatgctcctgcttccaactcgaaaattcttgcctgtactttatccggtaacgaatcgttagaaagaatttccttcaagctggcttgctttaaacaatcaatagctaacatatcatccggtctgagaccggtatttcctattgtatatttctttttagaaataaacattttgctaagtagcatattggctgccggataagtacctgaagacaagaatcccgtgaaatcgtaatacataggcaaaatgtcatgtaacttttgttgaagcaacgtgacgttagattgcaatcccatacgttcaacactataaatcccttccggatcatccaaattctcctgtctttcctttgcaaattttttcgcaacagtcatcgggacgtaggaaggaatacttgctgcccgttctcccaaaaaaacaaattcaggctggacaaattcgctacccgttttccatttccgtaaaaaagaaacaaacgagagaggactttttaccaacatcaatttttgaaacgggtagccccgcccgattcttgcctccaaacgtcctttgagcatggccaagaccttgctcaatttctctccctgaatttcagtatacccctcgaaaaacaattcatggccgggaaaataataaaattccacatgaagattaccgatctcgatttctttcttatggtagttcccgatacaaagcgttatcccgggtaatttctgccgattcttgaaaaatacttcacctgttccgtattccggctcgccttgcgatagaacctgttgtccatcccgtgtttttacccgcagagtatattccgaaaaatttatttcacgagcgtatggtgataccatattgatcggggggacagctaccgggtaccaaagaatttccgggtgtaacaaggtatagttttctcccagataagcaaaacgagttccgaaattgaataatccacgtcgctttccgggatcataccttcctacattatgccgctcttcaaaaggcacatccaagtagcatatcgcctcatcaattttacctttataggagagatgcaaagaaatggtatcacccggcaaaagctggcgttcaagcacgacaacctgcagatcccggtgataccccatatcgttacctgcctcctttagagaataaatctctaacgaaggattcaggtacaacacgatctccgagagcctttcctgattccgattctgtaaggtcatcctgctatccaaccacatctctccatccttccactcgtaggagatttcatggttggtaacccgtgctttaggtcgggattgatattcgacataagcttgcctatactcttctgaacggcactcccgctgccgaattgcatcccaatataaaaacaaacagatcacgctgcacaatacaaccactcccccacttcctcattgcaatccttgatgttctttatggtcccgcagacgtttcatgttagcaacccagaataaaactccggcaacacccaacccggtataagtcaagcgatgcagcaaataccccttcaaatcagggtgtcctaccacgtccgaaaacatattcggcaaattcctgccccaaaagtcaaacgctccaaactgccactcatccaaatagaaatatacacccaatccaaaaagtcccagaactaaaacagatagcggacgatttttgaccattgccgatatactcaacgcacaacccaatacaaaaattaaagtcgggatggacaaggtgaacagatagaaaacataaatccacacgttaaaaggggctcctacaacccaaaggtttatatacatacataccaacagcacgcatatattcacgaaaaggaacatcctgaatattcctagaaaacgaccgatgcagtattcactgttccgaaacggtcggcacaggaatacttccatcgcgtcttttttcctttcccggtacacgacctccatgcacacaaacaaagcaatcaggacttgtaccaggttatagtaatacatactaaaaaaaggaaaagaggaaggaagagccactttataccaaaacacatttactcttccttgctttatcatctgccataacgaaataccgacaagggcaatcactacaaatcccagaaaaacaatatctcgtcttaacaatttagactcatagcgagccacgatattcacgttacgcatattcattttatctacccctcctacggtgccagattaatattccacaaccaattaataacaggggtaatatccccacgaacatcagtttcacccacttcatagatgacaattccagtgaaatcgaggtatcggcaggatcgggacgacgggtattcaccgggaattccccatccgtcaaccaacggaaggactccgtgatcaacgagaagttggacgccttgatacccttccggtacatcatcagttcggagttactgatacaatccgcatctcccaacacgataatccgttgttcccggtttcccatcttccggctcaaagccaaggctatcgggtaaacaccttctttttccccggcaacagggttgagttctaccggctcattcaataaatcccgggtttctatctcgttccaacatcccgtgtcatgcgtggtcaaaacaggacgcaccataaaacctttatccattgtatagtttaacgccgtagctccgggcatcgtgatcacccgttttttcttctgcaaatcggcatagttaagggacatctccgcggcatcttttgtcaattcaccccgaatcagatccggatcgaaatcccgactgggttgtaccagaacaccgggcataaactgcaccccgaaacattccaccaaaggattcattacttcctgacgccccggttctcccgcaatcaacaaatttcctccacgggccacgtagcggtcaatcttttccaactcgctttcggtcaacggttgtttcacatcagcaatcaccagaatacgaatatcttccggaatctcctccccctcggtcatgcgataggcgatcacatcaaaaccattatttactaaagcataacgaaaagtcggattcttggcaaaagcataataatcccgatctcccacgttgttcatatcccgctcgccatgtcccgtaagacaagccaccttgggtacctccatgatcaggcgtttcagagccgcggaaacctctgcctccatcggatgtacaaacatatcattatacaaccgcaggaaagtggccgaaccgtcgggtaacaccaactgccgcacgaaacgataaccttccggagcaaggtcaatctgggcctcgatctcttcgggagataaaaacattttcagattcaatttcatctgatcaacatatttttcggccacctcccggtcgctcacgtctgcataccgttctcgtatgtaggaagacgcttttttataataatacacatacttcagctcgatattcgatttgaaacggatgtacggtttgaagttttccatgtcactcttcagggaacggggcatcccgtaagaagagttatctcccaaaagattcacgtaagtgacaattgtcaaatcgtctttcatcctttccagtatactttgactttctttagtcaatgtttgtgtcttacttgctgtcgcatcataataccataaaaacgtgggacgagaagtcatataccctaatgccacggtaactgcaatcacaacaagataacgtcctaccgtcatcacttgactccgttttgcccggtgagcctcgatcttcatgattcccaacgtcaggaaaaagagaatgaccacgacaaaatacaggaagtcctcactacatatcaacccgtcaatgaacacggttgcccgccccttgattgacaaccaatacgtgatttcacgcacgaaagctatatcctgccccacactaccgatgaaattcagcacgattaacacggccaatgttcccacggccgccacaacctgataagaggtcaggctggacatataaagcccgattgccgcgtaagcacacattaacaaatacaatccgagtaaacccgataaggccgcagaaagatcaaatgattccaccgtgcaacaagcaaaaagaaccagaaccagcaacacgcccatcaatatcaacccgtaaaccatcatagaaaggaattttccccaaatgatctgtcccgctgtcacgggggacgagtacaggagtttaatcgaaccgctaccaaattcccggctcatcaatcccatcgtcaacaagggaacatatagatacaaatattgttgtatcaccgtaaatgttcccgacattcctgttaacagagccgtcgtgatactatattctatcggttcccccataaattgttgtcgcaaaacactccggaacaagtcggtaaaagtcattcccgactgaacggcaaatatcactaaaataaaccaagccacgggagaacaaaagagagcgcgcaactcatttcccgctattttcaatatctttctcattcgtttacaattacgttatctccgtcttcttttaaaccacacgccaaaataccccaacgcgaacaagatgggtaatccccacgtgaaagcaaatttcgcataaggtaccgtgtccttactcaattccaacaccgtatccacgggcggtatattcgacaaaacgatcgggaattccccgtagctcaaccaccggaacatacccgtgattaaagagaaattactcgttttcatcccaactctagacatcaataactcggcattactgatacaatcaacatcacctaacacgaatatccgctgttcccggtctcccacgttacgagtcaaggcaagcatcgtcgggtaggactgttcttgctccccgatttccggatttaatacagctttttcgtccgtaaaatttacagtggttaactcgttccaacttccctcgtcttttgtctttagcaaaggatacacattgaaaccatgtccgtttttgtaacttaacgcagctgctcccggcatcgtaaccccatatttttgttgccatagtccccgcaaaggagtcacgacattcacaccctcctcaacaaaagagcaaaccagcaaattatcatcgtaagctttcgtcggttgtactaaagttcctggcaggaaactcacgcccagagaagccgtaagaggattcatcaaatccgattttcccggttccccaccaataacaatattcccgcctttcgctatgtattcctcgagccgagccaactcatctgttgacaaaggacgctgtaaatctgcaacaactaacacgtcaatatccatgggtatcggccgatcccccatcaaggtaatactatccacatcaaacccttgattaatcaaggaatgacggaaagtcggatcaatggcaaacgtgtaatagtcccggtctcctgcccgttgaatatcacgttccccgtgcccggtcagaaaaacgaccttgggggctttcgtcaccaaacgtttcatggccgtggagatttctccttccctcggataaatgtaactatcatcgaaaatccgcaaaaaggtcttttccccgctttcccgttccaacaaacgcacgaaacgatatttttcacccgaaagatcaacctgttgggctacctgttccgggctcagaaacatctctatatccaaatcttccatgaccgccattttccacgctcgttgttgcgtgttcagatcggggaaacgatcttccaaaacctcgtttcccgcgtctgcatagtaatacacgtagttcatctgaattttcggtttaaaacgaataaactttttaaatcgatttgcatcactattcctttccgaaggagccccccgataaaaattaccttccaaaagattcacgtatgtcgtaattgtcagtcctccctccattttttccataatctcctgactgaccggattcagactattcagtttaatggacgaggcatcgtaagaacattgcaatcccggccgggaggtcacgtaccccaacagcatcgccaacacgatcaccccggtataacgggtaaaagccatactttttgataacttgcgtttccccgacaagatgaccataatcgaaagcatcaggaaaagaccgatcacgatcagaaaataaaacacatcctcactgctgatcaaaccgttgattaactcgtcggaacgcccggaaattgacagccaatacgtgatgtcccgaataaaaggaacttcctgtcctattcttcccacgtaattcaggaaagccaaagcccctaacgtggcaacagccgccaccacctgataggaagtcagacaagacatgaacagtcctatcgctgcataagaacagatcaccagataaattcccagcaaccccgataaggccaacgacatatcaaaagaaggcacgttccatgccgtgaacccgacaaacaaaaagagaatccccaccagaataaggctgtatatcatcatggaaagaaatttcccgaagataatctgtatgctggacaccggtgaagaatataataatttgatagaaccgctactatattcccggctcatcaatcccattgtcaataaaggaatatacaggtaaagatgcaccaacatattcgggaacaatcccatatttcccgtgtacatctcttttgctatactataccataaaggcttgttaaattgctgcatcaacataatgtccaccaaacggaaataggtcatgcacgcctgaacagtaaagataataaggactaaccacgcgataggggaatagaacagagtgcataactctgtcaacgctatcttgaatatttttctcatactacacgaacttatgattcacgtttactttttcccgacaagcgagcgaacacttcatccaaagaactccgctccacggaaacctcgcttaactcccatccccggctgacactctcgtgtaccatccgggctgtcacatcgtcatccgtatcaaaccataccctgaaacttttcgaatttattgcctccacccgactaactcccggcacgtgttccaactcggtcattctcggcggattcttcagtaccaccacgaacgaattcggttggatataattgttaaactcatccatcgtccctgcgaataccagttgcccttcctcgatcatcttgatgtggtcacaggtggcctgcacctccgacaagatatgcgtggaaagtagcactgaacgatccgtagcaatctccttgatcaattcccgaatttccaggatctggttcgggtcaagtccattcgtcggctcatccaacaccacgaacttcggattgtgtatgattgcctgcgcaatacccacccgttgctggtaacctcccgataaatgtttcagcaaccgttttcggaaatgcgtgatcccgcatttctccatcgcgtagtccaccgaagaacgaatctttttaggagcgaccgaacgcaaatccgcacaataggctaaatactcttccacggtcaaatccgtgtacaacgggggtttctgtggtagaaaaccaatattcattttagccgcaatcgggtcctcccgaaaattaatcccgttaatatacacttccccttctgtctggttcaacacaccacacatgatattcatcgttgtcgatttacccgctccgttcgatcccaacaatcccaatattcccttctcgtaaatctcgaaattaatatcccgtatcgcccattgcacactataacggtgagacaaatgttccacctttacaaccggattctccatgttattcattttaaaaaattaactattatggcaggtaaggctttcgtcacaccttacccgcctgtattattataaactatcttccttgagctgttatatctgaaatcttcccgaaaccgtcatatttcacctgcttttcctcatccagatttcccgttcccggatccttttgcggaatcaagtaaacatatccttccgaatccgatgcctgcgttgccatcatcacggctttcgtgttcaacggtaaggtcagcaaactttccgtgtcactgtcaaagtcttccgaattgacattatatcttccctgcgtgtagaatttcagaatactgatattctcccccgcggccgccgtgtatttcaacgaggaagcaagcgaaccatctatattcaaacgaaccgcatgaatctctctggccgttgccacgtacataataggatctactgtactgaaacaaattgacacggaacgatccaacaaatccttgatggctgccggaaccgaatacaagtaactcggtgtcgggttaaccaacgtattatcctgatttttagtaaagaacgtgtaaagagaatattctcccgatactttatccttcaacaccatcaccaaggaagagctattcatgaaacctccggccacggcttctttacccgccacggcagaaggatcgaatgggaaattgtcgtcattctcagaagaggaatacaacgaacatttgttctgcgagaaagccccgttaaaacgcccgaaacgtcctacctgtgaatcataccagatcgacgatccactggaatgagtcccatcgcccgtagccgcggcaaccactcgattatccacgtaattggactgcaaaccgcccaagtcggaaatcacttccggcttgatgaatatcgcatcattctgacgaagatgctggtacacctgattattcatcacgagaatcgtcgtttgaggtgccaaatagaaatgtccggaagtgtatgtctcggtcacgaaaggaataattttacccgtttccaagaaggaatagtcccggcaatcagcccggaacaatccattttttccggccatccacaggatattctgataggtactccatgtcgctcccgacacggtataggccacgttatcaatccaatcacccaaaggctcccccttagaggtgaaaatatcatcgtattgaattttctccgttcccgtgaatcccttgctaatgtctttatccatgattaacgacaaatcggaggtctccccatcacgggaatgagccacgataataccttccccgaattggctctccaccactagagaaaagacagaataatatttaagcgtggaaactttgtccgtcacttccaaggtcaacgtgtaaccactagcctgaatcggcatggaagcaatcgtgtcaagcacccgttcgttcgacaacacttctctcaatcccgctgacgaacttaactcgatctcccatttatattccaaatccggatggtccggggttccgtttttcttcacgggaatatcaatatgcaatttgcccaaatacgccacgtactgcgtttccgacacaccattcaggtctagttccacgttaggaatttctttcgtgtcataggtactcttgtcgtcataacacgacacgaggccgtatcccaacacgagcaacaacaggtaatatattgttttcatcttcattatctttaatccgttttatcaaaactttcgcgctctcacgggttggtttatagcaagtcctccatcatgcaacaatggggttccatgttcctgttcgtaatcatccagatacttctgtaacaactcgtagtaagcattcgtgattgccgtattatagaacatatacccatccgggtccatccggttatactggggccactggtccgcctgccacggccaccctaaagcggccagtatcgccttatgcgcattccggctataataattatagttcgccagattcatactttgccctgcatttattaagaaattataagttcgggcataaaatgaaccactgggaagcatcggtaattgattatcccacgaaaacttaatgcgtgtatattccggtgggccggccacgaaatattccgaagcacccaacacaatttccatcatacacgtcgtgtcttccaattcaactaatttcggcaattccagcgtgagatacccgtaacgttccccggcgggaataacggcattcaacaccttatacgatccttccaacaatcggctgctatcccggacgatcgtgtaccctaccgtccggtcgtaatcccggacgtccccgaccaactttaacgggatattcaccaccatcgtctcttcttccggatcactccaaaacgaataagtctgatcaaaagtcttcgttaaggagttatatcccggataagtcctcacgtccacgctattccatggaacggttaccgtggcctgggtctcgtcaaatgtatctattcccactttcgagcaaccgccgcatagcaaaccactcaaaagaaaacatatcgcgtacagaaaattaaatctgttcatatcctttcatttatagcattattaatcatcattgaacacgtcccatttcccgttcaatagcgggataaggccacaaatatttttcgtcactcatcacgatggtcgagtttggaatatccgctgctccaatacgcttgaaatagaagaaggacaccccctcgcacaagaactcccgccgatattcattcatcaggcatgttaataactcgtctcgtgtatagccactaatatcaatatagttcgaacgattctccctcaacgtcttcaaataagacacggcctcggtcaaatcaatatttgctcctcgcaaataactctcggccacgatcaagtacatttccggaagacggatcaaaggcatgcggtttagttttaaatatcccgatgaacgatcctgcgctaactttaacggtgtataatacccgttggaattcctgaagaataacttttcccgacggtaatcggcattttccccacttcccgtttcttggtaaatattaagcaaattatcctcactcaatttgatagcttcatacgccgtaccttccaagaaattataaagataataatccgtcaaacgatccgtgaatgccggaatatttaaagaagtaatatgttccgtggaatgaatcgggtctgtactaaccaaatctgtcgtcacccactggtagagtcctaaacgctcgccttcacgaattacatccgacgcttcttgacgagccgaagcgatggatgcatcacttccctcccacatatatactcttgccaataaagctttcacggcaaaataattcaaccggaaagtacggtcactgaagaacccgtcgtcattcaacgcatcgtaataatctgcaggatgttttcccgtgataggctcatcatccaataatcccaaagcatctgtcaaatccttaacaatcaattctatcgtctgatcatacgacaactggggagtcatctctttgtcataatccgtcacgtacggcacggttggtttcgttgatttatccgttcgaccagccaaattcccgtacccatacaagcgcatcatatcaaaatgcaacatggcacgaatagctaacaattcgcctttaatcatccggtaagaagccggatccaacaccccctgacgcttatctataaatttcaacgcgttattcacattggcaatcacgttatacgccttctgccaaacactgttaagcatactcaatgcccgctgggccgtgtactggtaggttcccattgcatacacgtaagcctgcgagtgaatcgtgtactgcccgctttgcatttccgtagaataccacgtgagctgtttcccgtataaatcaacatccgccataccgatataacaaccgatcagggcctgccggaaaccaaattcatcatcgaactgatcttcttccggtacttgcgaagggggtgtcgtgtccagccaactatcacaagccaccatcgtgcataatatcacacacaacacgatattttttattattgtcttcatatctaactaattaaaatgttccaataagcgaaaacgacatcgttctggcaaaaggataatcaaatcctctctcggcctttatagatgagattttcgagatctcttccatatagaaagacactctcaatcgtttcattcgaagatatttaagtatatccgcctgaaaatcataatacacgttcaacgatccccaagtcaattccttcgcatcctgcacgaaacgagaagttgcccttgtcatctcctgacgtgacaagggatcatcgtcataccggaaagttcccaaacgtttaaaaggagttacctgtcccggttctttccaacgaccgtacaatgcccgtttgtcaacattataattcatgtccacgttctccacccggtctatcaatgtcctattataatactgatacccggcttggtaacggaaagtcgtgctgacaccaaatcctttatgctcgaaagtgaaaccgaaagttcccctgtatttgggtaatgaattacctaccgggtataaatccgattcgtaatacgtgtaggtcagtgaaccatcctgacgaatataaagttcctgtcctgtcatcgggtcgatcccggcagagcgcacagcccaaattgtttccatggactccccgtccacgtatttcagcaccggacgattatttgctttatccgaagccatcttatcccgtagctcgttgaatgcacgcatactttccgacaaccggataattttattcttcgtggtcaccaatgaaccgaaaacggtcaagaatgttcggttctgttgcaacactccataagaaagataagcctcaattccactattccgtaccagtcccaagttatctttcacggtcgcaaatcccgtacttgtcggcacagaaacatccgtcaacatattctccgtatcggcccggtaaagatcgaaacgtaacgtggccctatgaatcgttgcatcaacccccacgttataatcttttttctgttcccacttcaacgaggggtttgccaagcgccctaaataggatcccgtcatacccaaataattcgcatccgtgtaatactggtaagttgccactgcttcattggtatcaaaattctgatttccggttaatccgatcgaaccccgaactttaaattgacgaaccaaatccttccatgggaaaaaatgctcgttatgcaagttccatccaactcccacggaccaccccgtagcccaacgattatcgtttccgtaaagcgaggaagcactggtctgcacgttaaaatctagaaaataccgatcgtcatagctgtaaccacctcccaacacgaaattaatctcccgacgcaaagatgacgatccttccggacgactgtccaaggcatactgacgagcaaatgtaatatctgcagactggctattggggaacccttcggccttatgcacgtaagcctcgtatgaatattcggatattccaaaaccacccattgccaagatagaatgtttacctatcgtggttgcataattcccatgtaaatcaccggacacgttactacttttcccattatccaaacgataagatccttttcgtaattgttcctccaccggagagtctttcgtaatattagcaaaacttgaatgcgcagccggtaagaactcgtcaccatcattccgcttaaaagacaacatcacacgagctctcaggatcaaaccattcaacgctctccattccacttgaaaattattcaaaaaatccacgtaagactccttttttaacgtaccgatctcggcatcatacatcgggttgggaatccgatcttcagcccaacgtaccaccaatcccgtttcgggatcctttgcccgccagtagggattcatcttcgcataatcactaaaagcaccataaggggagtcataacttttattactatttacagtcattgtattgctaaaaatcaagtcatttctccgataagacaaatccaatgaaccggaaatattccgtctatcggatcccctcattacaccgataacttgattgtaggacacgtccagcacggctcttaatgtctcggcatctcccaattccacgctcaagttgtgtttgtgccccacacccgtacgcaaaggtttcgataaccaataggtgtctaatcctgctgcaaccaattgttttcgctgctgatacaacatctgcttttgcgtgtataacagaaaattagcatcatcataaatcccgtcaatacgttccgcttccaacttttcctccgcatcacacaaattgtaactactcaaatccggcatctgtatatccacactgccagtgtaagtcacccgttgttcgttaccagccaaacgtctagtcgtgatcaccactaccccattagctgctttagaaccgtagatggctttcgcagaagcatcttttaacaaggttacactttcaatccggttcatgtccatatccatcacccgctccgccgtcacctcgaacccgtcaaggataaacaacggttgattcggactatttttataatttcccttcaagcggacacctgtctcttccagcgggaaactcgatataccccgcatcttcatttccggaatcgcattcgggttcgaacccatctccaagttatccatgatgaataacgacgggtcaagatttttcagactttgaaacaaattttgatttccagcccgcataatatccttggctgtcatcgtgacgaccgcacccgtgtaactacttgccttacgggtaaatatacccgtcacgatcacttcatccacgcttttcacctcctcttccaacaccacgtcgatcttcgtacgtccaccgacagtcacttccttcggtttataacccacgaaagaaaataccaacgtcgtcacgcttgtcggcatcgtcaaccgatatgcaccatcagctcctgtactcgtccccaagaacagagaatcccccttcacgattaccgttgtccccggtagaacttcaccgttcacatcccgcacggttcccgtaaccgtgatcgaagtcggttgctgccgaggagtcacgactacctttccctcaaagtctacacaagttaatccggtcccctccacacaggcctctaccgctgccttaactgttacgttcttcaggtcaaccgtcactcgcttcgtctcccgctccacctcctcttttttaaacacaaccacattgtctcccaaccggttgatctcgcgtaacgcctcaagcaaactggtcgcttcaagctttaaagaaattcttttcacattctgttgtccgtagaccggtgagtgagtaaacaacgtggttaaggacagtaataacaatccgcataacgcaccacgcatcaccgaaagtctacaaaacacttttgctttgcagttttttttcataactttgttctgttttaattaaacaagtgccttgttatcaacaaggtcccaagccggaaatgcctccgaaacatttccggcatttctttttcaccttttctctataatatgtacaattccatcttccaccctaaattccggccctcccgccagagtcaatatttttaaaatagattccaacttctcatccttactcatcttcccgctaaacgtgtgtcgccctttcctcttcccgtcatacacgaaacgaacctcataccaacgggacaacatccgggtcaccacttcaatatcgtcctcatcaaacacgaattccccgtaacgccaagctaccacatttttcgtgtccactttccgcactgaaaattctcccgtttcctttttccaacaagattgcatacccggtctcaacaccattgacgggatgtcggacctctgatccgttaaactgacctgtactttccctgtcagcaaggtcgtgtaaaccgactcctcgttttcgtaagcactaacattgaaagcagtccccaatacccgggtttcaacatcccgaacctgtacaataaatggccgggcaggatcatgcttcacctcaaaatatgcctctcccttcaactgtacaacccggcgatcaccaataaactgtaccggataaacaaattcagacgtggaattcaaccacacccgtgtaccgtcactcaacacgacaaagaaatctccccccacggctgtttctattcggtggaattcttcccgctccggtactgaatccgtatttgcctcatagtgtaaacctcctttcgtaccaatcaaagttgcctgttccagtttcaaactatcggggacctgtttcaccaacccgatacgctccccatttcccagtacgagcatcactttctccttcacgaccttcatctctttcagttccccctgcacacttatcgattcgtgtacctccacttttatcaaaggatgtaaagccacgaaaatccccacgagacatgacgcaattgccccgctaaccacaacaatccgtctcaacgagtaccgacgagaacgatgcacggctaaacgtcgagccacttcctcatagactttctgaaaatcagtagtctggttaatttcatcttccagcctcaaccttccggcgatactctttcctctaattatatttcgatacaaccttcggttggccacctcttcatccagccactttcccagaagttcccgctcctcctcggtagccatacccaatcgtactctaataataacccttgctagtatttgttctctcttcatcaccatatatcatcttgcatttgatatatagacaccactagctgaaaaacgggatgaaccggatcacatttttttctgcatttaacaatcgttttaatcaaggacacagctttatagcatacaacttaaagtcgtcaaaaaaatatcagaactggtaaaatcattattaaccgaattctataaaaaaacaggattccattcatcccgcatgatttcgggcggtgtctataatcatatactgtgtcgaacaaatatcttatattttgtatgataacacttcctatatttaacattcattacagatcatccgagaataagcctcaaagacttgtttcctataatccatccggggaaagtgcccctactatttccgcaacactttgttcacatcaaatttttccccaaattgtattctcaagacaaggtttattccataatctatatcccgtaacaagcaaaaaaggatatttctatcaatatgctcccatcgtttcaacgatacctcatgacgtaaactccacacgaaccataccgtccatataagtgttacaaattatgagagaagatcaacagctagaaattttcattcgaaaacactactcatccatgtgtgctgtcgccctacgctttatcggttctcccgacatcgcacaagacatcactcaagaagtcattatcaaattttggaaaaaccgggcaaactatgaaaacattaaatccacggataacttcctatataccatgattaaaaatgaagccttaaattacctgcgaggctcacaaagagagaaacaacattacaaccatcttgaggtagaggaatttgaacatccaaaagtacttaatatgttgatcgaagaagagatcaatcaaattttgatacacgccatcgatctgctacccgtacaaagcgctcgtatcatgcgcctcatcctgtcagggtacgagaacaaggaaatcgcaaaagtcatgggtgtttccgtgaacacgatcaaaacactcaaatattcagcgatccgcaaattgagagaatatttcaattcgaatgattacgagcttgatcagccatgaaagcgtattttacataggcacaaacatttaacccggttaaaatattcacatttcattcatcctcactcggttcgagtggtgtcttttatttaaaatcaagctgttccaagtaacagtcatgtttaattaaaactctacaactatgaaatctaaattattatcaaaacgagtactcgtactattcattttattactgggattcagtccgctaagccaagcattcgcacaattcgggatcacgggaaccgtaactgactgggcccgaaatccgatcatcggggcaaccgtggtaattcagggtaccaacatcggcaccacaaccgatttcgacggtcattacacgatctacgccatacctggagacacgctcatattttcgtatttgggtatgaaaaccttgaaagttggagtcagaagttttggaagtgttatcaacgtggtcttgcaggacgattcgtttaacttcgaaatctcgcaaaacgatccggtaataaacgaaccaacaatagaatacaaggctatttgcccctggcacacacgtctgtattatatagagaaatcaccacagattcggattacgcccccaaacaaatctctgaacctccgtacagtatgacataaaatagaacaccatgataaaaatactatttatttgcaccttcattgccagttttacatggggaaataaaacagacacgctcactcccgactctcccaaaagcattcatggaatcgtaacggatagcgtaaccggcaaaccgatccccgaagtgatcatcatggtcaaaggaacagaaattggcacggtaactaacgcagaaggccattacaaaatggtcacgttaaagaatagcgcgttagtattttccaaagaaggaatgaagacccaagaaattcccgtgggcgaggaatcagaaataaatatacaaatgaaaaaagaaacaaaagacacaaaaccacccaagaaaataaaatagtatcttgaaaaacagggcggaataaacctgctaaataataaaatgattacaagaaagctgtctaacaagtttagatagtctttttcgtgattgaataataaaggcttttcttctgattatcaatcgaaaaacctttattattcgtgaaagatttcgtgtatttattttgcacaacaaactacatatcaatcacataacaatgataatgcggttgaaaggtagattcgaatccattttcatccaagtgattgagttactccatgacgaaggctttttttgaatcatcatatttttatgcattttttacttatttagaattaatataaaatagacaaacatatgtatttattgcataatgtgatatggcatacaaaacaagctaaatgcgtaaaacggtctaaaacatattgatgtttttgttattaattataaaattataattaaattgtggaacgtttatacaaccactaaaatttttaatgacaacatataagtaagatgcaattcaatagaaattatatcatatactaaaatagtccactatcgtattgtgaagaaaaggtgttttacattcaaaatttaacgttatgaaaaggaaggtcatttttagttatttaaaatccagtatttttttaattttgaccatattcttatcttgtaatgacgattatatggagtatgacgtacaaatagaaaaattggacaaggtagggaaggctttcatgggccatttactatccagttccgatggaaaacagcaatggaaaaaactgacatctctaggtgatattccgccaaatgaagttgcgcttgtattccagggaaaccgtgcgtggcagtatattttaccattactaaaagatagtatgctaataggaatggtatctctcccgatagaaatcggtgaaaataacaaaaacttgtcggaatgttcaattggtgcccctttagtgttagaaaaagaagagattaaatccgatatttttatgcaaggtatacttaaatcttctatatctcgaaaatggcgtgaaaatggtattattattgatgaaaacttgatagttaatctagcaaattcaaccctattttcacctctttcaaggggaagtggtggctgtttttatgcatcttatacattggaagctaataattatctagatgatgagggatttgctattattaatggaattaacacggggactttttctgagattgcaaataaagttgctcgtgaggtgcatcgtgctttggaaataacagttgaagaagatattatttttgttatagcccctactgagggcattgcggtgatttattacatgcaattagcaagttatctctatgataaaaatatcacggcaaccttctcgtttctttggaaagatactccggatgatgctggtggaggcacaggtggaggcacaggtggaggcacaggtggaggtacaggtagtggcacgggtagtggcacgggtgatagcacgggtagtggcacgggtggtaatacaggtggcaatacaggtagtaatacagaaaatcctccaataacaccagatgacccgggtcatatcgtggtgaacttaacaacaagcgtactctcgggagaggtcgagatcggggatacatattatttgatattggatatttatcacaccaagaatcaacctattcctagaattacaaatattgaatatctcattaacagggtaggtacaaaacagggcggttctattggggagactacagaatggacttatgcacgtaaagctatttctgccggaaatttccaatttattgcgcttgtacactttgaaggagatgcaggaaaaataaattctaatacagttaatgttcgagaaatgtgtccttcgatttccaaattcaaagatttgccggatattgaaaagcgagcgaaggaattatggaatatgagtgtcaattacactagagaacatcagagcacctatgaaacaaaagaatacggttgctttatctacatgaatactcaaactgggaaatatcattgcggaagtgaggttatagaaggagaacctgttccacttgacaaagaggttgaagcaaaagttcatttcacttattccactcaagaatatgacccgagagagccttttgacttgatcgttggcacactacattctcattaccccttgacttgggctgcatcaggagtacgacgtacacctggaccatcttctactgataatggaggtagtttgccggggttggtatatgattatttgtatcaagtatttgcgggagatccagtagatataaaagataatccgaaacaaatgtacacttatggtcctgacagaagagaaattccttaaataatatagaaatgaaaaagtttgaattcattttattggttgtattttgcctcttgggtattaataacatggcatacactcaagagcaagatacggtagtgattaaagatagtatagctaaaaagaagcttgacgaaaaattgatcaagttaacgaaacaggtggtcttgaaacacggacgagattattatcgggaatataaagaacctgttatcaagtacaggcgagtgtctaaatcttccagagaccttcatccatcaattatcagaaaaaacatgaaacggatatattacacggtagagtatccttatgatatggaaaaggaaatattctacagcgagtatgccgcgaaagtctatttttgggaggatttaactatttttgatgtcgcctttggacatggcatgggaattcgagattacgataaattatccagagccgaaaaaaacaaaatcgtgattccatataagcatcgtaaacccggtaagtgggtaaaagacactatccgaaatgataaaggtgacataattgatgttatgaatcgttacgaggatcatcaatagaaataatttattcgattctcaaacatgaaaaaatggaatttaaactgtgttagcaaagttaatactttattccttgctgacacagtttaatttacatcctcaattaatccctcatattatgacgaattaattaaacaaagaggctgtttaaaaacgaaatgctctctaaaagttttttgtctaacttttagggtgcacttcatcctttaacggtgtcctttatttagatacagtatcacccaaacattcggcctataaaccttcaaagtattcgctacaagcaagggaacatgtgacgttccctcgcccccttttcgtcaacacgccgcaaaccgcctttcccttatccccggaaatacttgtcgccggaataacaccgtccatcccttgacatgaaataacaatacaggtgataacatttcgtaattccttccctcaattcgatcattcctatcccttccgaccggattcctgtcacattttctgccagcaacggacgcaaaggctcgtcatcataaatcacccctgcacaaagccgatccgtaccggcatcaagcgaagtctgccatcccgtatcccaacacacttccaccttgtttccctttctttccctaatctcgaaacccataggcaccttcaaaactcctttactaaaatgaatctcctcgtaattactaatgcccatctccccgttaaaagcctggatattcgaagcgataaaagcatttagcccattcacgctcatcaacttacctaacttttcccaaatcggtttcaagcaaactccattcaatgaacgatagaacgaaatacaggcactgaaacgattctgccataattgctggttcttgctcctcaccaacatctttctatacggtcgacgccgtgcgtacaaattcccgttacaataataataaactacattcccgattttcccggaaaaacctcctaaacaatttcccacttttgccataattctcttttttttattcatgaaatatttgaattccctctcgtcatgctaccctctctctatcttaaaatatagttttggacaaaaataccccctttctcaaacaaatatttttctagcgtcactcgcaagtgacacggagaaagcacggagaaagtacggagaaaccctagccaaacaacgagcaaacagcatattacaaatacaccgatctacacgatgctagcgaatcaatgtatctaacattatttaacttttacaaccggggtattaaaaccatttcctatattatataagaaaggatcctttcaaattaataatcacttaaaacctaaaagttatggcagaatatcaagcgccaatggctgaaaaattgagaaaatccgtgggaaatgtaacatattacatcatgcacggtaaaacattcgcccgggcgaaagtcgcacacgtgaaaaacgcgaaaaccccgaaacaacttcgtcatcgagcaaccttcacgatgcttgtacaattagcacgggtactaatcgaaacgactcgaaccggtttcccagaaaaagcgaaggggcgttcctcgtcgaacgagttcgtgagagcaaacaaaaacttcgtggaagtggatgaaaactacgaggccacgattgacctcgagaagctacaggtatcgggcggtaaactgccctgtttcttcgaagtcacggtaacgtacaacgccgacggcaggatgctcgtgttccaacaagaagcacagtcgaactcgttgctgaacagcgacccgaaggatcttctctacgcatccatcctcgaaacaaagacaaatctcagcggaatcgtatcattaagagcgcggggagaatcgggggtaacctcgatcgaattacccgagatctggacggtggaaaattgtaacgtctatcttttcgccacttcagaaaatggttacctggcctctccctcccaacacgtgaaaataacaaccgcgtaaaacgggaagaaactgattttaggagggattgtccaaaaagtcaattttgaaaaactaccctcgctaactcccccttacacagggggagaaaccgcttggtaatcaactctccccctgtataagggggagctggagggggtagttttaacactggataagacttgttagacgacctctctatgtgcattagatttataacgtaaagtgaaactgtcaatactcttgacctattaacgaaaacgatgtcaataacaggtcaataaaaacataaaaaaaagcgccagttggcgctttttatttatcctaaataagtttttaatagcttacttctggaagagtgtcgcagacggcgaatagccttttccttgatttggcgaacacgttcgcgggttaacccgaacttctcaccgatttcttccaatgtcatttcttgacaattgatgccgaaaaacaaacgaataatatcgcgttctctttcagtcaacgtggccaatgccctctcgacttccgttgacaaggactcgttaatcaacgtcttgtcagcgacaggagaatcatcgtttaccaatacatcgagcaagctgttgtcctccccctcaacgaaaggtgcatctacagaaatatgacggccggacactctcaaagtatcggcaactttttcagccggtaaatccaatgtctctgccaactcttccggtgacgggcgacgttcatgttcctgctcgaaacgagaaaatgctttattgattttattcaaagatccaacttgattcaagggcaaacgcacgatacgcgattgttctgccaatgcttgcaggatagattggcgaatccaccatacggcataggaaataaatttgaatcccctcgtttcgtcaaacttctctgccgctttaatcaaacccaaattcccctcgttgataaggtccggaaggcttaacccctgattctggtattgttttgcaacagataccacgaaacgaaggtttgcccgagtcagtttctccaaagcccgttgatctcctttccggattcgttgggcaagctcaacttcctcttcaaccgtaatcaaatcctccttaccaatctcttgcaagtacttgtcaagagaagcactctctctgttcgttatagattttgttatctttagctgtctcatagtcttctaatattctcccccaaatatgtcgcaaaggtagaacaatttatccataaaccaatatgttaaaatcgacacctttccaatattaacgttttttaattctgtaaagataaagcgtagtactcgacacgtcctcgcggcgagatagttgtcacaagaacaccctcattttctgccgctttcagcgcccgtaccaaatcgtctttatcataaatcaccgtgttattaattttcacgataatgtatccttcatccaaaccaatcgctttaaaggggccattctttatatctataattttcactcccccgttcaaacgatagcgataacggtcctcccgactcaacggctccaccgtggctcccagtattccggtataattcttatctaccaaggcaacatcaccatacgtattctggagtaccacatccaaatcttttaattttcctccacgactcacggtcacggaaatagtcgctcccgggtgatatttagccaattggccctggaattccggtcttgtctttatctcgataccattaatacgtttgattacatctcctttctttattccggctttagctgccgccccgttaggtatcacgtcatatacatatattccgctcacttcatccgttcccagttctttcgccacggcaggcgtcaactcgtctctccacatggatattcccatcatcgctctctgaaccgtaccgaactccttcaaatccccgacaactttacgagcaatattcgaaggcacggcaaacgagtaacccgagtaagagcctgtcggggattcaattgccgtattgatcccaatcaactctcccttggcattcaccaacgctcccccactgttaccggggttcacggcagcatctgtctgtaagaatgattccagactcatttggctccggtttattcccaactctctcgctttggcactgataattcccgctgtaaccgttgaggttaaattatacgggttacccacggccaaaacccactctcccaactccacgtcatccgaattcgcgtactccagataaggaagtccgtttgcttctacttttaataaagcgatatccgtgctcggatctgttccgatcaccttggcctcgtattccgtcttgttatctaaagtcaccgtaatcttgtcgctcttgtcgatcacgtgattattcgtgataatatacccgtcctctgagacaattacacccgacccgatacccattctttgcggggtttctcgtgtacgcggggcataaccgtagaaaaattccaatagagggttacctatatattcccgtcccatttgtactgttttgacatgaacaacagccggaactgtctttttggcagcctccctcaaatccacgctacccgctcccccaacaggaagagccgtgttagacgcaagtgaaacaggacgaaccgctgcaggagatgcaatttccaattgtgaaaccggtgcagcgctttcccctcgaatggtatctatcgccacgaaagcaaggcaaccgccaacaacccccagtcctaaatttaaaaatgattttctcattgtcatatctttatcttctttatagattaaacgtaaagtgtccacattttgtttgtatattacaatattagcaatatccttgccaactgactattaagaaattcttaattaatataccttaactatgttttgaggcgtgccaaaatcttttcattccaaatcctaaattctaaattttacattttgtatatttgtacctgcgatttcgataatttcaatttacatgataacacgtataaacaataaaaagagtggtaaaacacgtactccctattccttcgattttctgaaggatccccggacacgtgtagttgttgggttgatttttatgctattttccatttacctgctggtgtccctcgtcggtttctttttcaccggtggcatggaccaaagtctgatcgataaagagacccgggaattaatgaccaacccggatattgtcgtcggaaacccgggacgcaaactaggagcgtttctttccgatttgctcataaaccggtggttcggaatttcgtcattcatattctgctacttactgtttatcatcggactacgtattgccggacggaacatcaagaaatttgggaaaaaaattatcatcagctttgtcctaatcatctggttctccttgctattgggatatattttcacgtttttacccacaggatatgtattcccaggcggggctcacggttatttcgtgtgtttttggcttaactcgtttatcggagagattggctcgttcttcctgttgattgtttcgtttgcagccattcttttctttggcttcgaaaacgctttcaacaaatgcgtgaccatgatcaagaattacttcgctcatcgggctcaactcaaggaagaaagggccttggcacgagaagccgctcttgcccggaaacgagaagaaatagcaaaaacagaagagccggaagacctgcaagaaaaagaagaggacattgataccgaagaaaaagagaaattggatatcgaaacggttccgcctgttgaagatgaacttttcccccgtcacgagtttgacacgaccgatccggatgaatcagaaaaactggaattacatgatccggaagaggaattcccgacagaacatcacttcgatttatccgtggacaagaaccccgaaaatcaagatgaacacagagaagatactcccccgctcaccaatgacgatatcgaattgaccgttatagcagacaagctggaagagcaattaaccaaaaacttgatgccggacacggagtacgacccgactctcgatttatcgaattatcaatatcccccgctggaattactggaagaacactcttccggttcacaaaaagtaacagcagaagaactcgaagagaataaaaacacgattatcgagacattgcgccattataaaatagagatcaccaagatcaaagcgaccatcgggccaactgtcacgttatacgaaattgtccccgctcccggtataaaaatctcgaaaatcaaaaacctcgaagatgacattgcgttaagcttgtcagccttaggcatacgaatcattgccccgatccccggagccggaaccatcggtattgaagtgccgaaccagaatccggaagtcgtttccatgcggggaatcatcgcatccaagaaattccaagaatccaaatatgcccttccggtagcactgggacgaaccatctcgaatgaaccttacacgttcgatctggcaaaaatgccccatttgctggtagccggagccacgggacaaggtaaatccgtgggcttgaatgccattatcacatcgctcttgtataaaaaacacccgtcacaattgaaattcgtgatggtggacccgaaaaaggtggagttaagcatctattccgtcatcgaaaaacatttcttggcgaagttaccggatgcagaagaagccattattaccgataacgacaaggtcgtggccacgctcaactctctctgcatcgagatggatagccgttacgatctgttgaaacaagctcacgtgagaaacatcaaagaatataacgagaagttcgtgaaacggcaactgaacccgaacaacggtcatcgttatctaccttatattgtagtagtggtagacgagttcgcagacctgatcatgactgcgggaaaagaagtagaacaaccgattgcccgtatcgcccagctggcccgtgccgtcgggattcacatgatcattgccacgcaacgaccttccacgaacatcatcaccggagtcatcaaggccaacttcccggcacgaatagccttcaaggtggcatccatgattgactcccgcaccattctggactctccgggggccaaccagttgatcggccgcggggatatgttgatttccaaggatagcgagatggtacgtgtacaatgtgccttcgtcgataccccggaagtagatgccatcacgaaattcatcgcggatcaacagggttacccggaagcctacgcactccccgaatatgtttccgacacggaaaacggggtgagtggtgacattgatctcgggataaaagacccgttattcgaagaggccgcccgtttggtagtgaacacccaacagggttcaacctcctctatccagcgacgtttctccatcggctacaaccgggcaggaagaatcatcgaccaactggaagcggcaggcatcgtgggaccattcgagggtagtaaagcccgtcaagtacttatccccgacgagtacagcttggaacacattcttaaaaccgtggagttttaaaaatttaaaatggaaaatttaaaatttagaatggaaaaaactaccccctctggctcccccttacacagggggaggacacgctacattataacattgaaacgttttcttgcgttcgtttctccccctgtgtaagggggagttagagggggtagttggaaagattgaagttaaaagataaaaactaaaagataaaagttgaatgtagtaaatctagaagggtgatttcgtaggtggaaatctaaaatttaaaatctaaaattaataaggttatgtttttagaaaagtcatacagaggtaacaacaaatggtatttttacattctcacgctaatcatcgtgtttgccgcggtacaagtagcgtccatcccgttagcaatttacagtatcatcatgaatcctgaaatactaagcgggggaacgaataacattctggctgtcacgaacacgaacctaggcctggcactcatgctattcacgttcgccggaggcgtcatcgcacttctgttatgcgtgaaatatttccatcacaagaaaccgacggatatactcacgggccgaaatcgttttgacgtgaaacgggtatttttcggtgccgctatatggggcctcttgacaatcgtcctattgggtgcgcaatacggattcggggatacgtccaacctcgtgttccaattccagccattcaatttcatcatgatgtgcatcgttatactgattttcattcccttccaagtggcattcgaggaatttattttccggggatatctgatgcaaggctgtatcctacttttcaaatacagatgggtagccctattacttaccggttttgccttcggattactccatggatctaacccagaagtggatcgtttcggtttctgggtagctatgccgcaatacattctgatgggattactccttggactggtagccatctgggacgacgggctggaattggccttgggattacacctagccaacaacgtcatttcctccctcgtggtgacacacgacgcctcggccctgcaaacacatgccctgttcaaggatatggcgccaacggcctcacacatggataccgtggtcatgctcgcgtgcgggatcattttcctttggatttgtaaccgaaaatataaatttttctccaaaatcaacttgtggggaaaagttgaacgggaagtcatcgagtaaaagaagttcttaaaattttcttaatactcgtgtcgctttcatgacattgccaataaaatagtatctttggcggtaaacaaaaatacgatagcaattatattaatctataaatcgaagtttcaaaaaaatgagaaaaattacatctttaatgttcgctctcatctttgggctgtctttcttagctaatgctcaagatgttcaaaaggaccaaccgaaaggttaccaattcactgatattaagagattaccggcaacgtctgtaaaggatcaagctcgtgcaggtacctgctggtcatggtccggaatctcgttcttcgaatcagaaatgattcgtatgggtaaagagcctattgatctttcagccatgtatattgtaagacacgcttacagcgacaaagcaaccaaatttgttcgcctgcatggtaacatgaactttgccgttggtggagctttctgcgatgtgatgcacgtgatcaaaaactacggaatcgttccaatggacgtgtacaagggattgaactacggtgaaccaaaccacgctttcggagaaatcgacgacgtgttggccggttatatcaatgccgtcatcaaaaactcaaacaaaaaattaagtactgcatggaaaaaaggctttgacggtattctggatgcttatcttggagaagaacccgaaaaattcgaatacaaaggtaaagaatataccccgagaactttcgctgacgaagttgttggcttgaacatggatgattacgtgagcttgacctcatttactcaccacccgttctattctcaatttgctatcgaagtaccggacaactggttatggggaatgtcctacaacttaccgatagatgaactggcacaagtcatgagcaacgctattgacaacggttacacttttgcctgggcttctgacgtgagcgaaagaggtttccaaacctcacaacccggagttgccgtggttccgacaactgacacgaaagaaatgagcggtgccgaaatcgctaaatgggaagctatgcctaaaggaaaccaaactccggatgccttcagacaaggtccggctcctgaaaaagagattacgcaagaaatgagacaacaagagttcgacaactacttgaccaccgatgaccacggcatgcacgtgatcggtaaggccaaagaccaaaacggtacggtttactatatcgtgaaaaactcttggaacaagtataacaaattcggtggatacttctacgcatccgaacctttcatgaaatacaaaaccatgaacatcatcgttcacaagaatgccatcccgaaggatatccgcaaaaaacttggaatcaaataaatccactctataaggagttcgagaaaaactataaaaaaaggccgttaatccatccgattaacggcctttttttcataatttcgcgagagcgaaaaagaaatacataaaattataatcaatatgaatctagcgagagaaattaagaaagacatttactggattggagtcaatgacagaagaacgcatatcttcgaaaattactggcctcttcccaaaggtgttgcttataattcttacatcatcgtggacgaaaaagtggtagtcatcgacacgatcgaaagaagcaaaatggatgactacgtggaaaatatcgaacagttactgaacgggcggaaagtggattatctcgtgattaatcacatggaacccgatcacaccggagccatcaaagctttattatgccactacccggacgtgaaaatcatcggtaacgccaagactttccctatgctgaaaaacttctacggggtttgtgaaaacttgatggaagtgaaagaaggcgattctctcgaccttggaaaacataaattgaatttctacatggcaccgatgctgcactggccggaaacgatggttactttcgaatcaaccgaaggtatcctgttcagtggtgacatcttcggagcgttcggaacacttgacggtggcatctttgatgacgaggttgacttggattacttggaagaggaaatcagtcgctactattccaatattgttggaaaatacggtcaaccggctcaaactgcactgaaaaaactcggaggccttccgatcaaaatggtatgcgctacccacgggccgatccgtcgttcgcacattgccgacatcgtggctaaatatgacaagtggagcaagtacgacacggacaagggtgttgtgatcgtgttcagttccatgtacgggaacacggaaaaaatggctgatataatcgctcgtttcttggctgaaaaaggaatcaagaaaatccgtattcacgatgcatccaaaacacacccgtcatatatcatcaatgacattttccgttataaaggagttatccttggaagttgcgcttacaacggtaacgccttcccgaccatggaaaccctgttgttcgaactggaacacatgggcgtgaagaaccacgtggtggccttctttggcggaaaagcatgggctggcggtgcaatgccccgtttcaaccaattcgctgaaaaaatcaaatgggaagtggttgctccttcttgcgaggcttgcggttgcccgaaagatgaagatttcgaaacgtgccgtaatatcgcctacgctatggcagataaactggacgaaatctgttgatttcaaacgatatgaaaaaggagagcgggtatttcaaacatactcgctctctttttttctatacaaaaaagaacaaccccattcaccatgaggctgttcttttataggtaacaataaattctattctagttcgctttgaacatctcatctatatgtttggcagcccgacgaccgtcacccatagccaaaattaccgttgctccacctctcacaatatccccccctgcaaagaactctgacaaattagactgcatcgtttcgtcattcaccacgatcgtacctttacgtgaaatttccaatcctttcacggagttcggaacaatcgggttaggagaaacccccacggctacaaccaccacgtctgcatcaatcgtgtattcggagccttccaccggcacaggactacggcgtccactagcatccggttcacccaaagccatcttctgcacccgtacctgtttcacacgtccccgttcgtcggcaatatattccaccggattagtcaacgtgataaactcgcatccctcttccttggcatgtttcacctcttccagacgggcaggcatttcctcctcgctccgacgataaacgatcatagcacgttccgcacccaaacgttttgccgtacgcacagagtccattgccgtgttaccaccacccacgactaccacgttctttccgcgatataccggggtatcggaatcttcactatcggcacccatcagatttacccgagtcaagtactcgttggaagaaaggataccattatagttttctccgggaatattcataaaccggggaagtccggctccagaagccacgtagaaagccttgaaaccttccgccttcaaatcttccacggaatccgtcattcccacgataaagttggtaacgaatttcacgccgatcttcttcagattatcaatctccacgtctaccacactattcggcaaacggaattcaggaataccgtatttcaacacaccgccgatctcgtgcaacgcctcgaacacggttacatcgtaacccaattttgccaagtctcctgcacacgataacccggaaggtccggaaccgataacggcaactttaataccattggcatgggcaacttccggcacggtaatatgcccggattctctctcgaaatccgatgcaaaacgttccagataaccgatagcaaccgacggtttcttcaatttctgtaaataaaaacacttggattcacattgtttttcctgaggacaaacccgaccgcaaactgccggcaaagcactcgtgcgtttcagcacggctgccgcctgcaaaaattcccctctctcaatatttttcacgaatccgggaatatcaatacccacgggacaaccttccatacaagtcggggttacgcaatccatacaacgggtagcctcccgcatagccatatcggctgtcaatccttgattcacctcgatacgttggctcttgatacgttcttccggtgcggtttcaggcatatggacgcgctcaatagaagtacgttccttccctgccaccttctgacgcaattcctgacgccaaggttcgttccgatcactcacgccatgagaatgttccgcatcctcttgttttacctcaacatcatgcagtttggcgacttcggtatctttaaatccacctaaccgggccaatatctcgtcaaaatcaatcaagtgtgcatcgaactccggtccatcaacgcaagtaaagcgggtctttccccccacggttacccggcaagctccacacattccggttccgtccaccatcagcgcattcaaactagccactgtcgggatatcatatttacgagtcagtttctcgcagaacttcatcatgattgctggtccgatagtcacggccaaatctactttctcacgtttgatcacttcttccatcccctccgtgatcagacctttttttccatagctcccgtcatccgtcatgataatcacttcatccgaagaagcccgtatttcatcttccagaatcaccagatccttattacgtccggcaattactgaaaccactctgtttccagcctccttgaaagctcgcacgatgggcagtagaggagccacgccaacaccaccaccacaagccaacacggttcctaccttctcgatatgagtcggttttccgaggggacctaccaaatccgtgatataatcccccacttccaaagcgcacaatttccgggaagacactcccatcacttgtaccactaatgtaatacttcctctttccaaattagcatcagcaatggtcaacggcatccgctcgcccttctctcccacgcgtacaatcacgaaattacccggtttacgggcctttgctatcaatggtgcctcaacttccagctttacaactttttctgaaaaataagtcttacttaaaattttattcatagtctctaggttaatctattctacttatttcaaccccgctatcgttttcgatttcaagccgcaaagataacgaaccccttggaaaaaacaacttttatttcgattaatggcgagataagttagaagtaagcataaagtcaaacacacccaaaatcacatcggcacatcccctagatagcaaagttagtcactaaacgactataaaacgaaggggacacgtcattctctcgtttgtcgttccttatctcccacttaactcgctctaaactgatcacacaaagtaaaataacttcccataaactggcatatcggaaaattcatgtcattccatgacaatccgagtaatattgctatttttgttcccgaaaataaattacatagagatcatgggcaacaaaaacgataaaaaggaacggattaacgtggtctattccacgaacccgaattaccaatacgaatacaatcaagaagaagagcaggaaaccctagctccggaaaaacagaacctacgggtaacccttgattccaaacaacgcaagggcaaaacagttactctcgtacaaggtttcaccgggacggaagaggatttgaaagaactagcgaaactactaaaaaacaaatgtggcgtgggtggttccgtgaaggatggagaaattatcatccaaggagaagtaaaagaaaaagtattgaccattctccgagacaataaataccgggcaaaataaaaagagaataataaaaaatgcagttccaagttctatttaggactttggaactgcatttttattcaatgtatactcaatactactctacacccattttaccaaagcaaaatcctgcctgtgaggaagtaatgtattcttcgggaatattctcagtcccaacatgaaaattccgggatcatcaggagttacttcgatggaatacatggccttcccgttctcaaaagaaacaggtacaaattcctgcgtgaaacacacttcaattttctcctctttcttcatcatcgcaaccaactctaccccgatgtcatcaatcgataactcacccaaatcaagtaccacttttccttggtaagatctacctaaagagataatctgtttcgatttatcgggaagaatcaaaccatccacctgcacggaatcccattcccggctaacctttctcttccactctgctatccgggtagctaaagcataatgattgtcactcaaacggtggaaacggcgagacatcggtatatagaacttgtcctcgtaatccgtcaacatccgattactcgtgaagtttgatgccaccttagcaatcgtgttcttgatgtatcctgcccatttatcggataaaccattcgcatctcgttcataaaatgccggggcaatttccgattcgatgatattataaatcaactcggcatccaattcattctggaattcctgattctcgtaagtcctttccatcggcaaggcccaaccggcatccttttgatagccttcaacccaccaaccgtccagcacactgaagtgcatgacaccattcatggcggccttctctccactcgtaccagaagcctcctgcgggcgagtcggggtgttcatccatacgtccacaccttgcaccatgtgacgagccaagtccatgtcataattcgggaggaacaatatcttacccaagaactgcgggtatttggaaatctccactatccgcttgatcaaatcctgaccggcctgatccgccgggtgagctttccccgcgaatataaactgaaccggacgatccgggttattcacgatctcattcaaacgatccaaattactgaacaacaaatgagctcgtttataggtagcaaaacgacgggcaaaaccgattgtcaatatgtcatcccgcaaagtgtcttgaatctccacgatttgtcgcggtgtaaaataagccgtactcttctcgtcagccaaacgatgttttatatgacggatcaagcgacttcgtaaaaccatacgaacctctttgatcatctgatccggaatttggtagattccttcaaaacacgttttatcgtaatgatgagtcttgaatttttcaccaaacacgctcatctgtattttcttccattccggagccgcccaagtcgggtaatgcactccattggttacataactgatgtgtaactcttccggcatatatcccggccataaattcttgaatatatcccgactgactttcccgtgcaaccagctaaccccgttcacctcctgcgataagttcgctgccagaaaactcatggagaatttctcgttcggatcattcgcatttacacgtcctaacccaagcaactgttcccacgtgatcttcaaacgttcagccacaaaccagaagtagtttttcaacaagttttctgtaaatgaatcatgtcctgccggaaccggcgtatgcgtggtgaaaagcgaagacgcccgaacaacttccatggcttcggcaaatgaaagttgatcttccgccacgtattcccgcaatctttccaacccggtaaaggccgcatgtccctcattacaatggtacacatccgcctggatattcaatttccgcaaggcccggattcccccgatacccagcaaaatttcctgtttcaaacgattttcccaatctcctccatacaagtaatgcgtgatgctcctgtccccttcctggttatcctcgaaatccgtatccaacagatacaattccacccgtccgacatttacctgccagattcgggcatacacctcgcgtccagggaatgaaagactgattgtcaaccaattgccttcagcatcccgagccggagataccggtatcttcgtgaaatcctgagcctcatattcagcctcttgattacccgcggcagagaatttttgggtgaaataaccgtaacgatacaacaagccgatacccgtgatctttgtttttttgtcactagcctctttcaagtaatctccggccaacacgccaagacctcccgaataaattttcagagaagcgtgtaacccgtactccatactaaaataagcaatggaaggatcattcatttgctttttctcctccatgtattgggagaatttagcgtacacggctgccagacgggcaacaaactcctcatcattctccaattctttatagcgattcaaagaaatcttatccaataacgctatcgggttatgccgtgtcaacatccattgcaaaggatcgatgcttttaaacaaatcaacggcctcctcgttccaacaccaccacaaattattcgccaactcttccaaggcactcaatttgaccggaattgaacgatggataatcacgctgatccagttcggaacatttgttgccgtctttttctctatgaatgaccattgttcctcttccacaaccggaatttcattcacccgtccgtttactttatctatcgcgatctgataagccttcttgtaatatgaaaccaaattttcccaaagtgcaatcttcgatacctctttggcattcttggctacagcttggtactcttttttgtttagtccggcaatcgcttttattttatcggcaattttctcgaccacttcttcgttattccggtcatcccgttcaataatctcaattcccgggtgtgcttttttataataggactcaacccacaagccgaaaccggccaaagttgtcgtgatcgtcggaactttaaatgccagactctccaaaggagtgtatccccaaggctcgtaataagaggggaaaacggtcaaatccattcccacaagcaaatcataataaggcatgttaaacacaccgtcattaccattcaaatagcttggagagaaaaagaccttcacccggtcccccggttgattcgataattgttgttcctcaatcttacgcaataccggatcattttgcgggtccgataattcatgtgtcacgtaaggatgtgtgatttcgatcgcctggtaaggacgttccaaattattcagtaattccagatttgcccccttatgtcctgccggcaccagaataaacgccaaaatatcccgtttattatctacatcccggttcaaacgtcccagtgcttcaacaaacacgtccaagcccttatttttaaactcgtaacgtccactgatacccacgattaaagcatcttccgcaaccgcccggcccaataaagcctgcgccactttcaacagtttttcacgtccttgctgacgcttggcgggataatcctcctcgctgggggtgaaactgttctcgaaaccattcggggtgacaagatccacttgtttacccaagaaatgctcacactctttcgcggtaatgtcactgaccgtcgtaaaacaatccgcccattctgccgccttactttccaaggattgtttagaatccacgccgaaacgatgggccgtttccaccggattgtaatccttcatcggatcataaagaggcaagccgttcccggcaatactacgtcctaacacggtggcatgagtggtgaacacgcatcccacttgtggaagggcatttttcaggtacaacataccgcttcccgtcatccactcgtggaactgggcaacaatacgctgacgaggagatatatggtaacgaacaaaactctcaatcacttttcccgccgtgtaaccgaataacacgggttcgatgtaatcccattgtccggttaacgaatccacctgaaacttctcccagaaagaagtcaatatctgatccttttggggaataaaagaggtgaaatccaccaaaatagccacagggttaccggctacattccatcgccctaccttaatacgcaatccctcctgtgccgctttcacccgccacgatttaaacaaatgggcatcctccgtgaattccggattcggttcattataccgccacacgtccgggccgatcaatatatggttgtttttgaattccccggccaaactcaacacctttgttgaaattaccgtgtgaattcccccaaccttattacatacttcccaacttacctcgaacaaataggcgggatctttcaattccaaattactcatatttaatttttaatgttttgacttcacttgtttctccttagtactcacctttttcgtcgccttcgcagcactctccgcactttttacacgaggagtccgtttctttttttccgaacttttctcttcttcggtgattttattgcccgcaatattacgcattttttccatatcttccacacgtgcgacaaaatcactcaacacattcatataatttatgaatgcttcatacggggtttcataaggtgaaacgtaacgatggtagtcgttatcggagaacagtttcgtcctcatataatagaaatgatcactagcctgcaagcgagagtaatcctcgttcagctccggatcatttaatgcttccactttaggttgtattttgaatagctcttcaaaagcctcattttgtaattcatttcccaaccatccggtaatatccttttcttcatccgcccatgaaatcgggtaaggcacgtgtaaaggagccaccggctgatgttttttcaccgcctcactcggggtcaggaattcaaaatcggttgtcgagaatatatattcgggtaaagaacgcataaactcgaaaattccggtctctgccaattggttttcaccaaacgtttcgtagttcataaacaaattcacgatctcactatcttgcgtgctatcttttaaccaacgggcatatttatctgccgtgagaggccattcatgccagctatgatctgaaaaacgcagggtcaagtcgtcgctcaaccgggaatttttcaataacagtttcaaccggggattcatcacgttcgtgtaaacgaaattcggactcttccaccccaacacatgctttgccccatcagtcagcatagattcaaatcccatggcagccactcgctccccgatctgatcggaataaatcaacgaactatttcgcaacgtcaccggcttctgcccgaacaactcttccattttagctgcatggcgctgtacttgtctctcgaattcatcggtatcagacaaggatgccaaagagtgagcgtatgtctcggccaaaaactccacgctaccggtctttgccaattccttgaaactttcaatcacttccggggcatggagagcaaattgttccaatgccgaaccggaaatagaaaaactcaccttaaaattcgttccgtaacgcttgatcaaatccatgatcaaatgattcatcggcaaatagcatctctctgccactcgtcgtatcgtggaacgattcacatactcgtcaaaataatcatgacgtttacctatatcaaaaaaacgataccttcttaatcttacgggttgatgtatctggaaataaaaacataatgtctttttcataattttacattttaaattttaaactctaaactcccaatacgtccttgtacacttcctctactttcaacgctgcattctcccatttcaactggttcacctcgtccaatccctcttctccggccattttacctaaagccggataagttaacagaccatatatagcgtcagccagtgcatcaacatcccaataatcaacttttatagaatgtttcaagacctcggcgaccccggactgtttggaaataatcgtgggaactcccgcacgcatcgcctccaatggagaaattccgaaaggttcggacacagaaggcatcacgtacacgtcactatacaagaacatcttctgaacatcatcacctcgtaagaatccggtaaagtgaaacttcgtggctattttcaattgtgccacacgccgaacagagcgattgaacaagtctccgctaccggccataacaaaccggacattcgggtaacgtttcaataccttgctcgccgcttcgataaaatattccggtcctttctggaaagtaattctacccaaaaaagtaaccaccttttctttcacgccacgatcaactttaacatcttcacgtgtttgaaaatccacggcgttatggactgtcactaccttatccggattaatcccgtaacgattgatcacgatatttcgtgtcagattactcactgtaatcacccggtcagcagcctccattccacgcctctctatatcatacacctgctggttgacattctccccacttcggtcaaattccgtggcatgtacatggatcaccaacggtttacccgaaactttcttcgccacaatcccggccgaataggtcagccagtcatgcgcgtggataatatcaaaatcctgttgtgccgctatcgtccctgccaccatggcgtaacgggcaacttcttccatcaggtttgttccgtatttaccggaaaattggaacttgttacggaaaacgatatgctcggaatgttcgcccgtcttgatggtctcctttaccgttctttcgaaagtttccgggtccagataaggaacaagattcgaaccgatctccataaagtttacattctgccagtattcatctaagtttgaatactcactcatcatttcgacatcactcgcattaatgattttcacgacgctttgatcctcatcacctccggccttcggcatgacgaacatcaccttgacgccatgtttcgccaagcctttcgtcaacccgtaactggccgttcccaagccccctgcaatatgcggtggaaattcccacccaaacatcaatactcttatgctcataatatattaatttgcaaattcggaaatggtctaattcgattaattttcatatttccttatcaatttcatacttctaagtacctctccgacaccccatgcctgggaaatacttccattcggatgatgtggtggatcgccatcatacacttcagcaatcgaacacaaaccgtaaagtgccatatcttcttcaaatccttccaacaattcttttgcctccggcaagaactgtttcccgtaaagtttaagatttgcctctatatacgcaccgattaaccaaggccacacggttccctgatgataagcgttgtcccgctcatcctgattgccttcataatgcccgtgatatttcggatttttgggagacaaagttcgtaagcctttcggggtcaataactcacgggtaaccactttcagaaccctctccttcatatcatccgtgataggggaataagtcaaggaacaagcaaatacctgattaggtctcacatccagattctgccctttttcatccacataatcagctaaatatcccgtttcctcgttccagaatgtttccacgaatgaagtacgaatcaattcgggcatatccttccattcctttataaaagtattatcttttgcctcttcagctaatttcagcatgtaacaaaccgcattgtaccaaagagcattgatctccacggcataaccggctctcggggtcacgggaacaccccgcacaacagcatccatccatgtcagtgcttttccgggttgtcgggcccagatcaaaccattcgcatccattctcaacccgggattcacaccctctcgaaaagctgtcaggattgatttcattttacttccataatttttccataccgtccccggctctcctaacgctttatcgtactcctgcacggcccaaaagaaccacatgggggcatctatcgaattgtaagcagccttatcccctttaccgatgttcgggaacaaaccatcgtgtagctgacgaaccatcgtgtcaagtacttctttacaatttctcaaatctcccccggctgccaatgtcaaacccggaagggcaataaacgtgtcgcgtccccagcgcccgaaccacggataaccggcaacaacctccgtatctttgccttcatgaacaataaactgggacgccgaataagttaaacaactttcgaaatcatcccgacgctcccgtttattttccatctgctggaatttacgtttcagcgtggaaggctttacctcttcagttgaggctgaaaatataatactttccccttttttaatcggtacctcaaaataaccgggaacaaacaagtcttccttataatcatatccccggttcttttcctccaagtattctatattataataccaatcaggcacgggtacaaactcgttcgccttgctcaactgcatattcaaagccggaaaaccgacatacaatttcgaacgtataccattttccacgtgatcgaattttgtgtttgccatcatgttcgccttgctcaaagcgtgaacgttccggtaagccagaaagggtttcaaccgcaagtacgtttccgaatgagcatcttccaatgtataacgaatcatcaattgagcctcattatgcaccatcagaatctctttcttcaacacaacgcctcccacccggtaagtcaacgtgaatagcggatcgtattccaaatccacgatatatttatgtccccgcggttcatataccccgggatatttatggatccccaaattaaaagattgcccgtgttgaacaaccgtttcatccaaagaggaaagtaatacatgattctctcccccgaactccgagatcggcaatacaagtagtccatgatacttcctcgtgttacagcatacgaccgttgtcgaagaataccccccggctctattcgttgataatacttctctcttcaaagaatattccagatttaccaattcttctttgttgaaatttaaataactcataatctaattttagattttaaattttagatttatgattcaacaattacctcaacacccaaatcgtaaatcataaatcccatatatttatgaacgctttaatacaaatcccgtcctcgcgggtatatacaaacttaactgtcctctgcccggagaaacgtatcgggtaaagtgttcaatcttctcatcaattcgtcccaatccgtcaaaattcctgttatccgtgttcaatatcatcgtgtattttccggaaggtgcgtcaaaaacgtaatccgggaatgacttttccgggttaaaattgaacacgaacaaataatctccgcgggtaaaaatcagcacctgacgctcattatcccgcaccaacggttccggatgccagtgaaaaacacatgtatcattcaccatctgaatcatcgacttatcgaacacattcaaaaagcgaaaccgaagattttcatcatctaccaaactccataaacgccgggcatgatcgtaactccacccgttaccctctctcggaaaatcaatccattccgggtgtccccattcatttcccatgaaattcaagtaaccatcagcagcagttccgatagtaaccaagcgaatcattttatgaagtgacattccccgatcaataatcacgctcttgtcaaacacactcattgaggtgtatattgccttatccactaaccggaaaaatatagtcttgtcacccaccaacgcctggtcatggctttccgcataactaattgtacgttcctcttcccgcttgttggtcaactcgtaaaaaagatctccgacgtgccattcttcatcccgtttctctttcaatagctttatccagtaatccggagttcccatattcatccggtagtcaaaacccataccgccatattccaaaggactggcaacacccggcatcccactcatatcttcggcaatcgtgatcgcctcag

SEQ ID NO: 10697 - DNA, 115960 bp, Unknown
  gut microbiota DNA sequence
aataagttatttttgactgttctattacaaaaataaataaattggaatttacacactttttgaaacactatcaaaaataaaaattactgggatttacacacttttttggacactatctctcggtttaaataaatgctctaaacttcatgaaaaccgcttaaaacaaaaaagcacctacaaacgtaagtgctttaaaatgagagcggaaaacgggactcaaacccgcgacccccagcttggaaggctagtgctctatcgactgagctatttccgcagtatgtggggagagcaggattcgaacctacgaagacgatgtcagctgagttacagtcagccccagttggccactttggtatctcccctttgttcaaagaacagttgcttgttttaagcgggtacaaagataggtagttttgtggaattaccaaatattacgtggaaaaatcttgaaaaaatatatttcgtgtgtaaaagaatacgaagagctttcggtaccgaaaactcctcgttacatcttatcgtcactatgagacctatttacgaggacgataagtaatgtcaatgtttttttcttcgtcgaaacctttgtacttgatgtgtagctgtacggaatctgttacctcgttaaacacttcttttagcgggaaactgacataaccgtaaagacttttgttctccggatctccataagcatgatgtctgaattctaacagggttttcccctccgctgttaattcttcatgctttgtcaggttgaccatgtgttctttagcacctccggcataaaagaatcggaaggtgatgaagtcgttggcaatccagtattccggtaattcaatcggatccatacccaagctgtcactaatcacttcggtatagggtacaataggttttgtaagaagcttttgcaggtcgtttactcgcacgtaatgatctacactacttcccggatttgcatcttgcaagatggtaaaatctgcgtacacacgcatattattttctaagtaacgtaccggtacatttgaaacggatggatacaatactggacctttgtccagtatgattctgtaatcctgatcacttgttttttcaatcgtaccgacttctaaccagaatttgtccaggctatacccgtcatcattacaagatgtgaaggcgaatgttgccgagagcaaaagaataattagtgtcactactttttgatacttcattttaaacccctttttattactcgttgttttttagtttcattacttagatggataattgcgtgaatggttgcgtctaataatgttaaaatcaatggaaaaaggctatcatacatcgcatgatagccttgatcccttgtttttgccgggatttatgaatttagaaaagagtttttttcagtgagaataggaattccaatcccccgtcttttctattttttgcggagatgtctcctttatggaaaagaacggcgttcttcacgatggagagtcctaggccggaaccgccattttgtctgctacgtccctcgcatacacgatagaaacgttcgaaaatcctgttcaagtgattttcttctattccttgtcctgtgtcatagtaggagaaataataaaattcattgtcttccatgtagttgtttaccccgatcgagatattgtctccggcgtaattgatggaattttcaatgagattccggaatatagcataaaccagcgttttatttccctcgataaccgtttggggatttatctcgttcctcacgttgatcccgtgtgctatgatcgggtcatgcaggtcatcaatgacttcctgcaaagtgttgtgaacattcactcgttccttgtcaaaaagttcggatgcctcttctgtcttggtgattagggcaatatcccggattaagtcggataggcgaacgatttgtgaatacgtacgttccagaaagaaatgttgcttgtccggggtaatattaggttgttccagaagggtttcgatataaccgcgaatactgcttaccggagtttttagctcgtgggcgatattattcgtcatctcctgttttaggagcctgtttttttcgttatcagagatattgtttagggtgatttcgaaactgttatccgtgaaaatcaatagttttacggcaaaatgcttacctcccttgctgatcttgttctggtacacggggatgttggtggtattcgggtttaccggggtgtttttttgcaagaattcgttcagttctttgaaatccggttgttccagcagtttttcgactttgaatgtcggttcgtccaagatgatgttcaaatactggataaaatgcgtgttggcatatatcttttcccggttagcggagaagatggcaatcccctcgtcggaatagtggaagtgacggagaagtttctcctgttccacgttgatctgcttgttactttcttctaaaagttgataattatgaatgatcttttcaccgatctctcccagttccgtgttcgggaaatggatattgttgtaattaatgttgtgattgtcggccgaaacgataaaatctttcagtccggaaatcgctttcccgaaacgatcggagatataaatcagcgagatcagcgtgataaagaatagtagcgtgataaaatacaggaatatgttgtccgtctttaaaaagttctgaatctcgatgtcgtaaggaagagccacccgaataaaataattcatgtagtctttggcaaagtaatagtattcgactccggtacttttagaaagccggatggcagttcctgttttttggattaatgccgtctggatttccgggcgctgtaaatggttttcgatctcttgttccttgtcgagactattgtcataaaggactttaccatcatgatctactattgttaagcgtaaattggagggcataagtacgagtacattctttaaagaatccatttgcccgctgtttatcagatgatattgttgaacatagtgggcaatgatgtcggaataatcgtccagcgtggtgcgcaaggtctccgttttgtaggctttttcccggttttgttggaaaaaggtaataacaaccgtgaaggcggcgaatacaatgaagaagtaaatgaacaacttctgtttataggataatttcattggaaatagtttttgtattaacgtttaaagttccacacaatagccgtacccagaacgatttgcgatgtgttttccctgttcgcccagtttttttctcagtcgggtgatgtgtacgtcaacggtacgttcaagcacgtagctgtcgtcactccatactttattgagaatgtcttcgcgggagaatatttttccgggagattgtgccagtatgtttaatatttcaaattcctttttggtaatcgggatgagtcggtcgtggatggatacgcattttgtacttaaatcgatgtgcatctcgcctatatcgatcacttgttttttattggtagtattcaacgaacctgctcttttcaagacggctttcactcttgccgaaacttccttgatcgagaaaggcttggatatataatcgtctcctccgatattgaaaccggtgagcatgtcattttccgtgtctttggctgtcagaaagatgatcggggtagagttgtgaagatctttccgaagtttttcggccatcttaaaccctgacattcctcccatcatcacgtccagcaggattaaatcatattcctcggttagcatctttagagcctcttccgcggagggtgcggtgtcgaccagatagccttcgctctccaagttgaattttaaaatttctctcaggtcctcttcgtcgtcaaccactaacatccgttgtttatccattgctctaaagtttagttgttatgaatatgtttcgcattctttccttccatcaagtaaatggcagcttcggcaatatttgtggcattatccccgattcgttcaatgttgtatgacattccactgagggaaagggcatccagcatatcttgatttttgatcgttttgccgacaaagtgaaaagggatcccgtgaatgatttctttgtggttgttgtccacgaggtcatccgtccggataatctcttttgccaaattctcgtcttcacacgtaaaggcaaagatagcattttgtgtcatttttttaaccgtttccaattgtaataaaatggtcgggtggaaagatgcgtaaagggaaccctgtaattctacttcccggaggaagtcggcaatattgagtaataggtcaccgatacgttccaggtaggctgtcatatcatgataggacatgatctttcggcaatcactggctctggggcagtaaagtacgatggagttgatgacttcatccctgatttttacttccagaccgtcaatgataacttcattatgttcgatcttcgtgtataattcaccgtctttattgtcgtgggttgcggtgataacgagttccatctgttgtagtacgatggtggataagacttcaaagtcttctttaatcttttccaggtatttttctcttatggtagtcatgtggtgtaagctaaaagttataaactaaaagataaaagtttagaggaatttaaaatgaaatcaaaaagcctcgtgcgatggaaatcactgaatctaaaatcataaatcaaaaattactttatccaaattgtcctgtcaagtactcttccgtgcgtttgtcacttgggtttgtgaacattttttgggtttcgtcatattcaattaaatgaccaagatacatgaacatcgagtaatccgatatacgggcagcctgtgacatattatgtgtgacaatcaaaattgtgaattcatttttcagatccagtaacaactcttcaattcgattggtggcaatcgggtccaaggcagaggtcggttcatccattagtaaaactttcggttttagtgaaagagcccgggcgatgcataaccgttgctgctgaccaccggaaaggaaggttcctttcttgaatagggagtctttcacttcatcccataaccccacgtttttaaggctttcctctactaactggtctttttcctgcttgggaagagaaatcccgttcaatttatacccggcgatcacgttgtcataaatgctcatcgtggggaacgggttcgggcgttggaataccattcccgccatgcgtcgtacttccatggggtttgtctttaatatatttttcccgtttaggagaatctctcccgtggtcttgatatccgggtacaattcgtgcatccggttgatcgcccgtaacaaggtactctttccacatccggagggtcccatgatagccgtgattttcttttcagcaatatctgcactaacttcttctaccgcattttttcccggggtgtacgaaatggaaacttttttaagttgtaatataggatttgtgataaccatattgattttggattttagattttaaattttagattgaaagtctgtttgtaatgcaatttaaaatttaaaatttacaattattgaactctccatttttttgcaattcgttttgctataatattgagggtcaggattaacattaacaggaagagggaggaactccagatcatgtcgattagattcgggtcattgtaaaactcccagatcaacaagggaaccgcacttgtgggtttcaacacgtcccagttgattgcggtgctacccaaggctgttaacatcaggggtgcggtttctcccataactcgagaaatagccagtaagatacccgtgaacaatcccccgaaggctgcgggtaacaatactttcagaatgacactggtgtaagaggctcctaatgcaagtccggcctctttcaaacttcccgggagcatctttaacgtctcttccgtggaacgcacgattaacgggagcatcatgatactaagggcgacacttcctgcgagggcggaataactacctaggggtttcacgacccaggcataagcgataataccgattacgatggaagggctaccttgaatcagatctgtcaagaaacgagtgatgttcgaaaatttggttttcgggtgttccgagagatgaattccgaccataattccgatagggatagcaataattgcggctaggaaaaccatgactaacgtaccggtaattccgtttgcaattccgcccggaataatgtctcccgtccctttggccagcatagcgtccaaggtacttggagcgctctccgtgaaaaagttccaattaatctgtttgtagccttttttgatcaattcccagatgatggcgaataacgggattactgtcagagaggctagaaaacaggtcgtgtagaaaaagaccttgttttttatcgttctgtatcttaaactgctcattgttgcaatcaattaagtttcttgatgataagttttgccactaaattgatgattgccgtgatcaggaacaagagtaacccgatggcaatcaaggagcttaatttcaccccgtctgcctctccgaactggtttgcgatgatactggccatcgtgttacccgtgtcagccagtgaggtgggcaggttattcgtgttaccgatgagcatggttactgccatggtttctccaagagcccgtcctagggcaaggatataactggcaaatactccggaaccggcggagggaaaagtgactgttctgatcacctcgtagcgagtggctcccaaactatatgcagcctctttcagttcgttgggaaccatggatatgaactcgccactgagggaggatgcataggggatgatcatgattgccagaataatggatgaggttaatactccgaatccttgtgaattgacacccatctcgataatgatcgggcggaaggtataaaatccccataatccgtatacgatcgagggaattcctgcgagtaaatctataatggaactgatgaacgtggcaatttttttacctcgaaagaattcacctgtgaaaagtgccactggcagagaaaatggaatacagaatataagtgccagaaaagaggttaggagggttcccacgataaaggaaagggctccataagtttctctgtccggatgagggtcccattctgttgacccgataaactggaagaatccgtaatggccgagagccgggatcgagccgctgaccaatgaatagatcatgccggcactaatcagtagaatcaggatacaacaaatagagagtagccgtttaaaaataagatcacgcataattagttacaagttacaggttacaagttacaggttggcaagattcaacttgcaacctgtaaacttgtaactttattaattcaggacttttttgccctcgaaacttatagagtttaatagtgttttggcgttagccacggctgattgaggaaggggagagtaatgaacttttgtagtcaatgcttgtgcttccgggcttaacatccaatcaagtaatttcacggttgcctgtgcttgtgctagggttctgtttgcataggcttgttctttgtaaagaatgatccaggtgaaacaactgatggggtaagcgtccggtgcggaagagttcgtgatcatggtacgggtatctgctggcatttcgccttttgccgctgcggagatactttccgtgttcggtgtgatgaaattaccggacgagttcttcatctgtgccatcgggatgttcagagaaaatgcatactctgatcccacgtatccgatcgctccaggggtttggctgattgttccggctacaccgggattacctttagctgccaagcctgccggccatttcaatgatttacctgtacccacgttttctttccaatcattgcttactttcgtcaggtaatcactgaaaacgaaggtggttccgctaccgtctgaacggtataccggggttaattctttgttcggaagagttacactgggatttaattcctgaattttagcatcattccatttggtgattttgcccagatagatgtcggcaacaacctctccggaaagttttaattctttcacttccggtaaattgtaggccatgaccacggctcccatacaagtcgggatgtgtaccgttgtgtagggcatctcttgcatctccgtgtcagacaggtaggcatccgatcctccgaaatcaacaatcttgtctttcaggcttctgattccaccaccactaccaatacccccgtaagtcacggtgttacccgttttctcttgataggtcttgaaagccaagttgtaaaatggtaaggggaaagtagcccccgctgcagcgatgttcatttttttgctctcggactctttgttcttcttcgaattcccgcaagatgcaatcgcgatagctaaaataaggataagtaaatttttcatttctgatagtattaatttcaacgtcttctgattcatttattacactgcaagtttagatgaatcttgttacacgaatgttgcgcatttgttacattaatgttacaacttgaattcgatgttcagatagacgaaagagcttgatttaccatctcttgggttccaagtagagaaatttggggcgatttttagttgtttgatcggggcatattgaatacctactaagattcgttgcccgtcagcactgctccaatcatctttggaacctaggttgtcatatcttccgaagaggttgaattgatcttctagcttgatagtagaataaacggagaatccggattggtcgttgtcttccttgaacttggtgttatacatttggttatattcagctccgatggagaataactcgtgtttgtaaccggcgaagaaggctaaattctgttgatctttagtctcgtctccttcaatactcttgctggcaagatcgtaataagtgcgaatagtcaaatttttaacgggaagaattgttgctcccacggcatacctgtatttattgtcaccgttcaattttttgtaaccttccccgttgctgatcgtgatgtcggcagagagccattttgtaaatttatatttacccaagatacccatatctgcgctggaaccgaatttatactcgtcttggaaggatttcatgatataacggtatccccaaaatttttcctgtacgttgaattgttccaaaccgatcaaaccgaaatccaacgtgaaattacccgtcttccagcttaacatggcattcttgatatacgccactctttcgaggtcggaacctgaaactttggtggaacccatgtcaaaaacaacttttccgcttaatttttctgtcaaggagaattgatacccaaggtaagcacgatccagcgcgaatccggattctttatttgcatttccaatcccggcatgatagttagcgaaaacggtaacaatcggttgtcccttgatttggaatttcttcttttcttcttgtttctgaccgaaactacttaaacaaatagcagctaaaaacacactaattaaaatccttttcatttgtcaaacttttagttaatattaaaattaaatacctcttattttcggtagctaaagtagactgaaaaggtttcctaaataatacgatcctgttacatcaatgttacatttattaggtttgtttattgtcttttgaagatcgagaagttaacactaccgtactggcggtgttcgaaaaaattaggttccgaggagaagtccacggtgccaggatgttcgattatggcgattccgtccggggctaatagatcgttattgaaaatggcagccggaatctcgttgattttttccagattgtaaggtgggtctgcgaaaatgatgtcaaaggtcgttccgttcagttttttacaggcgataaacacgtcagttttgaaaatggtcatattcttgaatcccaattgggcggccgtcttttttataaaggcgtaatggttatagttcagttcgatagaaattattttccctgcaccccgggatgcgaattcgtaactgatacttcctgttcctgcaaaaagatccagtatggaggcgtcctcaatatctatataattgttgaggacattgaataaattctctttggcaaaatccgttgtcggacgtgccttgaaatttttgtcgggagtaataattttgcctttgtgtgtgccgcttataatccgcatcgatgaagatttaacaaatgaataaaatgagaactgttgaattctttatcgtgaagaataccgtttaacaagggttctttagcgaaatagggattcgggagatagagcgaaagtagctctttcagtttattatctttgagcgccgggccgcatatagaaagatgcgctttctcttggttaatcccgcactctttgatacaatttaataaaaagtatacgatgtcagtcgttgctttgtagctaaacgtgttaaatagctgaataccggagtcccggataaataacagatcaaaataattgtcttgaatgtccagaaagatctgctccgtgtctcgtaacgccttgcccatggctcctaatataaaagggtatgccccgttcacgatttggaatacgggaaaatgttcccgtacaaaatcatgaaacgatgaaataaccgtctccacgagataggcttctatcccctctatgtggtggtagaggatcgtgtcatccggtgatacttcttggttgaccgtgtagagggtggtgatattggccttgtcgaaaaaggctcccggaaccagcagtttttccttgaaacatggcatgatgtatactttcttgaaacgaagattcaagatcgcatcgttcaccacgtaattttttaacctggccacggctgcctctctggaatctgctgcatagggttcgtgtacaaacacgactagctttcccgtttcatcatgcacgcaaaatgaaaatccatccgttgcataacggatggataatatcgatttcttagatgattcgtaagtaaaattggagtcaacaaaataaatgctctgcatgtatttattcgtttacgaaccggaaattattcccagttacccacgttattgtttgcctcttgtacgctacccacttttaatccggggtatttgtttaatcttattctttcaccgttttcctccaaaatagcatcttcgtattcatcgaacaagtcttcaaaaatgaccatgtttgaaatacgagcctcgaaaacaggtacttcaatgccggaatccgtccagatcatgttggtccccatcaagaattcatgtttctttttagtaaaaggaacataccgaagatcatcaatcggatagtttttaccgaataattgttctaaagcggaaactctcatcgtatcacggataatcaacccttttttcaaagcgtcttgttccgtcataccttcttcaagttgatcatcagtaagttctccgattgaacgtacggttttcaatgaatcgtatttcacgaaattgattaatgaatcgaaactactagtgtatgttccatggatacttttgaaagcatcttgagctgttctaatatctttcagtttttggatgactctatcatatctctgttttttcaacttttgaaattgaataggattctgcacgctttggtagcacatatatcccagatagagagcggcagctgctaaaagaatttgaataataatttttttcatctttttcgtcagtatatttattatgtattaaacaagttagttctcgttattatttaagctgttttttcctatctttacacagtattttttgacgataccgtgaacaaatccttaatggattgtcgtgtcggcaaatataaaaaaaaaaaagatcacagcacacttttgtctattaaatttagtgatgataaatgaacattttgaacgtattgtaaaagagaagtttggattcgatttttcccccacgcaacaggcggcaatgaagaattttttagcatttctctttgatcgtcatcctgaaagtttatttttattgaagggatatgccggaacggggaaaacttctttggtggcggccatcgtgaatacattactgcaatttgaacagcaggttgttttattggctccgacggggagagcggcgaaagtgttttccggttattctcatcagcctgcttttacgatacacaaaaagatttaccggcagaaaaatgcacgggagggagtcgggatattcaacttgggatttaacgggaatgctaatacactttttttcgtggatgaggcatctatgatttcaatgggttctcaggattcgaattttgggacggggtctttgctggatgatctgattgagttcgtgtataacgggcgtaataaccgtttggtgttaattggggatacggcccagttgcctccgattggcgtggatgtcagcccggccttggaggctgattttttacaggtaagttacgggatggagatatatgaggcaaacttgaccgatatcatgcgacagtccgagcagtccggaattttgtacaatgctactcgggtacgggaaatgatcggggcgggatcttttgccaaacttttgcttcgggtagcgggttttccggatattgtacgggtaagcgggggagaactattggaagagttggatcaatgttatagctcttttgggatggacgaaacgatggtgatttgtcggtcgaataaacgggccaatcgttttaatgaggggatacgggccagaatcctttaccgggaagatgcttttagtagtggagataaggtcatgattgtgaagaataattacttctggggagcggaatatgacaaggtggattttattgcgaacggggatattgccactgtggagaaggttgggaaatataaggatttatacggattccattttgtcaacactcgtctaagtatttacggttacgaggaagagatcacggcatgggttatgttggataccttgaccacagaacaacctgcattgagttatgaagattatcggcggttgtacatggctgtggaggaagattatatggatgtagcttccaagcagaagcgattcaaaaagattcaagagaacgaatactataatgctctgcaaattaaatttgcctatgctgttacgtgtcataaagcccagggaggacaatgggatgcggtatttattgatccgggctggcagggagaagattcacatgatgatgaatattggcgttggctatacacggcatttactcgggcacgtaaaaaactatatctgattaatttcaaggatgaaatgatcgagatggagggataaaagaactaccccttctaattttagattccagctgcacggggagatgatgctttaactaccccctctaactcccccttacacagggggaggatactactgcactgttatattgtagcgccttcttgcgtttggctctccccctgtgtaagggggagtcggtgggggtagtttgttcctttattgaagtttcaaatccttgataatagcgtcaatccgagcattggcttcttgttgtgcccgttcgtaatcatttatgtctttcatctgagttcgagcttcaaagtagaatttaatcttcggttcagtaccggaaggacgaaccgaaatcttactgccgtcagctaggaagaattgtaatacatcgcttttcgtttcgaaatcaaggtgcgttttttctcctgtttgcaggttggttgcttccagggaaaggtagtcttttttcagtacaaccgggctgtgattgatttctttcggcgtgttgtgacggaactcttccatcatggctttgatctcctgcgccccgcttaaacctttacgtacgatgtaaatcattctttcttgcgagaatccgtatttggcataaatttccttgaggaaggagtacagtgttttattttgcatctttacccaagcggcgatttcggccattaatgatgtggcagaaaccccgtctttgtcccgggtaaatgctcccggcatgtagccaaaggattcttccccgccgccgatgaatttctcaccgccttctttgcgaataatatcggcaatccacttgaatccggtgtacacgtcataacagatgatatgatttttttctgcgatgtctttaatcaactcggtcgtgactatggttttaaccgtgtattcaccacctttaagttggttcagttctttttttctgcggatgatgtattccgtgaaaataatattggtttggtttccattcaataatgtccattctcccgcgtcattttttacggcgatgccgatacggtccccatccgggtcacaagccatggccagatcagcatcgattttgcgagctagatccaaggccattttgaatgctgccggttcttccgggttagcggatgccacggtcgggaaatctccattcggaatgctttgttccggtaccgtgtgaatattcgtgaatccccagttacgcaaagaggcaggaacaagctcgtaggtagttccgtgtagtggggtaaagacgattctcaagtcgtgttctttttgtatggcttccggtgaaagacttaatgttttcactttatccaggtattttttgtcaaaatcttttcctaaaatggtaatcatttccggtactccttcgaatttaatatccgaaacttgcaccttctttacttcattgatcacgtttttatcatgtgggggaacgagttgtgagccatcgtcccagtaggccttgtaaccgttgtactctttcggattgtgagaggcggtaagaatgacacctcctttacagcctaattctcggatggcaaatgacatttcaggcgtggggcgtaagtcctcaaacaggtaaacgtgtatgccgttggctgaaaaaatattggcagctgtttctgaaaagagccgggagttattacggcagtcatgaccgatacacacggctttcttttcattcgggaacatcttgttgatgtagtttgaaaaaccttgtgtagcagcacctaccgtgtagatgttcattcggttggttcccactcccatgattcctcgtaaaccaccggttccgaattccaaatcgttgtaaaacgattcgactaattctgtcgtgtccgtgttttccaacatgcgttttgcttcagcacgtgttttttcgtcatacgccttgtccagccacttttcggctttggctctggctatttttatgatgtcattattttccataagtgatcattattatttaccttcttgcaaagttaggattttcctaaatgaataatatggattttggaattaaattgttacgtttcagcgaagaaatttttggggaataaaaaaagcctcgtgtcaaacgaggcttttttatatagctaaagcttaaattaaaatttcttctctttaatttttgctttctttccggtaagttcacggaaatagaagattcttgatctacgaacaacacctctcttgttcacctcgattgcatgaatgtaaggagaattgaaagggatgattcgttctactccaacgttaccggacatttttctaaccgtaaaggttttggtcgttcccgtacccttaatttggataacaacacctttgaaaatctgaatacgttctttgtttccttctttaattttgtagtgtacgctaatggtatcacccgtgttgaatgaaggaatttcaatagcgttttcctgagcaaaagcctgttccgcaattttaattaagtccattgtctttattttaaaaagtttatttatcgaacgcagtattacgacttttgtcttttatgtaagagactacgtacgtttcaaaattgagtggcaaaggtagaaaaataaatattccgatgcaaacatcggaatatttattttgtagtgtttattctaccacctcaagttttttacctgtctgttcgataatcattcggagataccattccggtaaagcaggctgttcaactttcgggtttttctctcccgggattgcggttttcacgttaccatccatgaatttgcagaacaggtaaccgtagaaatctctccacgtatccaccagatgatttcccgtgcgacaggagaaatccgtgataaatttaatcgctgattctttgtcttgagctaacatttcttttgctccggcatcgatcatttggacgaaattcacgtattgtttctccagtgcaacttgttttgcacgaatttccgggtgaatcaagttatagcgtgtgtatgcgaaattcgttacttggttgaatacccagaaggctgctttattagtgaattccatcatgctgccgttgccaactgcgaacgcgaaaggcacttctgtggctgctgaatacattgggaaatacacggaactggctgcatcatcaactccaaaccaaaggattcctccgatttcatcaggtaaccaacttctacattgtgctacaaatgtgaatccggtttgttgggttgctgttgctctttcgtgaacatattctttcccgtctactttgaaactcatcggacgccatctgtacggacattcgtacggaccggctcccatatccttgctcatatccagttctgttccttccaagtgatcacgcatgaaatccatcacttgcatcacgtctactttctcgctgggtttaatccataacggcatacggttggttgcgtaacctttactatcacgttgaatgtttctccctgttgcgtaatcccagtattgagccatgtccgggttcacggcattaaagaatgcccaaacacggatttcacaggcacgagccccgctgaagtcaaccggagcgtaagtatcagagaaactgaagtctttatttttcccatcttgaggatagaatcctttttcttttgcgaaagagattacgtccttggaatacacggtggtgatattgggatcgtaaatcttgttcattttgtcggaagagatagaagttttaccttctagcgggaaagtcgtgatacgagcttggtttgcgtgggcggaaacatacccgtccggaaccatgcgtgctacccaaacagctcctttttctccttctcctttaccgatgatttcgattatccatacttcgttcgggtcaatgatagagatcgattctccactgcttgcccaaccgtatttttcaatcaagtcggtcattaccacaatggcctcacgggcatttttcgcacgttgtaacgtgatatatatagcgctaccataatctataatagctcccgtttgggattccagttctttacgtcccccgaaagtagtttcggaaatagcgagctgatgctcgttcatgtttcctaccacgttgtacgtgtgggctacttgcgggattttacccataaatttgccggtgtcccactcgtaaacatcgagcatacttccggcaggccagtcttgtgcgggccagtgatacaattctccgtataaaacgtgggagtcggccgaataagtgaccattgtcgacccgtctttcgttgctcctttcgtgaataaaaagttcgtgcaggccatcgtgtatgtggtgcagcaaactaacgctagtgtaaccagtaaatgtgcttttctcatttttagttattggtttatgattattttgataattatcgaattctgtcaaaagatttgagcaatttgatatctttaagtattccctttatggccaagtaggtaaaaataatacagatcacgggcaatataaggctgaatttataaagaatttcggcattcattttattcgcaaattgattgatgtgataccacattaagataatggcaccgatcaataggatgatttccacgatacataaacgcaactggaggaaacgttttttgaataggaacacgttcaccaagggaatcccgatcgtgaaaatattcatgattaacaaggcccagtagtgggcttgtagcacgctgttttctccaatgagaactacgccgtaagtaaaaaagttatagctcgcatcattcgggataagcaattgggcgattggcacgtacaatggaatcgtcatgatgattgctaccacgagcaagtaaatagtttggatcctttgaatcataattaataagtgattaacgtatgagagaatttaatgtatattcaataagtttcttcatgtgcggtttgtaatcagccgaggcatctccgttggcccggttggcaatgatcaggcaaatcgtggtggcccgatgtcccataagggcggctagcccggcaatggcggcactttccatctcgtaattaacaattttgtaattcccgaatctgaaatgggcaatctcgtcgtttactgttggcatctcgattggtaaacgaagctctcgtccttgtggcccgtagaatccgtttgccgtcaatgtgacgcctttcacggtaacgcctttcgtgtgtaatttgtccactagttcgtcagatgcttttaccgcatacgggcgggcagctaagggcgtccaatgacattccttgataaaggcctcctcgaaagcggcatcacataccatttcgttatcccggtagaaacgcaataccccgtctaggccgagactcatttccgagatcacgaatgaatgtacgggtacatctgcctgcacggaaccggaagtcccgatgcgtactatatttaatgtcttcttttctgcatttatttccttggtgtgcaagttgatattgaccaaagcatccagttcattcatcacgatgtcgatgttgtccgcaccaattccggtagagataaccgacaggcggtgtcccttgtaatatccggtgatggtacagaactcccggtcgcttttcttgatgtctattttctcgaaatacgaggcaatcatttctactcgggaaggatcacccacgaggatcacttgttctgccagatcttcgggatgaaggtggaggtgaaagacactcccgtcagcgttcgtgattaattctgatgattttattggctccatatactgtttactttttgagcaaccaaatttagtaaaacaaataataccggacaaatgtttggggttttttaatcctgtcgctccggctggcttaaaaaggtacaggttacaagttaagtcttcgacttaaaatctgtaacctgaaacttataatctataacttaaaagtccggccatttttgccggacttttatttattttgcgtaatttatagcacgtgtttctcgaattaccgtgactttcacctgtccggggtaggtcatttcatcctgaatctttttagcgatttcgtatgaaattttctctgcctccgtgtcagataccttttcactaccaacgactacccgcaattcgcggcctgcttggatggcgtaggtcttgaccactccattataagaaagtgcaaggtcttccatctcttttagtcgtttgatatatgactcaactacttcccgtcttgcacccggacgcgcgcctgagatggcatcacaagcctgaacgattggggcaatcatcgttgtcatttcaatctcctcgtggtgagcaccaatagcgttgcaaatatccggtttttccttgtatttttcagctaggcgcataccgaggattgcgtgcggtaattccggctcgtcatcaggcactttaccaatatcatgcaataatccggcacgttttgctttcttcacgttcaagcccaattctgcggccatgatggcacagaggttggctgtttcgcgagcgtgttgtaacaagttttgcccgtaagaagaacggtatttcattttgccgaccaaccggattaattccgggtgcaacccgtgaatacccaagtcgatggtggtgcgtttcccggtctcgacgatctcttcctcgatttgtttttttaccttatttactacttcctcgatccgtgccgggtgaatacgtccgtcagtaactaattggtggagtgaaaggcgagcgatttcgcgtcttaccgggtcaaatccggaaagtacaattgcctccggggtgtcgtccacgatgatttcaacaccggtggctgcttccagcgcccggatgttacgtccttcccgtccgataatacgtcccttgatttcatccgaatcaatatggaatattgatacggcattttcggtagcggtttccgtggccacccgttggatggtttttaccacgatttttttcgcctccatgtttgccgtcatttttgcctcttccataatctcgttcacgtatgacatagcttcggtttcagcctcgtctttcaaagaactgatgagtttttcctttgcctgatcggcggacattccggaaatggcttccagttgctcgatctgttgttttttgaatttatccagttcggcgtgtttcttttccagtaactctttttgggcctccagtgtctcctgttgtgtctccgcgtctttaatcttgcgttgacattcttccattttacgagccaattcggcgtctttttgttttagcttgttttccgcgagaaggattttgctattgcgggcattcacttgtttttcgtgttcggcctttatctgcaggaatttctcctttgcttgcaaaatcttgtcttttttaattacttccgcctctgcttccgcttccttgatgatgtttttgctcctgtatttcaaggtcatgttgattagcaggtatccgagagcgaatcccactatcagagcaataacaccggtaattattattgttatcatattcgtaacttgaatttatagttatataatatattttggtgttttttgtttatacaaaaaacccgcatcatttcttctttaaaaaacccctgttagacacgggtagagctgccgtcagattcaaacttccaccgtcccgaaggaaccccgaagggttgaggcctgtctttggctaactaagcttcactctaattggttaagtgttgagttttccagttaaatacgaaataatgcgggtatatctatttccttttcaaagaactctttctttttttactctttcacaacttcgtcgagcctgctactaatcttcttcacctcgtccaataccggctccacgtcgtttcgcctttcagcctccagcatctttaccgtgaattgtaatgcggtaacagctagaaaatcaacgggatcagcagttgcgtacttttccctatattttgcaatcttactattaatcagctgggcagcttttctgatctcctcttcttcctctctctcaatggtcagaacgcagggcctaccggctatatttagcgtaatagtaagtttatcattcatatttaattattcaaaagagcaatacatttatcaatctcccgcacaagttggcttattctatttttggcctcggaacttccttctccggtcgagatagcggtagccaccttcaatgtcttgatttcttcatgtaatttcatgttctcacttttcatccgctcaatttgaatcctgagttctttcatctctgaattcatctctctgtttttgtccagcgaggatatatatagttttatcagtcgttcaacttttgtgtttagctcgttaataacggcatcttgttttgctgtcataacataatctttacaccacaaagatagaataatttcttttaaatatcaatagtgttattaattttgcaatggatttaatgttttttttatgacaaataaaataatgtggagagggattggagctttgttgttgatgttacttcttttatcatcaaatgtttgtgcacaaactgataccttgctttacccgttgaaaaatgttccgctattgagtgggaatttcggagaattgagggcgacacacctgcataccgggttggattttaaaaccggaggacgggaaggcctaccggtgatttgcgtgaaagacggtgtcgtggcacgtgtaaaggtttctgctacagggtacggaaatgccctgtatctggaacacgaggggggaataaccacggtgtatggtcatttgagccgttttgtaccccgaattgcgaaagtcgtgagaaatatacaatataataaggagtcattcgaggtggatgagaatatgtcgggctatgaactccgtttccgtgcgggggacacgattgcctatagcgggaataccggttcttcgggtggtcctcatttgcattttgaggtgcgcgacacgaagagtgaacatgctttgaaccccttgcagttcctttcggtgaaagatcagactgggccaaacgtgcggggtgtttacgtgtattcggtttcggacgagggaacccggactcctgtccgccgggtggaggtgaaaaatacgggtaaccgggtattccggggaggaaaggttggggtacctgccggcatggtcgggattgggatacaatctgatgactacatgaaagattcttggaataaattgggtgtgtatggtttgagcgtgagggctaacgggcaggaggtctttaaaatgaccatgaacgagctttcttttgaccagacgtttttggttaacgagttgaaggattttcatcattacagggaaaaccgcttggtttacttgactttcgggaattatctagggcaattgttgcccgttcgtaatcagaacgggggatttgtttcagttgagaaagacagtgtggtggatgttgcggttgatttatcggatattaatgggaattgttccagaatcatgttccagttatggggtaaatctcccttgcgggaattggtattggcagatggggaaaaattattgatgaatcaccaaagcgatagcttgaaaaaagaaaaatatactctgtggttggaggcagatgctttaccctatccggtcgtgtgcaagccggaagtgtcttcccgcttgagagatagtgtcgagacgattgaggtattttctactgggaagcaaatatacccgttgatgaaaaatgcccggttggtggttgacgggaagtttccaggaaagtctgtgatttgtttgttggagaaaaataatcgtttttctgccttgaagacccgatggtcggaagaggggcttgaggcatttccccgggtgttgggtgagtacacggttcgtcaggacacggttgccccggttattctttacatggggaaggtcgggctgaaaatccgattccggatggttgacgacttgtcgggcatctcttcttatcgggttgaggtgaacgggaaatggtgtttgttcacgtatgatgcgaaaaatcgcctgctggaaggtaacataaatgaacccgttttcgtgaaaggaaaaaacaggcttgtcttgaaggtggaggatgccgtgaaaaatattgctacctttgagacggatatttataaaaagtaaaaataacaatgaatatagaagacgcaaaacaactggcaaaacaaggcgatcgggaaggagcaattgccatgctccggcaaatgttagaacagaatgaaggagaacgggaactcgtgctgttggagctgggtgtggtgtataacgccatgggggagacaacgcaagcgataaaccatctgaatgaggtgatgcgtataaatcccgaaaatataaaagcgaaagcttatctggatatgatcaatgggatacttgattattattgtaaggacttgttgaatccctgatgtaccactgtaattctcttgaaataccgaagtaataatctggcgtgagtctttcattaagctcttcgttccgttgttcgcttatggggaatgggctatgaaagggcgatggaagggagctaaaagagcagaaggagattattactttgtaaaagtctggtgtagtactagctttaagctatgtcaatctattattctcttggttgtttactggtagttcatttaaaccacggagcattcatcctgcattcttctagcatttatcttcgataaaattgatttttgatacgattgtatttgtaatttgagtgtgtggtgtagtatattagctatctggaaaaatagacttgttgggcaggtaaggagggcgaggtcaatgagaagggggatgacagcggcgagcgagtccccccccttttttttcatttaagctcctttctaaatctttgttttggcgatgtgcttctctgctggtaaaaatgcacaggggttttaagtttggatacttaacggcgagagaatctgttaactccttctcgtttgtattcagaacactaaaaacgaaattttatttttatatctcgattaattgatttacctttgcgaccagttttcgaattttttaatatgaacttcaatccgcttgaaagggggtggtcaattatttttgagatagtacaaaatatacatatatttaattagaaagcagcacataatggtgttgcagaatttttttattataaaattaagtattcattttttaaaattgtaaatcatgataattgtaccattaaaagaaggcgaaaatatcgagagagcactgaaaaaattcaaaagaaaattcgaaaagaccggcgtgattaaagaactgagagatcgtcaggctttcaccaaaccgtctattagaaatagaatggcccggatgaaggctgcctatcgtcaatctttgcaacaagcggaagaataaatcgatcactttctttgtttttccaaacaaaaaaacgtaacttgcttacgttattaaaatagtagaaatgatacagatagaattgttcttgaaatatttgagtagcgtgaaacgttactcggaaaatacgatcattgcgtataaggcggatttgtatcagttctacgaattttgtggtttggaaaggaataatgaggatttttctcgagtgacgaccaagctcgttagagaatgggtcgtggcagagatgaggggagatctgagggtgaacggtgccagagggaagttaagtgccgcttccggtaaacgtaagttgagcagtataaaggcgtttttccgtttccttgtaaaagagaaagtgatagaggtgaaccccgccgagaatattagcggaccgaaattgccgaaacgattaccggttttcgtgagggaagaggagatggaatgtacgttggatgatgcggagaaaaagaaaggtttttccggattgagagatttcttgatcttgttgatggcttatgatacagggatgaggcgttctgaaattattggattaaaggtggggaatgttgatctttcgcggcgttgtattcgtgttttcgggaaaggtggaaaatggcgagaaatcccgatcgtgaccgagttgatgcaggacatcgaatgttatttggatgcccggagtcgcgtggtggaaggggagcatgatatgtttttcgtgaccgataagggaaagccgctttacgctaattttgtttatcgtttggtgacgaaagaactggaatcacatacttctttagcaaaacgcagcccgcacgtgttgcgacattcttttgccacgcatctgttggataacggtgcgccgattcagggaattaaagaattgctggggcattccagtctggcagcaacccaagtgtacactcacaactctgtggagaagatgttgaagatttttaaacaagctcacccgcgagcataaattataggaggaaacgatatggacattagaattaatcctgtaggtttttcagtaaatccagtgttggaggagttcattaataagaaattctcgaaattggagaagtatcacgacggaattatgagtatagatgtgacgttgaagttggaaaaagacgatcatctggaaaataagttgactgaggtgcatgttgacgtcaaagggcaagacgtgttcgctaaaaagaatgcgaaaacttttgaagaaacagtggacgagttgtacgatgtattaaagaggcaacttgttaaagcgaaagaaaaaagagaaaattaagaaaaatgatctcatttattgtgagatatgatttttaatttgtacatttgcaagccaaattaaatgggttttctcgcacttgtctgggtaattttcaggtaaacagcgagttacttgcatgaaattgagttattgagataaattgtttaataataaaaattgttttagagttatggctaaagaacattttgacaggtccaaaccacacgtaaatattggtactatcggtcacgttgaccacggtaaaactactttgacggctgctatcactacggtattggcaaaaaaaggtctttctgaattacgttcattcgattctatcgataacgctccggaagaaaaagagagaggtatcaccattaacacttctcacgttgaataccagactgcaaatcgtcactatgcacacgttgactgtccgggacacgccgactatgtaaagaacatggtaactggtgctgctcagatggacggtgctatcttagtttgtgccgctactgatggtccgatgcctcagactcgtgagcacatccttttggctcgtcaggtaaacgttccgagaatcgttgtattcttgaacaaagtggatatggtggacgacccggaaatgttggagttggttgagatggaagttcgtgagttgttgtcattctatcaatatgatggagataatactccggttatcttaggttcagctcttggagcattgaacggagaggcaaaatgggaagaaaaagtaatggaattgatggatgcagttgataactggattgagttaccgactcgtgccgttgataaaccattcttgatgcctattgaggacgtattctctatcactggtcgtggtactgttgctaccggtcgtattgaaactggtatcgttcacacgagtgatgagttggaaattatcggtttgggtgcagatggaaagaaaactgtatgtaccggagttgaaatgttccgtaagattcttgacgaaggccaggctggtgataacgttggtttgttacttcgtggtatcgataaagatgagatcaaacgtggtatggtattggcaaaaccgggttctgttaaaccgcacgataaattcaaagctgaggtttatattttgaagaaagaagaaggtggtcgtcacactccgttccacaacagatacagacctcaattctatatccgtaccttggatgttactggtgaaatcactcttccggaaggacgtgagatggtaatgcctggtgataacttaacgatcaccgttgagttgatcactccggtagcttgtaacgtaggtttgcgtttcgctatccgtgaaggtggtagaaccgtaggtgctggtcagatcactgagatcttagactaatacaattttagatttaatgattttaaattgtaaattcgcaatttaaaatttgaaataatgagccgacttcggtcggctcacacacgggagtggctcagttggtagagcatcggtctccaaaaccgagggtcgggagttcgaacctctcctcccgtgcaaattaaatatagaacaaatgaagattaaaagttatatatcagatgtttataacgagctggtgaataaagtaacttggcctacgtggtctgagctccagagtagtgcaacgatcgtgatgattgcttccgttatcatagcgttgtgcatttttgcaatggatttttcgttcagacatatcgtgaccggtatatataatttgttttactaaaaatcttggaggtctaacatggctgaaatgaaaaagagatggtatgtgcttcggaccattggaggaaaagagaagaaggtaaaggagtacatcgagaacgaaatcgccagtttagggcttcaggattacgtttcacaggttttagtgcctgcagagaaggtgtatcaagtgcgtaacgggaaaaagtatagcagtgagcgaaacctttatccggggtacgtgctgatagaggccgcactcgttggagaaatcccccacatacttcgtgacatcacgaatgtgatcggcttcctgggggaaaccaaaggaggagaccccgtgccgatgcgacaagctgaggtgaaccggatcttgggtactgttgatgaacttgcggaacaaccagaagaaataagtatcccttatttcgttggcgagtcggttaaagtgactgacggaccgtttaatggttttaccggcgtgatagaggaggtgaattcggacaagaaacgattgaaagtaattgtcaagattttcggacggaaaacgcccctcgaattaagtttcatgcaggtagaaaaagaataacaattatttgattaaaaacaatcatggcaaaacaagttgaagctattatcaagctgcaaattaaagccggagctgctaatccttcgcctccagtaggaccggcgttaggttctaagggagtcaatatcatggacttctgtaagcaatttaacgctagaactcaagagcaggcaggaaagatcatcccggtaattatacaggtgtatggtgataaatcgtttgattttattacaaaacaacctcctgttgctattcaacttttggaagttgctaaaatcaaatccggttccgcagagcccaatcgtaagaaagtggcttctatcacttgggatcaagtgagagcaatcgctacggacaagatgaaagatttgaacgcttttgaaatcgagaaagcaatgagtatggtagctggtaccgccagaagtatgggtataaccgtaaccggtgacagacctttttaatgaacttgtaacacttcaaacgtaatgagtaaactgacaaaaaataagaagttagctttagcgaagatcgaaggtggaaaagtatattctatcgacgaggccgcacagcttgtgaaggaaatcactttcacgaagtttgatgcgtcagttgacatggacgttcgactgggtgtagacccgcgtaaagccaatcaaatggtacgcggtgtatgtactttacctcatggaaccggtaaacaagtaagagttttggttttgtgtacgcctgacaaggtggaagaagctaaggctgccggagccgattacgttggattagatgaatatatcgagaaattgaaaggcggttggaccgatatcgatatcatcatcacgatgccttctgtaatgggtaaagtaggtgctcttggtagaattttgggtcctcgtggattgatgccaaacccgaagagtggtactgtaaccccggaaatcgggaaagcagtaaccgaggtgaaggctggtaagatcgactttaaagttgacaaattcggtattattcacgcttctattggtaaagttacattcgagccgaacaagattatggagaacgctagagaattcttgaacgtgatcaataaattgaaaccggctgccgctaaaggtacttatatcaagagcgtgtatctgtcaagtacgatgagtcccggtattcaagtagaccaaaagactttacttgattaatgtagtaatctaaaaaggacttcagtagtatgaaaaaagaagataaaaaagtcgtaatagaaaccttgacggagcaagtgaattcttacaagcacttgtatgttagtgacatttccggtcttgacgctgtggacactcaggctttgcgtcgggcttgctttgatgctaacatcaaattggtgcaagtgaagaacactttgttgaaaaaggctttggaaaacgctaccaacaattacgaggagattttctccgtattgaaaggtgatagcgctatcatgttgtgcgacaccggaaacggtcctgcaaaactgattaaagaattccgtaagaccaaagacaaaccggtattcaaggctgcattcgtagaagaatgcgcttatgtaggcgaggatcagcttgaatcgttgatcagtatcaagtctaaggaggagttgattgcagacattatcgcaatgttgcaggcaccgatgcagaatgttatttccgcattacaatccggacaaaataccatcgctggtgttgttaagacactttctgaaaaagaataatttttatagtttagtaaacaaacaattttaaatagtatagaaatggcagatttgaaaaaacttgcagaagagctagtaaaccttaccgtaaaagacgtaaaagaattagctgacattttaaaagaagagtacggaatcgaacctgcagctgctgctgtagctgttgctgctcctgcagctggtggtgctgctgccgctgaagcagagcaaactgaattcgatgtaattcttaaatcagctggtgctgctaaattagctgttgttaagttagtgaaagaattgaccggtcttggattgaaagaggctaaagaagtagttgacaaggctccggctccattgaaagaaaaagtttctaaagaagaggctaactcattgaagactcaattagaagaagcaggagctgaagttgaacttaaataaaataaaaccggttggtttttccaggtttagagtctcatgtggactctaaaccattttgttgttatgattgtttaggttcaaaaaaaataatagatgtcttcatataattcaaacaatagaataagctttgcatcgataaagaatcagctggaataccctgattttcttgaagtgcaattaaagtctttcaaggacttttttcaattaggtaccacacctgagaacagaaagaatgaaggcctttacacggttttcaaggagaattttcctattactgatactcggaacaactttgttttagaatttttggactattttatagatccgcctcgctatactatcgaggagtgtttgggtcaaggattgacttatggcgcccccttgaaggcgaaactaaagttgtactgtacagatccggaacatgaagattttgataccgttatcgaggatgtatatttaggaaatgttccttacatgaccccgaaaggtactttcgtgatcaatggagcagagcgagtggtcgtttctcagttacacaggtctcccggtgttttcttcgggcagagtattcatgcgaatggtacgaagctttattccgctagaattattccgttcaagggttcctggatcgagtttgccacggacatcaataacgtgatgtacgcatatatcgaccggaaaaagaaattaccggtaaccactcttttacgagctatcggtttcgaaacggataaggatattcttgaaatattcggtctggctgatgaagtaaatgtttcccgtacggggttgaagaaagtcgttggcagacggttggctgctcgtgttttgaaatcttggattgaagatttcgttgatgaagataccggtgaagttgtttctatcgagcgtaacgagattatcgttgatcgtgaaacagtgctggagcctgagcatattgatgcgattgtcgagtcaggtgcgaagacgatccttcttcacaaggagatgcaaaatttggcagattatgccattatatataacacgttacaaaaagacccgtgtaactcggagaaagaggccgtgttgcatatctacaggcagttgcgtagttcggagccacctgatgaagctactgctcgcgatgtgattgacaagttgttcttctctgataaacgttatgatttgggtgacgtgggacgttacaagttaaacaaaaaattgggacttgcaacagatccggatatccgtgtcttgacgaaggaggatattattgagatcatcaaatatttaattcgtttattaaacgccaagactgacgtggacgatattgaccacttgagcaatcgtcgtgtacgtactgtaggcgaacaattatataatcaattcggcgtgggattggcccgtatggcccgtacgattcgtgaaagaatgaacgtgcgagacaacgaggtattcaccccggttgatttgatcaactcgaagattttgtcttccgtgatcaactcgttcttcggaacgaatgcattatctcagtttatggatcagacgaatccattagccgagattactcacaagagacgtatgtctgccttgggacccggtggtctttccagagatcgtgcaggattcgaggtgcgtgacgtacattatactcactatggtcgtttgtgtccgatcgaaacgcctgagggaccgaatatcggtttgatttcttctctctgcgtgtacgctaagatcaacgatttaggatttatcgagactccttaccgtaaggtgaataatggtgttgtggacctttcagaggaaggcgtgcgttactattcagccgaggaagaggaggaattggtaattgctcaggcaaattctgctattgatgaagatggcaagtttacaaataaatgggtaaaagccagaaaggatgcggatttcccgttagctgctggagaggatgtcgatttgatcgatgttgctccgaaccagattgcttcaattgcagcttctttgattccgttcttggagcatgatgatgctaaccgtgcattgatgggatcgaacatgatgcgtcaggcagttccgattatctccccgcaatctccgatcgtgggaactggtttggaagccaatttgatcaaggattctagaacgcaagttgttgctgagggaccgggagtgatcgcttttgttgacggacgcaaaattgttgttaaatatgaccgtacggaagaagaggcttttgtaagctttgaacccgatacgaaagaatattacctgccgaaataccaacgtacaaaccagagtacgacgatcacgctaaaaccgatcgtgagaaaaggtcaacgtgtggaagaaggtcagatattgacggaaggatactcttcagaaaagggagaattggcactcggacggaacttgaaagtggcatttatgccgtggaaaggatacaactacgaggatgctatcgtgatctccgagaatatcgtgcggaatgatgtctttacatctgttcacgtggacgagtattctctggaagttcgtgaaacgaaacgtggattggaagagttgacggctgatattccgaacgtaagtgaggaggccacgaaagatttggatgaaaacggaatcattcgcgtaggggctcgtgttcaaccgggagatatcttgattggtaagattaccccgaaaggagagtctgatccgagtccggaggaaaaattgctgagagcaatcttcggtgataaagccggtgatgtgaaagacgcttcgttgaaggcttctccttcattgaaaggtgttattattgataagaagttgttccagcgtacggtaagtgatcggaaaacgaaagctgccggcaagaatcttttggctgaactggatgaacaattccaacgtaaagtcggggatttgactactttattgatcgacaaattattcgagttggtaaatggtaagacttcacaaggcgtgaagaattacttgaacgaggatattgttccgaagggcgtgaagttctcttacaagatgttgcagaacatggacttcttgcagatcaacccgaacaaatggacgaccgataagcagagaaacgatatgattcgtgacttgttgcataactatatcatcaagtacaaggagatcgaaggtcagattaaacgtaagaagtataacgctaccgttggtgacgaacttccttccggaattatcaagatggctaaggtttacgtggctaagaaacgtaaattgcaaatcggtgataagatggcaggacgtcacggtaacaagggtattgtatcccgcgtggtaagggtagaggatatgccgttcttgtctgacggaactccggttgatatttgtttgaacccgctgggtgtgccttcccgtatgaacttgggacaggtgtttgaaaccgtgttgggttgggccggaaagaatttaggattgaagtttgcaactcctattttcgatggtgcctctttggacgatatcaacaaatacacggacgaggcaggtgttcctagattcgggaccacctatctgtatgacggtggaacgggagaacgtttcgaccagccggcaaccgtgggagtgatctatatgttgaaattgggacacatggttgatgacaagatgcatgctcgttctatcggaccctattcgttgatcacgcagcaacctcttggaggtaaagctcagttcggaggtcagcgtttcggagagatggaggtttgggctcttgaggctttcggagcatcacacatcttacaggaaatcttgaccgtgaagtctgatgacgtgatgggtagaaccaaaacttacgagcatatcgtgaaaggtgaacctcttccgacacccggaattccggaatcattcaacgtattgttgcatgaacttcgcgggttgggattgagcgttaatttaatataattgttgatttatgattttagatttacaatccatgtaaatctaaaatctaaaatctaaaatctaaaatatggccttcagaaaagacaataaagtaaaaaattttactaagatcgctattggattggcttccccggaagaaattctggaacggtccagtggtgctgtattaaaaccggagacgattaactatcgtacttacaaacccgaacgcgacggtttgttctgcgaacgaatcttcggtccggtgaaggattacgaatgtcattgcggtaaatataaacgtatccgttacaagggtatcgtttgtgaccgttgtggtgttgaggttacggagaagaaggttagacgtgagcgtatgggacatatccagttggtggttccggtggctcatatctggtatttcaagtcgttgccaaataaaatcggttacttgttagggttaccttccaagaaactggataccgttatttactacgagagatacgtggttgtaaaccccggtatcatgggggattccggtatcaaaacgatggatttcctgacggaagaagagtatttggatattctggataagcttccgacagataatcaatatctggatgatgatgatccaaataagtttattgccaagatgggggcggaagctatttccatgttgttggaacgtctgaatttggatgatctttcttatgatttaagaaataaagcgaacacggagacctctcaacagagaaagaatgaggctttgaagcgtcttcaggtagtagaggctttccgcgaaagtaaagaaattaataaaccggaatggatgatcgtgaaggtattgtctgtaataccgcccgagttgcgtccgttggttccgttggatggaggtcgttttgctacttccgatttgaacgatttgtacagacgggtgattatccgtaataatcgtttgaagagattgatcgagatcaaggcaccggatgtaatcttgcgtaatgaaaaacgtatgttacaagaggccgtagattcattattcgataactctcgtaaatccaatgcggttaagattgaaaataacagaccgttaaagtctctttccgacagtttgaaaggtaaacaagggcgtttccgtcagaacttgttgggtaagcgtgttgactactctgcacgttcggtaatcgttgtaggtccggacttgaagatgcacgagtgtggtcttccgaaagatatggcggctgaattatatatgccgtttattatccgtaagctgatcgagcgtggtatcgtgaagacggtgaagagtgccaagaagatcgtggatcgtcgtgatccgatcgtttgggatattcttgaaaacgtgttgaaaggtcacccggtattgttaaaccgagccccgaccctgcaccgattgggtattcaggcattccaaccgaaattgatcgagggtaaagcaatccgtttgcacccattggcttgtaccggattcaacgccgacttcgacggtgaccagatggctgtacacttaccattaggtaatgaggccgtgctggaagctcagattttaatgttgtgttctcataacattttgaatccggctaatggtgcgcctatcacggtgccttctcaggatatggtactcggtttatactatatcacgaaaccgagaaagggcgtgaagggtgaaggattgaagttctattctccggaggaagtgattatcgctttcaacgagagagctgtagacttgcatgctgaaatcgaggtgaagattgataacgtggacaaggacggtcaaccgatcagacatatgatcaaaacgacggttggtcgtgtgattttgaaccagtttaccccgaaaaactatccttatatcaatacgttgattacgaaaaaagcgttgcgtgatattatcggtgacgtgttcaaacgttgcggtgtggacgtgacggctaaattcttggatgatattaaggatttggggtatcgtaaagcatttgagggtggtttgtctttcaacttgggagacgttattgttccggagaacaaacaagatttgttacaagaaggatacgatcaggttgaagaggtaatggcgaattataacatgggattcattaccaataatgaaagatataaccagattattgatatttggacacacgtgaatgcgaacctgaccgccacgttgatgaaacaattggcagcggacgaccaaggattcaattctatctatatgatgttggattccggagcccgtggatctcgtgagcagattcgtcagttgggaggtatgcgtggattgatggcaaaaccgcagaaatcaggtgctacagggggacagattatcgagaacccgattttggcaaactttaaagagggactttcggtgttggagtactttatttcgacccacggtgctcgtaaaggtttggccgataccgcattgaagactgctgacgccggatatttgactcgtcgtttggttgacgtggctaacgatatcacgattaccgaggaagattgcggtacgttgagaggtattaccatttcggcaatcaagaataacgaggagatcgtgtcttctttgtcagagagaattttaggacgtgtttccgtgcatgatatttatcatccgaatacgggtgaattgatcgtggcttccggagatgagatcacggaggtggttgccgatattatcgagaactccccgatcgagcgtgttgaagttcgttctgtattgacttgtgaggcgaagaagggtgtttgtgctaaatgttacggacgtaatttggctaccagccgcatggtggagaagggcgaggctgttggggttattgcagcgcagtctatcggtgagccgggtactcagttgacattgagaaccttccacgtgggaggtaccgcaggaaatatttccagcgagaactcgttgaaagctaagtatgatggttacgttgagtatgaagaattacgttctgtcgagtacacgcaagataacggaacgacctgtgacgtggttgtaggacgtttgacggagttgcgtatattggataagaacacgaatattatcttgatttctcatgctatcccttacggtgctaagttgttcgtgaaggatggacaggagattagtaagggtgaattgctttgcgaatgggacccgttcaatgctttgatcattaccgaattttccggtacggttgggttggaaaacttgattgagggtgaaacctataaggaagaatccgatgaaaccaccggatttagggagatgattattatcgagttccgagacaagatgaaagcgcctgctttgtgtatcaatgatgcggaaggaaacacggtgaagagttacaacttaccggtaggtgcccacattgtcgtgaaggaaggagctgaggttgttgccggtagtaccattgccaagattccgagagctgttggtaaggcaggagatatcacgggaggtcttccgcgtgtaaccgagttgttcgaggctcgtaacccgtcgaatccggccgttgtatcggaaattgacggagaggtaacttatggtaagatcaaacgcggtaatcgtgaaatcatcgtgacatcaaaagccggagaggtgaagaagtatttggtttctttgtcaaaacagattttggtacaggagaacgattatgtgcgtgctggaaccccgctatccgacggtgcaattaccccgactgatattttgaatatcgagggaccgatcaaggttcaggagtatatcgtgaacgaggtacaggatgtataccggatgcagggtgtgaagatcaacgataagcatttcgagatcatcgtacaccagatgatgcgtaaggtgttgattcaagatgccggagatacgagattcttggaaaatcaagtggttgacaaaagcgagttcatggaagaaaacgatgcgatctacggaaagaaagtggtactggaagccggtgattcggatcgggtgaaaccgggacagattatctcagtacgtatgttgagagatattaattcgcaattgaaacgtagagacttgaaggtggtagaggctagagatgctgtacccgcaacttcagctcaggtattacagggtattacccgtgctgctttgcagacatccagctttatttctgccgcatcattccaggagaccacgaaggtattgaatgaggctgcaatttatggtaaagtcgatccgttggaaggcttgaaagaaaacgtgatttgcggtcacttgataccggtgggaacaggtatgaaagaatttagaagtctgattgtaggttctaaggcagacctcgaaaggatggaaaaatgaaaatagatagaggcgccgaaaggcgcctttattgtttgtataaattattaaccaaggactattatggaagagaaaaaacaacaatttgatattgaattaaatcgagaggttgcacaaggaacttattcgaatttgtcaattatttctcattcttcctccgagtttattgttgactttatccgtattatgccggggatgcccaaggctgaagtgaaaagccgtattattttgaccccggaacatgcgaaacgcttgttgctggcgttacaagataatgttcggagattcgagatggattacgggaagattaatttaccagagggcggccctatagctcccatgttcccggtggatctggaaccgcaaggacaagcttaattattttaacatgattttatataactcaaagtaagacaagttgcttgtcttcgataactcttacatcgacggcaggcttcttttccgagaaacagtaggctgtagtgattgaggggcgttggcaataaaattattgaatgtaaagcggctttgatattcaaatgaataatttgaatgttggagggctctattcgatattgctatgtgtcaaaattgaccgggataaaaatagtaggaacttgtgcaataattgttattcccatttttttctctatttttgttatctcaagagaatttttgatgtaaatggaataatcatgtatgataataatcaaaataatggtgatagattatttgaatccattcgtcaaggtgatattggtgcctacgaaatgcttttcaaaaaatattacttgtccatgtgcatgattgctcgtcgtattgttgaggatgaggatgtggcgaaggatcttgttcaggaaatatttattcgcttgtgggagaaaaggaaaacttatgattttcaagagatgacagatatatttttatacgtgtctgttagaaataaatgctttgattatttgagaagtcgaaaaaaacttccacttcaacaggagttaaaagctgctgataatgagtacttttttcgcgatattttaatagaagaggaaacctataggatcataatggaagctattgatgctttacctgttcagagtgggcgagttataaaattgagcttggaaggaaaacagaataaagaaatttctgaaaatttaggtatttccgtgaatactgtcaagtctttgaaatataaggctatggatactcttcgtgcggttttaaaagattacttctatcttcttttggtgtttttagcggaaaataattgaaaaaagtggaaaattcactcatcctttaagatgaatttatcgttctatatatagaatttgataaatgtttagtatggtagagtgtcctaaagattataaaatatcccgtttgatagctaaaaagttaatgggagttatcttgcccgaggatgaggaaagactaaatgcttggctggaggaggatgcaagaaataaggatttatatcgacgtattcttgagaccgaaaatctttctgttagggatatgtatgcgaagcgtttggatgtagaacatacttgggataccttgagagtgcagttggttggacaaagaaagtgtagatctttattttcgtcttggcagattggagtagttgcttccgtaatattgtttgtaggaattggattgtactggggattctggaaaaaatcggaggtagaacaagtagagatggtggcttgcgtggagatgagaggagccaaagctgttttagtgacttcccaagggaatgagattgttttacaggatagtactgtacggttgatttccttgggagggggaatggttgcccaaaatgatgggagtcgggtgtcttacgagggaaatggagatatggagaaagatgatgtactggaatacaatactatccgagtacctcgaggaggggagtataagttgtttttatccgataacacggaagtctttttgaattctgattcggaaattcgtttcccagtgaaattcggtaaggggaaacgtgatgtttttttacggggagaagctttttttgtggttactaaagatgcttcccgtccttttgttgtgaatgctaacgataagatgtcagtggaagttttgggtacgcagtttaatttgcaggcttatccggatgatacttttgtggagacgactttgaatgatggggcggtacgggtatttaatggcaaacagggagtgaaacttcgtccggatgagcaagccgtttatgatgaagggaaattcacggttcgtaaggttgatgccagtcgttattctgcatggaaagaagggaaattcatgttgttgaatcattcgttggagaatattatgactcgtttggcgcgttggtacaatatagatatattttgggagaatccagaggtaaaagagtatcatttctccggagaattggcccggtacgaggatttcacggaaatattgagaatgctggagttggcaactcgggtacattttgaggtaagggataggactgtgttcgtgcgtaaaatagaaaaatgatgagtttaaatataaaagagcagaaaacattggcactattttctgctcgagagtgagtttaaataacgattaaaaacagaattattaatcattaagcatgtaaaagtatgaaaaaaaacggaatcgaagtctttgatggaggtcaaagattaaaaaagatgcgatttattttaaaacgcagccttctttttctgtttatgtcgatctttttcttgcaggccgaagcggcctctcaagtggtaagattgacgttgaatttgaaagatgttacgattgatgaggccatcacggacatgagccaaaaaacggggtatcgttttttgtatcagatggaggaagttttgaagtatggaaaacgtgatgtaaacgtgaaagatgcgactttggacgaagtattgaaagtcttgtttaaagatacacatttgtcttacgtgattcagaatgatgtaattatcattactcaagcaaaagacgagaaaaagcaagaacaacccaggcagatcaaaggtaaggtaattgacacgaagaaaatgccgttgccgggagttaccatattaatcaaaggaactaaattgggagtgataacagatatagacgggaagtttaaaatcgagatcccgaaattggatagtacgattttggtattttcgtttatcggaatggaaacggtttatcaccaattgagtaatgatcgaaaaaatgatgaaaaagagctggtaatcacgatgaaggatgatgtgaaagagatggacgaggtggttgtaactggatatggcaatatcaagaaggagagttttaccggtagttctatctccgtgaaacgggaggatttattgaaggcatctgccacgaacgtggtgcaagcattatcaacatttgatccatcattccgtatacaacagaacaataagtggggatcggacccgaatgctattcctgaaatatatatacgcggacgttccggtatcggggtgaaagaactggataaagatgcgttgtctaaatcttctttgaagaataacccgaatcttcctatttttatcatggacggtttcgaggtaagtgtacagaaagtgtatgatatggatccaatgcgggttgaaaatgtccagatattgaaggatgcttcagctacggcaatgtatggttctcgtgcggcgaatggtgttgtggtgatcactactgttgccccgaaaccgggtgaagtgactatttcgtacagcctgacaggttcggtttctatgcctgatctttctgattataacttggctaatgcaagggaaaaattagaaatagagcaaaaagccgggatttataccccgcaatattatatgacttggaaacaagctttggatgcttataaccagcgattgttgcgcgtagaggaaggtgtgaacacagattggttgtcaattcctttgcgaaattccgttaatcataagcatagtttttcgatagagggggggaatgcagatttacgttatggacttgatctctcttataataaaaataatggtgtgatgaaggattcttaccgggatatcatgaacgtggggtttcacgtggattaccggcttaagaatttgcaggtggtgaattatatcgagtataattataccgaggcacaagagtctccttatggtgatttttccgattacactcatttacaaccatatgatcgtccttatgacaagaatggaacattgatttccggagcattggaattttcaacactacctcatagggatacccgagtgaataatcctttgtacgaggctcgtttaaataattttgaatacgagaaaggggatgtgtttatcgatcgattgatggctcaatggttcttgacggattatttgcatttaaaaggtcagattgctataacgaaagaatttactaaaaaagaacgttttattgatcctctttcttccaacacgactgcaaaagctcagaaggaagcggaattggagggtgatctttatttaacgaaaggggaatccacgaattgggatgctcaaattggtgcgtatgtatcaaaatcatttggtgcgcatgctttgaatgcttcagtggtagtcaatgccacgtctcgcaaatctgaaagtacctccagtcattaccgaggatttccttccggagagtatcattctcctaattatgcagcagagatcaaggataaaccctcaaaatctcagagtgctagtcggttggccggttttttgcttttagcgaattatacttggaatgatatttatctggcagacgtgtctgtgcgttttgatggttcatctgagtttggtttggatcaaaaatgggctccattctggtcgtttggagcgggtgtcaatttgcataactatgctttcttgaatgggagtaaggtgatcaatcgcatgaaatttcgtgcttcttacgggcaaaccggtaaagtgaattttccgtcttacagtgccagaacggtttatcggacgtttgatcgttggtatattgccggttttggagtcggtttgaaggcattgggaaatagagatttgaaatgggagacaacgaataaattgaatgtcggtacggatatggaattttggaatagtcggatttctttggtgtttgattattattacaataaaacggttgacttgatcacggatgtaactttgccgggatctgccggtttctcttcttacaagagtaatttgggtgaaacgttgaacaagggattcgatattcagtttcgttttgatgtaatgaaaaacaaggattggaatgttgccttatggggtaatctgaaccataataggaatgaaattctgaaaatttcagatgctttgaaagcttataattctcaagtggaagattattatggacttgctgaagagagtcaaacaccaactttatcatggactcaggccggtaagacctattcggattttatcaaaccgatcatgaagtacgaggaaggcgcctctttaacagcaatttatggcgtacgttcattgggtattgatccctcaaacggtaaagagttgtatctctaccgtaatggacaggccagtcacaaatggaaagcaacagaagaggtcgtgcttggagattcggagcctaaggctagcgggtctttcggtttgaatgctacctacaagaatttctcgttatttgcttccttcggttatgaatggggaaaacagacgtacaatgaaacgttgatcatgaatgttgagaatgcggacattcaaggaagtaatgttgataaacgtgtgctgacacagcgatgggaaaaaccgggtgatattgctccattgaaagatataaaggatatgaatagtgttacgttgcctacttcccgttttgtgcaggatgaaaatgttttatctttagatgctttgacgttgagttatgattttgacccgctatggcttcggaaaatatttttgaaaactctgcgtttggaagtaagtacgaatgaattattccgtttgtcttccatcaagcaggagcgagggacgagttatccttttgccagaacggtgaatttttctttacgtgcaactttttagtaagtcaggaatatgagaaataaattattgtatttagttttaccgttctttatgttgtcatgtaatgaatggttgaatgtggaaccggaagatgagattagtgaagagaagttattttccacgggcacaggtttccggcatgctttaaatggtgtttactttaccatggagtcaaggaatttatacggaaaacatttgacgtggggaatcgtggatgcattggggcaggtgtatgattataaaaaagctccgggtgtaaacgaaatgcagtatggtgctgctaaatatgcatgggactattatgaattcaaaccggtgttatcttctatctggacggaggcttataatgtcgtggccaattgtaataatataatacaacagatagaatatgctgatccagagatatttgcctggaaggaaaatgagaaagccatgatctggggagaggctttggcattacgggcgtttatacaatttgatatgttacgtttatttgccccggcaccctcgacgaatccgggtgatcgtaagtttattccttatgtgaatacttacccatcctatatttctaaccccaaaacggtgaatgagtgtctggagttgattgccaaggatctgattgatgcgaaacaattattgtggaaatatgattctgcaggatcttttagtcgttcggataacttcgaactggcgggaagcggtgaaaaaatatttttaatacgtcggggttttcatctgaattattgggcggctaccgctttgttggctcgtgtgtacttgtatgctcagaaagaggatgaggctttggaacaagcaaaagaggtgatgaattttgcatcccaaaaaggagctttctctttggcagatagattttattatggagatcggaagtgttattccgacgtgatattcggattgcatgttatagacctgttggattataataaggatattatgagcatggaaaacgaaaacaatgttaagtatttggctgttttggaggcggacaagaattattttggtgaagatttggaaatatccaaaggggataacgggaccataatgacaagcaatgactatcgttttaaatattggatagaagatatgaataatgaacattattcttatcgattgaccaagtatgatgcgtcgacttcgggagcaactgccggagtaatggaagtttctgatcatatcgtaccttttatccggatgagcgaggtgtactatattgctgccgagattttatgcaagcggggagcggaaggattgacgaaggcgaaatcttatttgtcatatataaaaggacgacgcgggttgaaaaagacggatatgaccctacaaaaaattgaaaatgcgcaacccgatgaatttatggatttattgattaatgatatgcgtcgggaatggataggggaaggacagacgtattttatttataaacgtttgaataagaatattccgaatgcaaatggaggttctgttcttgcttcagaaaatgtgtttgtggtaccacttccggatgttgaaactaatttgtgatgattatgagaaaatatattttgtttgcgttcgtttgggcgtgtgtgttgtctgcttgtagtgaaaaagggatcatggaatattccgataataccctttacgtgtattttgctgcagatgcaacgaaagatagtacaacttattcatttaaagcttatcctagtggagagattcacgtgaagattccgatgaaatgcgatggtgtttgggagagagaggatcgggagtacaccgtatctgctgacaagaactttacgactttaccttccgatttgtatgtattgccagagaagtgtgttttcccggcaggacaattgcaggatacgattgaaatcgtattgttggatggcgaagtattgaaagaaaaaatgtgtcggttgatgttgaaggtggacgagactgaatttgtgaaagagggagaggtggaattcagtcgtgccatattcttggtttcctcgaagttaattcgtcctgattggtggaccgtgtgggatggtggttatggtggagctgagaattattttaatattgcggagcagatttatctaggtgaatattcggaaacgaaatacacgatgtttctggaggaattggcaaaagatggagtggagtttgatgggaagaataagttggtgttgaagaaatattccctgcgtttgaagcgtcgagtagaggaatataataatgatcccgagaatatagccaatggtaaagttccattaaaagacgagaatggtaataaaatagttattcctgtagttgggtaaaaacggatagagtatgaaaaaaaatttgatatatatttttattctgttgtcagtcatggcttgcttggatgataagagcaactatgattataaggatttgaatgactttgaaaattgggatcgtaatggagtaagtaatgttgatagtgattacacgttatatcccggtgaagaaattctgtttgaaccgaaggtccgattttcgattgattcgttaaacccggatgcatcatatgcttggtatttgggtaaagaagaggaaaagactttgttgtcggaacaattgaactatacctataaggcagaagagattggggaatttactttgttgttttgtgcaactgataataaaacgaatgtcacgtttacaaaagagattagtgtagatgtgattgcttcctggaaatacggttggatggtattgtcgcggtctgccggtaatgaatcccagttgtccatgatcctgtccaaaaagcagaagataagtgtgactgttgatggtaaagacgtgtcacgggatactgttgtttatgtgggagaaaacatgaatatagtaccaaatttgggtagaggtcctcgtcgtttggttgaaaatttcattctcccgacagtacatgggatgttggttgaagatgaggttatggtgttgcaggagagtggaccggtggagttggatggaaataaattgacaccggtgggatatgcaaaaaatgagttttttgacgggattccggatcattttgatccggtggatgccgtgctgacgtttgacgggaagtggcttttgaattctgataattacatatatatggctaatctttccgttgcgattgatttgcactccgggttctacttgaaagatgcgtcgttaaacgggaaaaaggtgaagactttattaccatattacaaaggtgaaggtaattatctgatcgttggtattgatgaaaacgatacttatttcgggatcgtgaatgatggagagtgtggttataattctaccgattatgtgataaaccccttgaatagcgtgggagcgtgtgcggagtttcgagatgattatgagaatgatctttttaaaggggtagaaggtgagtttatttttcatgcttgggctaacgaggcaaattattatacttcaccagcctatttttcagttcttgaccaaaatggagagtatttgtggcactattatgaattagattaccggaaggaaaatgataaattctatttgactgaggaatccagtgaatccggtcaaatacctgcttctatcatggttgattataaatgtatggctttcttcccttggcatgaatggttgcttgttgtttctagtgaccaattacatttctatgattattgggaaaatagaataatcaatctggcttctttgccacagttcaactcggaaattgtaggtcttgctgtaaaggattatgattcatattatggtactttaaatgctcatttggctgtggctttgaagtccggtgaggtttatatttttgaagtaaagtatgatagcgaactagaggaaatggaattagtggagttgtaccacaaggatggtttcggggaaattgtagatatcgaatgtaagtttggtcaaggaaataagccaggcgcatctagtatgtattaagtatgttgttttaaccgatagaatttcaaagggagcattgctccctttgagttctcttttgttattttaaaaataggtgattattgtcatttgtatgtaaatcagttgtttgtatgaataaggtattagttttattgtcattgttattatttactttttggggaaaagcccagcagaaagcgaattataaattggcagagaagttacggaatgtttcattgggtagtttaatcgggaagtatagtatggacgtgtttcccaaacagattaacaatacggataagttttggtttgagtttaccacggaagagggaaagaatttctattttgttgatccggtaaaaggagaaaaacgtttattttttaataatacggatattgcacaaggggtaagtctgattacccggaaaggctataacgagaaagatttgagaatctccgatatagagttatccaaagatctgactaaaatgaccttttctatggatggtcgttatgaatttgactttaagacaaagaaagtacgggctgtggagaaggatcattcagaggaagatgacgaagtgatttattcttggatgaccttttctccggatcggaaatatatattgtatgcgaaagatcataacctgtatatacgaggtaataaagctaaaggtatagataccacagaaattcagttaacaactgacggagaaaaatattactcttttgctcgtaattcggaggatgatagaaaagatgaagcggaaacaaatgctcgttggtttaaggattccaagcatatttatgtggtacgtgaagatagccgaaaattgaaggatatgtttgttattaattcattgactaaacgtccgacgttggaaaagtatcgatatgagatgccgggagagaaggatttatgccagtacgaattgtggattattgacatcgagaaaaaaacagccaaccgggttccggctgataaatggacggatcaatacattcaggttatccaacccggagaaaaaggtgacaagctttttttccagcgttttaaacgtacatgggatgaagttgatatttgcgtggtaaacacggaaacgttggaagtaaaggagttgattcacgaggttgacaaaccttaccgggattatcatatgcagaatacggtaatattaaatgacgggaaagatattctgtttcgttcggagcgcacgggttggggacattattatcattatgacggagaaggacgtctgaaaaatgttatcacttcaggaccttgggtggccggacaggtggcggctattgacaccgtggggcgtacgatttacttgtacggtttcggaagggagaaaggggttgatccttattattatatgctttataaggcaagtattgataaagagggcgttacattgttgactccagagaatgctcaacacggagtttcgttcttatcttctaaacgttatttcgtggatacttattcacgggtggatatggagccgaaaattgttttgaggaataaccaggggaagatgatcatggaattggcaaaacccgatacccgacgtttgaaggaattaggatggagagcccccgaacgttttaccgtgaaggcggcagacggtttgactgatatatatgggattatgtggaaacctgctgattttgacccgaacaagaaatatccgattatttcttccgtgtatcccggcccgtttttcgagtacgtgaatacctctttccgtgtggatgatagttataacatgagactggctcaactcggttttatcgtggtggctatgggacatcgggggggaagcccgatgcggggcaaattctatcatcgttacgggtatggaaaattgcgggattatcctttggcagatgataagtatgccatcgagcaattggcagatcgatacgcttatattgatctctctaaggttggtattttcggacactccggaggaggattcatgtcaactgcagcactttgtacttatccggatttttacactgcagccgtgtcgtctgcgggaaatcatgataataatatttttaaccgaggatggtccgagatatatcatggggttaaggaaactgccaagaaggtgaaagggaaggacggacaggatagtacagtgtatacgtattcgtgtaaggtccctacgaacatggagttggcaaagcgtctgaaagggcacttgttgttagtgacgggagatatggataaaaatgtgcatcctgctaatacattacgtatggtggacgccttaattaaggcaaagaagaatttcgagatgatcgtgttaccgggtaatgggcatggtttcgggggaaaggcagaggctttctttgagcgtaaattgtggtatcattttgcgaagtatttgttaggagatgagaggatagtagaagatgatgaattgcaaatagaggattaagatgaacaagataataatgtgtataacgctggttgtctgcgctttgttgacgaacggacaacaaaaggcaaattataagctggcggaacgatataagaagcatgaaattgtgggtgtttcgggtaatagtatggcgatttaccctgaatttattaatgattccgatcgcttttggtattctttctcggatagtaatggaaaaagatattattacgtggatccggcaaagaaattaaaacggttgttgtttgataacgatgaattggtagcccaaataagtaaagaaactcgtaaggcatataattcaaaggatttatccttgcaatctatcgaattcgataaaaaggaacgttcatttactttcgagtttgatggggcaaagtatcggtacacggttaaaaccgggaaagtggaaaagattgattctttgcaaccgtggtccggtcgggaatcgtggatgaagtattccccggatagtttatatattctgtattgtaaaaatcacaatttgtacgtgatgggtaataaggacaagggacaggattccacggaagtgcaattgacttttgatgcagaaaagaattttacttttgccaaagagatggatgactccgatggagaggtagagactgttgcagaatggtttaaagattcaaaaaagatttatgccgtgagagaggatgcccggaaggtgaaggatttgtatctggtaaatagcttgtcgcaacctcgtccgacgttgaaaacttacaagtatgatatgccgggagataaagaaatatcgcaaagtgaattgttggtgatagacgtggaaacgaagaagatcactaagttcaatatcgatagatggcaggatcagtattttgaagtgttgtatgtaagtaaagattcggaaagaatttattttgaacggacaaacagggcgtacaatgaaaaagaattatgtgttataaacgtgcttaccggggaggtgaaagtgttgattcacgaggttgacaaaccgtttatggattttaagatggtgagcatctcttttctgaatgatggtaaggatatcgtgtatcgttctgagcgtagtggctgggggcattattatctatatgacggagagggaaatctgaagaatgagatcacttccggagattgggttgccggtccgatatgcgagatagacacggtgggacgtgcgctttatttctacgccttgggtaaggatgagaatatagatccttattactatacattgtgtagagctagtctggataaaccaaattccgtggagcaactgacatttgacaatgtgactcatgctgtagattggtctaaaacgtttaattattttattgatacttatcaacgggtcgatttggaaccgcacgtcgttttgcgaaacagacacggaaagaaaatcatggatttggagaaggccgatatatctcggataaaagagatggggtggaaagctccggaacgttttaaagtaaaagcggcagatggtgttacggatttgtatggcgtgatgtggaagccatttgattttgattccacgaaacattatcctataatatcttctgtttacccaggtcctttttacgagtatgtgccgacccagtttgatttcattcatggccgtaatacgcaattggcacaacttggactcattgttattgccgtgggacaccgggggggatcgcctatgaggggaaaatattatcatacttatggttttggaaatttacgagactatcccttagcggacgataagtatgccatagagcaattggctgatcgctatccctatattgatgccacgcgcgtgggaattttcggacattcgggaggtggttttatggctactgctgccatctgcacgtatccagacttttataaagcagccgtttccgctgccggtaaccatgataattatatttataataaatggtttactgaaacgcataatggtgcgacggaggaaaagaaagtggttaaggatagcgtgaatggagatcgtacggagtacacgtacaagttccgagtgaatacaaatatcaacttggcaaagaactataaaaaaggattattgcttgtcacgggtgatatggatgacaatgtgcatccggcacatacttaccgtatgatagatgctttgataaaagccgggaaaaattttgatatgttggttttgccaggacaggatcatggattctccggggctgcagagttattttttgaacggaaattatgggctcattttgcaaaatatttgttgggagattcttctgcggattacaaaagttcaattgaaaattagagtataaagaaatgaatagaataatcattttactgggattcatcgctttccatataatgggatttgcacaacaaaaggcaaattacgaattggcggagcgtatgcggaaaatcacacaaacccccatagcaaagaatactttgattataaggccgaactttataaagggaagtgattgtttttactactcgtttcaaacagaagaagggaaaaaatactattgggtggatccgaaacggaaagagaagaaattgttgttcgataatgccgaattagtgtctaagattagtgagatgacaagaaaaccttataatcataaaaatttggatatcgatgtaaaatttctggataaggaaacatttagattctatcttgatcgtcaggattatacttataatattcggacaaaagagttgaaactttggaaggcagagaagcaattcacggcagatccttattggatgtattattcttcggatagtacttatatgttgtttgctaaacgccataatttgtatttggtgggtaatccggcgaaaggtaaggatacgacagaagtacaacttacgtcagacggggagaaaaactattctttcaaccgggaggatgaaggggagttagatgggcgtttcctctgtgaagccaagtggtttaaaaaaggaaataaattttatgctttgcgggaggatgctcgtaaagtgaatgatatgtgggttgtggatgtgcttgcgcaacctcgtcccaagttggaaacctataaatacgagatggcaggtgataaacatgttattcaacatcgtctgattattggggatgccgattctcggcaagtgcgggagattgatattaaccgttggccggatcaatatgtagatgtcgtttattgtagcaatgacgggaaacgtctttatctccaaagatataagcgtacgtgggatgaagcggatatttgtatggtgaacgtggagacaggggaggtgaaatcgcttatccatgagaaaaataaaccttatttggactatcagatgaggagtattactttcttgaatgacggaaatgagatattgttccgttcggaacgtagtggttggggacactattatttgtacgataaggatggaaatttgaaaaatcaggttacctcgggagcttgggttgccagtcctttgctacaagtggatacggttcgtcgtcagatatatttctacgggtatggacgaaaagaaggagtggatccttattactatattttgtaccgggcagatttggacaaggagaacgagttgacatgtttaactccagagaatgcaactcataatataacattatctccttcttgtgattattacgtggatggctattcacgagtggatatggaaccgaaaaatgtcgttcggaatcggaaaggaaaaatcatcatgacgttggaggacccggatttagatcgtttgtacgagatggggtggcgggctccggaacgcttttcggtgaaagctgccgacggggttactgatttgtacggagtgatgtggaagcctgcggattttgattcaacaaaattatatccgattatttcctgtgtgtatcccggaccatttttcgagtatgtcccgacacgttttaccataaatgacgagttgaatacccgattggcacaacttggttttattgttatcaccgtgggacacaggggatgttctcccatgcgaggtaaatattaccatactttcgggtatggtaatcagcgggattatcctttggcagacgataagtacgtgatagaacagttggctgatcgttattcttttattgacaggaagaaagtcggtatttatggtcactccggaggtggttttatggctgctgccgctatttgcacgtatcctgatttttattcggcagcagttgcatctgcgggtaatcacgataataacatgtataataaggggtgggtcgagattcattatggcgtgagggaaagtaaaaaaatggtgaaagattctctcggcaatgaacatgaggaaattacatatttcacgtccagcaaaacaaatatggacttggctaaaaactataaaagtggtttgttgctcgtgacaggtgatatggataatacggttcatccggcgcatacgatgaaaatggcagatgccctcattaaagcaggaaaatattttgatatgctggtattgcccggtaatagacatggatacgggggaatggcagaatatttttacgagcagaaattatggcatcattttgcccggttccttttagaggattcatctgccgattatcagacagatttggattatttcatgaaaaaataaacttgtattgtataaacggtaaaatactaaattttttattatgagactaaaattagtcattattttcatgagctttttgttcgtgcaagaagttgcagcctcttctgcggctataatttggaaaaagaaaggaaaaaaggaggaaaaggtcgaagtgaaaaaagagactccttatgaaaaattttttaaggggaaaaaatgtgaaacagtcaaggggttgataatcttgcataaaatggataataaaatctattttgaattgcctttaagtttgttggggaaagacatgcttattggttccacggtgactgaaattacgaataatggttttgccaatgtgggagaaaaaccacatgaaccgatgcatgtcatgtttactcgtacggattcaacgataaatttgcggcaggtgacttgtgcttacatgtccaaagatagaaacttgcaggagcgtataaagacaagtatgatgcctgctattatcgagaatctggcgattaaagcttatagtcccgatagtacggctgttgtgattgatatgactaattttttattgagtgataatgagcagttgaatcctttttctgcctacgctccggttacttggagtggagcttggatagaaaaagagtttaaaaggaataactcacaaattgctaaaataaaagcatttgatgataacgtgagcgtgcaatcttctttgacatattcggttagtctgcgggataaacgttcatattactggtacaaagaaccttttactgccgtgatgacacgtactttcttattgttgccggaagaaccgatgcgtccgcgtctggctgatcctcgtattaatattttttggcaagggtattcagaattcagtaacgagggaaatggtatgaaaccattatactatgcaaatcgttggagattggaacctaaggatgaggcggcttatcgtcgaggagagttagttgaaccgaagaaaccgatcgtgttctatatagataatgcatttcccgagatgtggaaaccgtacatgaagtatgcggtagaagtttggcagaaggctttcgagaatataggttttaaaaatgcaattatagctaaagattttccgacgaatgatcctgaatttgatccggataatttgaaatattcctgtattcgttattccccttcttctgttgctaatgccatgggaccctcgtggacagaccctcgtacgggagagattatcaatgcttcggtgtacgtgtatcataacgtgattaaattggtgcaggattggagattcctgcacacggcagctgtcgattcggatgtgaggaaagtggtattagatgatgagattatcggggattgtatccgttatgtagtttctcacgaagtgggacattgtttagcattgatgcataatatgtctgcttcagcagctattcctgtcgattcgttgcgttctccatcttttacgcaaaagtacggtacgacttattccattatggattatgctcggaataattatgtggcacaacccggggataaagagaaaggggttcggttgaccccccccggaacttgggttgtatgatatgttttcaattagttggttatatcgtcctttgttggatgctaaaactccggaagatgaggtgcccacattatctaaatggatttcggagaagtctggtaatttggcttatcgttacggtaaacaacagttcagaacacgtcttgatccgagttccgtagaggaagatttgggagacgatgccatgaaagctggggtttatggtatcaaaaatttgaaaattattttagcaaacttgaacggttgggtgggaaaagatgatcctgactatcgcttccgcctaaatatgtataatgaggttatatatcagtatttccgttatttaaataatgtactgatgaacatcggtggtatttatatgaatgaacggtatgatggggatgttcttccgagctacacggttgttccgagaaaagatcaacggcgagccgtgaaattcttgttggatcagatgaaagatatggattggttggatgcaaaagaaatgcaggaaggctatcctttgcgaggaaatattgcatcttatttgcaggatgaaatttttttcgcgatgatcaaacaaattggtaatgtaatgatctgtgccagcaagtcgttaggagaggatgtttatactgccgaggattatatgaaagatatttacgattatgtgtgggcccctacccagcaaggaaaaacattaacttctatcgagaaattaatgcaaatcaatttgttgacaactattatggatcaggctggtgttgtttcagagcagaaaggaacccctttcgctttggctggaaatatgattcgaatacctgaggtaatgaaggagcagagccgggctgcttatggcttaatatcagaggaatttgccggaatttattccaacttggagcgattggttccgttcgagtctgaggatttattacgacaggcagaaagaatgggattcgattcttatgtaggcgtaactgctccttatattccaacgggtcatatttatttcgatgtgctgaaaaagaccttgtctttattgaagagtaaagtaaatacgggttcaacggatacgaaacaacattataagttattgatttataagatcgagaaggcattgaagtaatttattaagatgataggaaatacgatgaaagaaataatatatgctatattcctctctttctttctgtgtgggttgtgtggaaatgccgaagctaaaaagaagaaggaagtaaaaaaggcgattaagagagaggttcaaacgccttatgataaattgtttaaaggaaaaaaagcattcacagtaaatgggttgatgaaaatgcatctgatggccgggaaagtgtatgcagaatttccaatagaattattaaacagagatttagctttaacctcttcgattgaggatattagtgataacggggaaggcgttgtcgggcagtttgcgggacgcgtgaatcagttccgttttacactgcaggattctatgttacaagcccggttggtacgacggtatggtgtgaagaatacagggatgggtaagaatgcagatcagataattgaacgttccaataccccagggatttttcagagttacaaaatattagcttacactccggataaaaaggctgtggttgtcgatatgacagaacttttcctggaaagttccaggttgacgaatccttttcccagttatgccggaaattcgctttacggttttgtacaacgtatccataagtttcaatcccagcgttccgaattattgggaatatgtgggaacgataacagtatgagcgtgcgttgtaatttaggttttaacgttgaccgattagtgctcggttctttcatgcaggcaaaagatgttccggtttctgtgactgtgaataaaattctcatgttattgcctgaggatccgatgagacctcgtctggcagattctcgaatcggagtaaatgccattatacaaacagaattgccagatgtgtgccagggtataaaaacttattatattaccaagcgttggcggattgaacccgttgatgaaatccgttataaacagggtgagatggtggatgtgaaaaagccaatcgtgttttatatcgatacgttaatgcctgattcatggattaagtacgtaaaggccggggcagaggcttggaatgctgcatttgagaaaataggtcttcggaatgtggtacggactgagttgttcccgaaagattcctctttcgatgccggagatattcacaattcggtgattcgttatgctccgtcgtggatgtattatccgcaatattccatgcataccgatcctcgtaccggcgagattctgaatgcttctgtatatttgcccgctaacgtggcttcttatttctacacatctcgtactgaagagacgatggcagttgatccttccgtgcgtaaggcccgtttatcagaggagcagtttggtgaaatgttcaaggcgaaaatgatgcaggctattggtcgttgtttgggtttgacggataattatgctgcatcttctgtatatccggttgattcgttacgttcagcttcctttacaagaaaatatggtgttgttgcatctgttatggatgatttcacttgtaataaaatagcccagccagaggacgttaagaaaggtgttgttctggttcaacaaaatttgggtccttatgattatgaagtgattaaatacctgtacaagccgataatggaagtcaaacattttcgggaagaaaaagctgtgcttggacaatggataaaagaaatgcaggataagccgtattgtttatacatgcagactccggataactgggcgaaatttgatcctcgtgttagtcgtaaagatctaggagatgatccggtgaaagcgagagaatatattattcgcaatttgaaaatagcgattaataatttttttgaatggtataaagaagatgacatggatctaagtgctcgtcgtttatgttatatggaattgaccgagggttttaaaggagagttcgttccgatagttgcttatttaggtggaattgagttatatgatgagcaaatgcccagctataaagtagttcctaaagaaacgcagcgtcgtatgcttatctatctgttaaattcatgtaaagatcttgattggctggataataaagatgttttgcgtcaattgcagattatggatttgccttctaccaagataagggaaagtcttttcggagagattatgtcccgtttacattacgtgagtattgctgcacagaaatcgggaggcgaatatacgcccgaggagtttgttcttgacatatataatcatatttggaaaaatacgatgcagaataaacctttgacaaagcatgatatggacatggaacaaatattcttggctagtatcattgcaacttcttgtgttgatgctccggtaacggtattttcccctaatatggaaaatggattccgttctttaaatccggaagagttaaagcttgtaaaccggatacagcaaggaatacgacagagtatgaattatgagttgcgggatgaggttgcgggatacaattcgatcccttattttgaagcttccaatggaccaatagctcatgtttatttggatctgttactgaaaacacgagatatgattcagcgggcggtgataagtagtacaggtgaaacgaaactacattatgagtttatgttgtatcggatcaaaaaggcattagagaaaaaatagaacatcaataagcggaagatgtcttccaaatattctggtgcggtattctgaatttaagaaccagaaatttacatccaggtattggaagacaatctttctttttttaatgaaatagaatatgatgaaattcgtaataatttttttgttgattctctccggtaacattggatggtctcaaaaaaaagctttggatacagcgtcatataaattatggcgaagggtggatgctcccaatatctctgaagatgggaaatgggtaacttatcattttgtgcatattgattcaaaatatgatacattaccccgggtaacttatctatataatccggagaaaaatatcaaggaggaattgaaaaatgtggttagaccttcattttttgcgaacgggaaatggttacgttatacggtaacggctccagaggcggatacttgtgcttgcgattcgacctttttgttgcgtttgcgggatatgaaaaagatatattgggataaggagtatgatttcaatgaatataatacttcggaattaatcacgtattcttacccgatagataaaaaatctccgcgatacaggcgatttgtcattaaaaatatcgggagttgcgactccatcgtgatggatagtgtggaaaattgcacattgttgaaggggcataaagctattgtttatatcaaaaatcatggagagtataaatctttgtgctatagtcccttgaagggaaagcctgttgttattttttccgacaaggaacttttgttaaaagattattcattagcacacaatcagttgggtggaactttcacggtggccacggattcatccaaaatgaataatcctgatctcttttattctttttctcttccacaagggaagtgtcggttgctggtggattgggatgatgtgcaattcccggaaaactatgtttggcggagtagagcttatcgtttatccaatgatggaaaacgtgttatattggatggggacacgattcttccggtgccggagaaaaagcggaaaaagaaggatacccgtttcgagttggaattatggacgtggaatgatgaaatttcctctttacagcagagagaaggaaatcataggtccagtaacgtgaaactcgcctataatttggatacaaaagtttgttgccgggtgacaactcaaaatatggagaaattgatcgtgccggatggaaataagtatgattatgcttttgctttagataagacgccttatagacgtttttcagactggaaaaatgatattaatgcggatatttacctgattaacttaaatactggaaaaacgattctttttgaacgaaattcctacacggaaccggaatggagcccgaacggcaaatatgcgttatggtataatgctttggaaaaggtttggtataaaattgatccaaagacttgtcaacgggtaaatatttcgaaagagataggttatcccgtttacaatgaactgcatgatttgccgaaaccggcagaagcatacggtattgcgggatggtcaaaagatggtgatcgggttgtgctatatgaccgttatgatatgtgggtgatagacttgacggggaaaaaaactatttattctttaactgacggttatggaagaactacaaatcgacaattccgttggttaaaagatgattatggagataaaattattgattttgaaaatggatttttaatgacttccgtgaatctggagaatcgggatgagggaatttatcgttttcaggctaatggtaaattgaaaaaattaatggaaggtccttattctgtcacggtaaatcaaaaatcggtagatcagaaatactgcatatttactcggcaaagttacacggaattccgggatttgtggtggagtgatttggcatttacccgaccggtaaagataacgaatactaatccacagcaaaaaaattacctttggggatcggtgaagttggtcgagtggacgaacttcgaaggaaaaagaaatcgaggattactgtatttgccggatggttacgattcttcaaaacgttacccggttatcgtgaatttttatgaaacacatacggagacgttacatgactacatcgtaccgttttggtgtagtggtatgcttaacgtggtttcttacgtgagcaatggttatgtagtgtttatgccggacattcattttaccgtgggcgctccaggagagagcagttatagtgctgtcgttagtggtactcggatgcttatcgaccggggaatagcggataaagagcgaattgggatacaaggacatagttggtccggatatcaggtggcttatttagtgactcgtacgaatatgtttgcctgtgccagtccgggagcggccgtgtccaacatggtttctgcctatacggggattcgtacgggaagtggaatgcctcgaatgttcatgtatgaagaaacgcagagtcgtttgggcaaatctttgtgggaggataaagagatgtatcttcgtcactcgccaatcttgaatgcagataagatagagactccattattgatattccattgtgatagggatgaggctgttccttatgcagagggattgaatttatttcttgccatgcgacgtttgcagaaacctgcttggttgttgaattataagggggaacgtcatttcttgtacaacagggcggcagagatagattggacgcttcgtctgcaacaattttttgatcattatttgaaaggcactcccgagccccgatggatgagggaagggattcacgctaatgagcgtgggattgatcaaaagtatgatttggtgaaataatttttgaaatagtaattttaatttaagatagtatgaaacatttattttgtatcggattgattttgttgtgtttggcttgtgccagcgatcctcaaaaagggatggaaaagaaaattatcggggaatggtgtaatccttacacttacgagtcaacgggagagttaaaaggttttcattttaaaaaaggaggagtatgtgaagcgatcaatattccctcgttggatttgaaaacatggagtattcaagagggttatttgttgataaaaggttttagccttgaggaggatgggaaaaaagaagtttacgagaccaaggaaaagattgatctactgaatgctgatacgttgtgtgttgtggctcatgaagccaatccccgccttgtttttctttatttgaacgcaaagattatcaaagagcgagttcgtgtagatacgatgtcacatgagtagtatttaatgtgagtttgatataactcaaagtaatataagttacctgtcattgatgaatgccacatcaatggcaggattctttgaaaagatcacgaaatgtttgtacagtacagatgtgtctaaaattattaaagccatttttttcttttaaagtagaggagcatggtaatggtgatgacaaccatgatgccccaaaggataaagtaggcgtagtggtgttttagttctgggatatattcgaagttcattccgtagataccggcgatgaaagtaagtgggatgaaaatggttgaaaagatggtcaatactttcatgacatcattttgtcggtttccaatgttagtttggtagagatttatttgatcggagaccatggagtagtatatttcgatggcttcttgggcttgtacaaccagatcatccaagtcgtgtaaataggtgtacgtgttttggtttactaggggagaatcacaattaatgaaacgggttgtgacttctttgaatggacgtacgtttttccggatatatgaaagttctgttttatagtggtaaagatcttcaaccactttggcatcagcttctaaaattgttctaccgcgttcttctatggctgcgcctaatatttcaagattaatgatatagctgtcaacgagagtgtccagtagggcgtaacagaggtaatccgtcccgaaagaacgaatgcgggttttgccgtcatataagcgtttcttcacatccttgaaataatcggtatctgtttcttgaatagtgatcaggtagtgagagccgacaataaaagagagttgttccatgtgtacaataccgtcttccttaccgaaatagaaggatttagcaatgatatataaatggtcggattcttcactgaaccgagggcgttggtccgtgtttagaatatcttccagaaatagagaagatacatcaaaagccttgcccatatcggcaatcagtttagtgttttgcaagccggatatgttgatccaggtcatgtgatcgttggatacgatattagctatgttttccagagtttcgggaaagaactctttgagtccttctgaggtgtattggataacctgaatggagttttttgtcattttttgtttgccgatgaagattagggagccgggtgcggctccttttgatttcgttcggtctttaagaaaacgggccatattatggagttgaaagttaataactgaaaggtaaaagttatttcggatctgagtcagagggttctatttttagttttatcgggttggagctatctccccaggttagcgtgcgataggggaaggggaactccacgttcttggcatcaaatacttttttcaggcgacggcgatattctcggccaacggcccattgttgcatgggtttggttttgatgacaaggcgaatgatcacggcactatcggcaaagtcgtttaccccgctgatgaccacgggttcgagcattagctctttgtaaacggggtcattgaacatttcgtctccgacttgttgcatgagcatgacagcgttgtccgtgtcttctttatatgcgataccgatttgcaggacaatggcggaccattctttggtcatgttggagagtgtgtctatttttccgttttggaaaatgtgtacgacgcctgaactatcccgtagggtgacggttcttaattcgattttttcaactagcccttctgttccgttgataacggcccagtctccggtacgtagttgatcttccaatagaatgaagaaaccggatatgaaatcccggactaattcttgagccccgaaaccaaccgctaatccgacaattcctgcactagcgaggatgggggcaatgttgatattgaattttccgagtaagattagtaaaaagattacccacaggaagattctaccgataccgtatatgattcctgtgagtgtgttaattcgtttttcagcttcattgttgtcaatgttttcagccttatgagctttattgatagcgagctttttcatttttcgaattgtgaagcgtaaggctcttaataaggagacgaataaaataatgagaatggcaattgacgggagttgaatgacacaccaggtgattagttttgtcagcatttcattccagaatgcagctgtaaagacagcaggaatatgttgggcttctttcgtgttccagaatacgataatcccgtctatttgggcgctgtccggaatattcttttcgatgatttggtttgtggtgttatcccaccaggaatcatccagggttgccttgttgattaagaaattggtactgactttcggaacagaaacgacaatttctcctgaggaagggagatagtttatattgtgataggcgtctcgtatttgtcctaaattggaattaaggccaataccttcaagagttttgaatgaggtgtcccgaataatgatacgattaatgaatgagctggtatctccggcaacttccggagtagctataaaaaggagtttgccattattgtcatagacattgtaatcatcaaattcctgattgaagaacccctctttatttttgatgagcttgatttgtttagcggggaatatagaatagagttgatgaatatttgtacctctagcaatggaacctacacgggtagaacttatgatgtagggattttgtgaatcgtctgaaatacccattagctccgggatggatgatttttttccacaacttatcattccaagaatcaaacagagtagaatcaaatagtttttcatggtaacatgtttaagtattactttatagctgtatagatgtttacttgataaaattatacaaaacttattatctatacaatttaaagactgattttgttccatattgaaagggattttatcgttggaattttcaatcgtaacaagaatgtaaccgaaaaacgacggaaaaagattcgttgtttagaattgttttattttatttgtgctgaaaaatatgttttttgatatgctctgacttgattgtcaatgcaatatctgaaaagaaaaaaatactgatacaaacttgtttagatatttctattggctacctttacgcatgttttacaacataaaatttacgtgatattatagaatataatttataatttaatatttaagaacaagtaactaagtcatgagtgaaaagacagaagttatcgacaaaaaagacattgtaattcgtttctcgggagattcgggagatggaatgcaattaaccggccagcaattctcggatgctgctgctttatttggaaacggtgtatcaacgtttccggattatcctgctgaaatacgcgccccgcaaggtacggttggtggtgtttccgggtttcaagtacatatagggaatgatcccattaaaactccgggagattttgcagacgtgctcgtggcgatgaatcctgccgctttaaaggctaacttgcgttgggcaaagaaaggtgcaacgattatcgtgaacttggatgcatttactgacaagaacatcgaaaaggctgggtataaagaaaacccactggaagatgctgtcttgcaagattataacgtggttcctgtgaagatcacaactttaacggaagaggctttgaaagacagcggtctagatcagaagtctatcgttaaatgcaaaaatatgtttgctcttggtatgatttactggatgttcgaccgtacagtggatcacacgagagattttattaaccagaagtttgccaagaagccggaaatcgctagtgctaacgtgaaagtgttggaaagtggtttcaattacgcttctaacgttcatgctttggctgtacacttcaatgtggctcctgctcaaatcgagaaaggacgttaccggacaattactggtaataaggctacggcatggggatttttggctgctgctgaaaaagctaatttgcctttgttctgtggttcttatcctattactccggcaacagatattttacaagaattggcgttgagacgtgatttgggagtgaagacctatcaggcagaggacgagattgccggaatttgtacttctatcggtgcaagttacgtgggtaacctggctatcacaacaacttcagggcccggtttggcattgaagagcgaggctgccggcttggcagtaatggccgagttacctttggtaatcgttgacgtacaacgtggtggtccttcaactggtttgcccacgaaaacggaacaatccgatttgttgcaagctctttacgggcgtaacggtgaaagccctatgcctgtcgttgctgcaagtaccccgggtaactgttttgactatgctttctgggcatctaaaattgctgtagagcacatgactccggttgttctgttgacagacggattcttggggaatggtgctcaaccatggaagattccttcgttgaaagattacccttctattaccccgagagtggctaaagaaggggatgattataaaccatatgcacgtgatccggagactttggctagaatgtgggctttaccgggaacgaaaggtttggaacatcgtatcggtggattggagaaggtaaatgtaactggagaaattagttacgtgccggaaaaccaccagattatgactgatttgcgtgatgcaaaagtggctaagattgcagacagcattcctcaacaggagattttcggaaatcaagatggtggggatcttctcgttgttggatggggtggaacttacgggcacttgtactcggtggttcgtgaattgagagaagctggtaaagacgtgagcttggctcatttcaactttatcaacccgcttccgaagaacacggatgaggttcttggtaaattcaagaaaattgtcgtttgcgagttaaacttgggacagtttgcatcgtatttgagagctaaattcccgcattacacgtattatcaatataataaagtagccggattacctttcacggtagttgagctgaaagaaaaaataaccgaattattaggaaaataatcatggcagaacaatatacaccgaaagattttaagagcaaccaggagattcgttggtgtccgggttgcggtgaccatggtatcattaactccgtacagaaagccatggctgaattggggtacccgaaagaatcgtgggcagttatttccggaatcggatgttcttcccgtttcccctattacatgaatacttatggtttccatacgattcatggccgggctgctgctatcgcatccggagccaagagtgctaatccgaaattgaatattcttcaaatttccggtgacggtgatgctttggctattggtggtaaccattttattcatgctattcgccgtaatattgatattaccactttggtgttcaataatgagatttacgggttgacgaaaggacaatattctccaaccacgaaattgggtacgaaaactaaaacttctccttacggaacaattgagaccccgtttaacccgggagagttggtaatcggtgcgcaagggaaatttttcgctcgtacgttggatatgaatatcaatttgagtgcagaagttatcgaggctggtgtgcgtcataagggtactgctgttgtggaaattcttcagaactgcgtgatctttgctgatggggctcatgctgctatcacggataaagagatgaaggaagagcgtcaattgatcttgagacatggagaaccaatggttttcggaaagaacaaggataaaggtatcatgttcgatatgaaggccggtaagttaaaagttgtagagattggtaaggatggtatcacgttagatgatattatggtgcatgatgctcacagcgtgaatccttctatacattggatgttggtacacatgaaagctccggagtatcctgtggctttgggtgttatccgtgatgtggaaggtacgacttataatgatgcgttggaagctcagattgaagacgttaaagcaaaatcttctattcgttgtgttgaagatttattgaacagcggagacgtttgggaagtaaaataatggtttttaatatgtagaaaagtccgagtttaaagctcggacttttttgttttgttatttagaatggggtatggatgaaattccccagtgagtattcggggtcgagtccatttgtagtttcaaatgtccgccattgataatttcccttcgatagaaccagcaatcttctagcagttgcccgttgagtgttgccgattgaacgtaataatgattaggagcattattttctgtttcaatcacgaatgctttaccggaatagtaccggggatcgagtttaatcgtgattttacgaaatttaggactgccgatttggtaagaaggggagatgttggttcctccctgcacgtcgaataaacccatggcagccataacataccaagctcctaattgtccttggtcttcgtcttgtccgtaaccgtaaccatgttccggggtgataccgtagaattcatcacaaattaaccgggtgtatagttgtgttagccacggtttaccggaatagttgaagagccaggcatcatgcaggcagggttgattcccttgattatacaatttttcgactccggaaaagctatcaatttctttccctcccccaaacaaggttttccgggattcgataaacgtgttttccagtctttcgttgaaaagatcaatacccatgagttctgtcagaccttggatgtcatggggaacataccaggtatattgtgcggcattgccttcttggaatcctttccagccttttaacgggtcgaagtctttcatgaaactgccgtccatttcacggggacgcatatactttgtttctggatcgaatagatttttgtaagcatacgagtattgcataagggtgttgtatgcggctgttttcccgatagctttggccatttgagccgcagcataacaactaaaggcgtattccaacgtgtgggaagctccgaaattgcagacccagtcattaggatatagataatctttcaagggaataaaaccttgttggataaagtattcattgtcatatttcccgttgcccatatcccgtcctttgtattccagttcgtttttacagatggcactccaagccgtttcaatgttgaaatcacgaattccggcttggtaagcggcacatatgattaaaccttgaaagttggtttgtacaccgttcgtgtacactccggcagcttccccgtcgtgtagccaaccggaatttttgaagaagtccagattcgattttatgtaactggagaatatttcaggataggccaacgtccatatttgggtaagattccaaaaaccaccccacattccatcggtgttgtgatgggaatagagtggaattccatttttgtccaaaggtatttgtccgatcgtcttatcatgttgaatgtattgtccgtttatgtcgttggcgatccccctgccgagtagtgcatgataaagtccggtgtagaatttggttttgtcttccggggttccaccttccacttggatacggccaagcatttcattccaagtctgacgggctgcatttttcacgtcatcgaagctttttccggttgcttctgaatctcggttattacgtgcattttcaatgtcggtataggatagaccgacttgcatttgtatttgttctttggcttttgtttggaaagtcaagtatagtccgcatccggggccttttaccgagttggaattttcttgtattttttcgtcaataaatgtcccgattgtttgtggtttcttgtctagtttggcggcaaagaaaatttttattttcccgttcggttggcagaatgttgcataaatcggatagttttccacccatccggtgacttcgttggtttccgggtgatatgtgacttctgcatccgtgatggtggcactttctccttgtttgtgcccgatgtcaaatagtattcttgatgtagtagattggggaaaggtataacggtgaaagcccgtccgggtggttgccgtgatttctgctttgatattgtaatccgtgagtgttacagcgtaatagccgggggtggagacttctgttgtcttgtcaacgcgtgaacgataaccggaatccggatcttctaatgttcccggtagggtttttagctctccggtggtgggaatcgttacgactccccctatttggaactcatgaaaatgggcgaaaccttcaatggaggtatgacggtcatcatacccacaggggagccaactaccataacttccgtaagcattggtggtcggtgccagcttggccattcccatgggaagagcggctggggtatagaagaaccagcggcagtgtaccgaaccgatttgcggatcaacccagtctaccggttgtttcttttccggggtaggttgacacgtgtaaaaacctagaattaataagcataggctaaaaaggcggattgtagtttgcatctttttttagattaaggtgatttcgctgacaaatttatctttttttacttctttattcattaaaaaagaataaatttgtaatgtaaagagtagaaatccggctaaaatattccttctatgttgaatctgaatatattaagtgttacattaccgttaacgaatcccgtgttaatcttttctgtaattctttttattattctgtttgctccacttgtgctccaccgttttaagattccggatattgtcggtttgattattgccggtgcattgatcgggccttacggtttgcatatcatggatcgggatagtagtatcgtgttgttcgggacggtggggttattgtatatcatgttcgtggcggggctggaaattgatatggcggattttaaaaagaatagtaaacggagtttgatatttggtctttacacgttttttatcccgatgattttgggaacatttgccggagtttatttattggatttttcttatcctacatccattttattggcgagtatgtttgcctctcacacgttagtgacttatccgatcgtgagtaaatatggaattacgaagaatcgggcggtcaacgtgacgattggtggaaccgtggtgacttgtctgctggccttgctcgtgttggcggttatcgtgggaatgtcaacgggagagttaacccagggattttggattcagttgggcgtatcaacggtcgtgtttgctttcattgtgctttggggatttccttttgtcggacgttggtatttcaaacgatatgatgaccgagtgggacagtttatatttgttttgggccttgttttttttgcctcttttttagcagaggcggcggggttggaagcgattatcggggcattcttggctggattggcattaaatcgtctgataccgaatacatcggcattgatgaaccggattgaattcgtgggaaacgctttgtttattccgttttttctgatcggggtcggaatgctggttaattttcacgtgtttttgtatgatctgaccacggtatgggtggccgttatcatgtgtgtggtggcgaccgtgtcgaaatttattccagcttggctggcacaaaagaatttccgatttccgacttctgaaaggactttgatttttggattgagtaatgcacaggcggcggcgactttggcggctgttcttgtcggatataacgtcattttgggaacaactccggaaggagaatcgattcgtttattgaacgaaagcgtgctgaatggtacgatcgtaatgattttggtgacttgtatcatcgcttcttttgccacgcagaaaggagcgcaggaggtggctttggctgaattcgcggaagacgaaagcgtggataatgaagaaatagaagatcgtattttgatcccgttgagtaatatcgagaatgtagaggaattagtcggtttggctgtaacgattaaatccaagaaggcgaaagccgtgatgacggctttgaacgtgatacaggcggatgagggggatagtatggcggaaaagaaggcgaatcagttgctggagaaggcgacgaaagctgcggcggcaacagataacgagttagtaacttcgctgcgttatgatgaggatattgtaaatggtatcaaaaatgccacgaaagagcataagataaccgatattgtactggggcttcgcaaggaaggggttatttctgatacttttttggggaatctgacagatcgagtgttgtcaaaatgtgccacgaccacgttggtttaccgtcccgcacaacccttgtccacgataaagcgttatattgtggtggtaccgtttcgggcagagagagaaattggttttccttactgggtaattcgcgtatggaatatggctaaaaattcaagcagcaagatcgtgttttatgccgatactgccgtgttgaatgttttgcaggatatacaggccaagcatcatatagaggtggaatttaatgagtttaataattgggatgatttcttgatcatatcccgtgatataaaggagaatgatgcattgatgatcgtgatgagcagaaggaattatccctcttatttgaaaaatatgacgatgatcccgacttatttgaacaagtatttttgtaaaaatagttgtatcttggtttacccgatgcagatcggtattggtgaacaggaattaggtgcgttaaagactatgcctcatgcggattctcatgacagtttggatgagttggcagacgtattgagaggattgttcaaaagaaataaatgatttaattcgtttgccgtatgaaaaaaataattattcttcttggtataattttgttgggatatgcttttaacgagttctctccttttgagaagaagttgataactaattttacggcacggattcgggaactgcaacaagaaaaagtgtacctgcacacggataaaagcgtatacacggtaggggataagttgtggttccgggcttatcaggtacatgcagcagcgacgtttccgatggtttttagtcactatatttatgtcgacttgattgatcgtcgggattccgtgattcagcgggttaaagttgtaggacgggattcttgttttttcgggcagattgaaattcctaaggatttacaacaaggggattattctttgcgggcttttacgtattatatgcagaatgttggggaggattattttttcaaaaagaagatacgggtgattaatccgaaagattcacgcgtgtggacagatgtcacctatacgaagaatcgggagaataattataccgcaacaattcgtttgtcggatgggcaaggggaaccgtatagtcaaacgtcggtaacttacattgcgggagtgaagaaggatcagtattccgtgaaaccggcccggacggataaagacgggaagtttgaagtgaaaattgataccacgatgaaaacaatcgaagtagaatttcgggatgggcaacctttcccgttcaaacgttatatttatattccttcgcaattaaaggattttgacgtgcaattttttccggaaggaggtaatttattatcggggaattttcagcaagtggcttttaaggctatcggggcggatgggagagccgtggaggccacgggtgaggtatatcaggattcggtcgtgattgcaacggttcgtactcaacatgacgggatgggaaaatttcgtttgcccgtgaatccgggaaagaagttttatgccgtgatgaaaacggaggacggggtagagaaaagatttgaattacctgacgtttcggagacgggatggggactttcgattagtcgaaaggattcgattctgagctatcgggtgatcaaaggggggaatgcgacattgccggaggaattatataccgtgatacattgccggggtattgttgtcgggatgaatcgggtaaacggtttgcagaggggaagtgttaacttgaatattttgccggaagggatttcacatatcgtgttgcttgatgccgtggggaacgtgtacagtcagcggttatttttcgtgaaacgcaatcagcgtccggaattgaagattacgacaaataagccgacatatgtcgctcgggaattagtggaaatggagattgattttgaagaagcgtataaaggactcttagatggatcgttttcaatatccgtgacggatgatcagaaagtggtgcaagattctttggaagataatattttatccaatttgttattgacttcggatttgaagggatatattgataacccggcttattattttaatgatacgacactggaagttgagaataatttggatttagtgatgatgacgcatgggtggactcgttttgacgtatctaaattggcaaaagggaagtttgataatttgaaatacccgttggaggttgggcaggtgatttccggtaaggtaaataatttctggggaaagaagtccaaaggggctaatattatattgttgtctaactatggtctttaccgcatggcggagacagacgagaagggaaattttttgattgatggattggtatttcatgatagtacttcattcttagtacaagcggtaaatgcaaaggggcgtcggggggtaaccgtgagtgtggatcaagatgaatttttgtcaccgcattacacgttgcctaatacattggaggccaagaaaaaagaggatgatttttataagaaatttagtcaggattattattacgaaaatggagaaaaaatttacgtgttggatgaagtccttgtgtctcgtagaaagcagaaaaaaagttattctttttacgataatttagctcgatatcagttggattctgtccagattgcagaatattcgatgatgcctatagagttaattattcagcagttgccgggagtgacgtttgagaaagatgatgaaggaaatgactgttttaagcatttcggacgaaccttgtatgtgcttgtgaatgatttcgaggagtccatggatcagatccggttaatcccgtcgggggcgttgcgtaatatttctatgttggatcagatgcaaggcaaaattttctttggagatcggggtgctaacggggtattgattatctcggtggaaccgggttggagacctaaagatttgggacggcctaatatattgccttttaaaatcatgggataccagatcccggacgaattttacgtaccgaaatatgagattgattccgtgcgtcgggataatcgttatgatgagcgttctacaatttattgggaaccggttgttaaaatcagtaaggataccccggctaaattgtctttctacacggcagatacctacgggaaatattctgttatcgtggaaggaattacttcaaaaggggtgatttgcaggaaaaggattccgttgatattgaaataattcaaaatttattcgcatatttgtcgttcatagagatggatgataggtatgaacaggaattattgtttcacattaattaatgggacacggcttgatttcaagcaagtgtttgatcaatatttcaattccttggttctttttgctgatcgttatttgggagagcgagaagagagtgaatctcttgtgcaggatgctttccttgctttgtgggaaaatcgattagagtttccggatgaactctccgtgaaggcttatttgtattctaccgtacgtaataaagctttgaatgtgttgaagcatcgtaaaattgaacagcattatgtgaatgaaatccttcaagatgaggatgcggagctttattatatgagatcggtaattgaagaagaaatacgtcggttaatttttacagccattgattctttgccagagcattgcagaaaggtgtgtctgttgaatttggaggggatggataatcaggaaattgcagatgagttgcaggtttctctgaatacggtgaaatttcataaaaagaacgcttacaaactattacgggataagttgaaagatcaattttatcttctgtttcttatttagaaaatcatactaaaaaagatcgatttttcttcatttttcactacccgcttttttctttcagttgttttaggaatataaatgaaaatatatgactaaaaaatatattcgaatagcggaattgatttataaggataaaatcgggaatcttaccgagcaagagaagtgtgagctacttgcttggttggaagaatctgattttaatcggcagatatttgatgaattagcaaaagggagttcattaagtcgtagttacgatgagtatcggaatattcatcgagaacaagtgtggaatgcgatcgaaaaacaaatagtcccgcagggacgtcaattgtcattgcgatgggtgggatatgcggcatccgtaataatattagtggttgcgggatggtttattttccaaatgtcagataacaagaatgtcgtacaagagggcaaaaaagtggctcgaattacaccgggaacgcaaaaggcgatattgtatttagataatggtgaacaagtcgttttggcagacaataacacggtggttgtagaagatagtctttccggaagaatagaacaggtagataaatcgttagtttatcaaacagaatccaccgtgaaggaagaacgacttaatgtgttggaaattcctaatgggggagaattccaagtgacattggccgatggaactaaagtgtgtttgaatgctggaacgaaactgacttatccgatagctttcgtgggaaaggaacggcgggtccgtttggagggggaaggttattttgaggtaaagcgagatgagaacaaaccttttatcgtggagataaatggtatggaagtaaaagttttggggacctcctttaatttgaggtcttttgcggcagataatcgttctacggcgacgttaataagcggtaaaattgaggtgaagacttcctcgcgacgtgttgaactttcaccgaatcagcaagcggatttatgggtaggggagaataaacttgatgtgcgtgaagttgacgcggccgtttatagtgcttggacaaaaggaagattcgtattccgacgggaacgtttagagacaattctggatgatgtgtctcgttggtataatgtgacggtattttatgaacaaagtagtgcgaaagacattcttttttccggaattatggaacggtacgcggatatatctaaaacattggagatgttggaaaaaacaggaaaagtaagttttattatagatgaacagaaaattatagtacgagccaagtaaaaaaagaaacaggaaagtgctccaacacttccctgcttaaagtttcattattggtagtttgctccaacaaactagcaatagagtttaaccttaaagaattaaacaaaactatgaaaaaaaaacgagaatttgactttctcaaggagagaaagttgcaaattagtttgttaaaaatgaaagtgacagtgttactacttttggtgtgtgtcctgcaaagtgtggcaggagcgtattcccagacaacgaagtatgatatttcgatgacaagcgggaagttggaaaatgtgttcaagttgatagaacagaaaggcgaatataccttcttgtattcgatagaagatatagatcagatttcttctgtcaatgtaaatgtgaaacaggcagatttgaaagaggttttggatatttgcttggcaaataccaaactaacttacgagattagtggccatttggttattatccgggcgaaagatgaaaagccggaagacaaaatggttgtgattaaaggcgtggtgaaagataaaaaaggagaaccactgccgggagtgacgatagtggaaaaaggtactaaagttggtgtggcaacaggtgttgatggtaaatttacatttactgtagccaaacatgatggaattattctcgtgttttcatttgtggggatgaagacaagagagataacgtggaccggacaaaaagagttgaatgttataatggaggaagagtctcaagatatggatgaagtggttgttacgggctacatgaatgtcaatcgtcgagatatggttggttcttatacgaccttgaaagccgatgatgtaatgatgcctgcttattcttctatagatcagatgttacaaggacaagtgccgggtatgattgtgatgaatacgagtacacgtgtaggaacaagtcctaaaatacaaattcgtggaacatctacattgttaggtaatcaggatccattatgggtggttgatggtatcattcaagaagatcctttggaaattgatgcgaattcggctatgattacagacttggaaactattttgggaaatcagatttcttggttgaatcctcaagacatagagactattactgttttaaaggatgcttctgcaaccgcaatttatggttcaaaagcttctaatggtgttatcgtggtcacgactaaaaagggaaaggccgatcgtttgtcaataaattattctggaaatttctccgtgggaactcgtcccaattacggacaatttaatctgatgaattctaaagagagaatccagttgtcggaagaagcttttaatgatggggtattttatttggaagaaccttataagcaaccttatacttatgaaggtgctatgcgtatgtacctggcaggggaaatatcgcaggatgagtttctagatcgtaaggaacagttagaaaaagtaaatacaaattggttgaaactgttaactcgtgctgcttttagtcatagtcataatttgagtgtttccggaggaacctctaaatttaattatgttgcttctgttggatttaatcaagctgacggacaagaaataggtaatagtagtaagagaatgagtggacgtgtttctgttggtatgcaattacatcctaaaatgagagccactgtaaatataaatggttccgttactactaataagggatttgcaaacggggttaatcctttaggatatgcaacatctacaagtcgggcgattgaggcttatgatgagaatggagagtactctttttatcgtaaaaaagcatcttatttctataataaaaatacagaatctttaggatataatattttgaatgagattgcaaatagcggatcaacttcagagaattctcatcttgcggcatctttagacttttcttgggatattacggattggttaaaatatcaatttacgggagggtataatcggtcgatgaatacaagttctgtttatcgttctgaacgaacttttgccgtggctaatgagtatagaggttatgattttaattctgtggaaccgggaagtgctgaatttaaggctgctttacttccttttggaggtgatttgtttaccacggatgccgttcaagattcatataatatccaaaataagttgttgatttctaaatcctttaatgaaaatcatcgtttaaatgcattgatcggtatcgaagttcgttcagcaaagaatgaaagtatcggaaacacggtttggggatatgttcctgatcgaggggagaaaattatgaagccaactacaattgataaattggaacctattggagcagcaaaaccgactagtttaggaatctttgatgtattatattctgggcgttggaataaaacgaataaaacggataatttcttttctgtatttgcaacattggcttattcattaaagaatcgctatgttttgaacgtgaatgtgcgtaatgatgcttctaatcgttttgggcaagatgtgaacaatcgtgtggatccaacctattcttttggtttttcttggagagtttctagtgaaccttttatggaaaatatatctcgctttattcataacctgaattttaaggcgacttatggtatccaaggtaatgcgttggtgaagttgagtcctgagttgatattgaaacaaggaggtgtggccacgacttataatcagtatcaggctactatattgcgtatccctaatcctgaattatcatgggaacgcactcgtacatggaatttcggtttggaattaggtttatttaatgctgtgaatgtaaatattgactattatcggagaaggtcaaatgctgttgtcactcaagatttgtcttatgaatttggagtgaaatcaatggaagtgaatggaggtattatctataataaagggctcgaagttgtagtgaattttactccggttaataggaaaaattttggagtaagcgtaagtataaactcttcaaaaaactggaatacaacaggaaaaccaattgaaaatgtgacgattaataattatctgagaggaacaagtaatatggttttgaaaaaaggttatccacttggagccatgtggtcattctcttatgccggtttgaatccggaggatggacgaccgatgtttaatttgatggatgtgccggaagaagaacgggattccaaaatagatccaacaacttttttggtgtattctgggcagaaagatccttattttacaggaggacttaatttgggaattcgttataaatcattgaacttgaattcttcatttgcattacttttgggtggtaaaaaacgtttaccttctccttatgctaattttacaggaggaactaaacttccgaatccggaaactaatgtaaataaggatgttgccaaacgttggaaaaaaccgggagacgaaaaagtaactgatattccggctttaataaaaggattgaattatagttttactcgaccggatggtcagcctcaagattatattgctgcttgggaacaatctgattacatggttgtgaatgcctctttcttgcggtgtcgtcaaattagtttagcttggaacgtggaacgccggttgtgtcaaaaaatcggggttaattcaatttctgtgaatgctacggtaaataatattttcgtgatagctagtaaacgttttaatggttttgatccggaggttgataacagcgttatgcctcgaacattttcagcaggtataaatattggattttaaaataagaaaattatgaataaaaatgttgtatatattattgggttactgatgatggtgacatcttgttccgattttttggagcccaagtctcaaagtgagtttgttcccaagaatgcagtatctttgaatgagatgcttttaggggatgcttatcctcaaccgaatgtatcaagttgttacctgttttctttgcagacgatgttggatgatgatatttgttgttcatctttaccttatacggcctatcaggtagctcagttacctgggtacaatgcgttgtattcttggcaaccggatatgttttatttgatgggagaagtgaatatattttataatgtatgggaatcttattatcaatttattttaggtgcaaatgcagcattggactatattgatgatatggttgggacgtatgaagaaaaagcgattgtaaaagcgcaatcttatgctttacgggcattatactattttaatttggtaaatttgttcggagagccttataaccataataagaaagcgttaggtgttcctttgaaaattagtagcgaactaacaagtacgcttccggcacgtaatacggttgaagaagtgtatacccaaattgaaaaggatttgaatgaggcagaaaagttctatctctctttgccggaatcaagtcagtttagtaaaaattataggacgagtttgcctatggtgcaattgttgaaatcccgagtatatttgcatatggagagatggagtgaagcggctgaatatgcggataaagtgatttctgattggagtttttctttggtggatttgaatacattgccagctccgacggcgaaagaaccgtattataattttatttctttcgattgtagcgaaacgatttggttgtatggtagtgttgatgatgttacgaagtataataggtttattattggagggcaagataagcaacctcggtggtatatgtttaacgcttctaccgatttattgactggttatgtcggtggtgatttgcgtaaagaacgttatattgtgaaagagtatagtgatcctacaatctatttgacttttggaaaatatttgataagttctacccatgtaccaagtagtgggacagaatttggggtagcgtttcgtttagcggaggcttatttgaatttggctgaaggagcagctttatccaatgatccggtaacagcccgtgccgcgataaatacattaagggagcatcgttttacacctgaaacttatactccgatgccggaattaaccggacaggatttggttgattatattcgtcaagaacggcgtttggaactttgttatgaaggattccgttggtttgatctacgtcgttatggtatgccttctttctcaagagattgggtggtaaatggggaaaaagtggcaacttatgttatagcagaaaaagatccttcttatacacttcctataccggaacaagtattggaaaagaataagaatttagaacaaaatacattagcgaatccaagataattacgaggtatgaataagtttaaaatagtattatatgtatttctttgtagcgtgttgttaagtgcatgctatcacgaggatgatattatcccttctgagaaaacaatggttcttcgttttgattttcctcaaggtaataattcatgggatgaggatttggttaagataaacgaggaatttggcgtgtgtatgatatataaagatatagaagaaggagattacaatcgttcatggactgggggaggagtgtttgcagccgagtttcacgggcaagatttgaatgatgagcaggctcaattctatacgaatttctttaagaatcatgtttttaattatttaaatgccgagataacgcagaaggtattgcccccttattattatatggtctatgattatcatgccttatattcttttgggacaatgcaattgaaaagtgaaatgagtttttatacggataatttagacttttgggtgacttgtcttgagggagatgtgaatcccttgacatttgcacaacttgtacgtcctaagactgccgaggattatttgatgtgtaggggcgttattttgaaagagatatttgaaaaagcgatagaggttggtaatatcgtggttccagaagaatttaatacgggaatagattatcagacggaaattacgtataaggttgggtatgagaatgatgataattattacgtgaaacgaggatttcctggtataatgtatactacatttaatttttctgatttacaaagtgttaccaagataaatcctcagactaattttttgcagtatatcaatttggggatgcgctatacgaaggaagagtatgaagcgttgcgtccttcttctaaatatccattagtgcatgaaaaacggcaatttgtgatagattacatgaagagagtacataatatagatcttgtggcaatagttcgagggccggagttgtaaagtttaagctgtgccaaaatactctaagaattatattttgacatttttggcacagctctttcttgggttattattcaatgtgttataaaaatagaatagatatgcttaagataattgtattcatattgttactaggttctctgcctgtgtacgctcaatctgaccttgaaatttcggggaaattgagaacattggaagctcttgaattacggctagaggatattgaaggaaaaacgattttgtctgccgaggtccggaatgatggaactttttcgatgggaccggtaaaaattgtaccggatttatattttctttggtttggaaagacgaaacaacctatatatttaactaatactaaagtgacaattaaagggtattatgatcacgtgaatccgagtaatagttctttagtatttacaggaattgatgaattcctgaaattatccgaatggatcccaaaggaggaaattgcccgaaagaagacgataaataaagaagttcaggataatttacgaggaacaatgtttagcgctttagcatatttgtctggaatgactgcttacgagccgaataaaatgttgttagatttcattttgccggaagatcgggaggccttgactgtgaaatggctggttcaacgagtagatagcttgtcgaaatttgccattggagcgaaagcgtatgattttagttttgtggatgctagaggcaaaatggtcaagttaagtgattttaggggaaagtttgtgctcgttgatttttgggcttcgtggtgtggaccttgcagacacgagatgaaaagtttattgccaatatacaatgagttaaaggggaatgatttggagtttattagcgtgtcgcttgacaaacgagaaaaagattggagaaaaatgcttgacgaggaaaagttaccttgggtgatgttgtgggataaagagggatttacgattggtaacgagccgaatgttatccaaaaagcctatggtttttacagtatcccttttatcgttttaattgataaggagggctgtattcttgaaagatacttgcggggagaaaaagtaaaagaggcaatattgaaagctaggaagaattagtgtttaatgtttggtattgtataatataagtaaattttgtaaggatgaaaaagtatgttttgttgttgttcgcgtgtatgggcataaatatttcttatgcgcagttaataggaactggtggttccactcaaaaaaagcaatcagatttagattggtataactgttcttttgataaagatggtgtgtatggttgtgaggtgaataaggcttacgattttttgaaagataggaagattaaaaagaggcctattgtcgctttgattggaacgggaattgatgttgaacacgaggatataaaacaggcaatttgggtgaatcccaaagagaaagctgatggaaaagataatgacaagaatggcaggattgatgatattaatggttggaactttttgggaggtaaagatgggcaggtgatggaatcgctgatgcaggaaggcgatcgtgaatttctccgtttaaaggataaatatgctgattatatgactagtaatggagagttttttaaaatcgtaaatgaaaaattaactaaagtcccggctccggaaaatttaactgaatatacttattataaaaataaagtaatgccagaatctcgccttgccagtacttatggaggttggaaaatgggatatgttattcaggagtatgccaaaaaatttaaagaagaattaaatgcgaaatttccgggacaaaagcatacggtaaaagaatttcaagaatgttgtgatccaaaagctccccaagatacattgagggatgttgcattctctctgattgctatcgggttgaatttatataaaacggatgatttggatgtgatttataaggcttttgtggaaacagctgttcaaagagggaaggaaacttatgagaaagagtttcaaaaaatcagttcggatggccgtaaagatattgtcggagataattatttggatataaatgacaacaagtatggtaataatgttttgttgacttctgaggctgcaacgggaacaatgcaagctggtattgtgggaggaaaaagaggaaatggacttggtggagatggaattatagatcaagcagaaattatgtgtttgcgggttggtgcagggagtggagaaccttatttgaaagacatggcacttgctattcgttatgccgttgatcatggttctgatgttattgtgttgccacagcaaaatacgctgtatcccgagaatcagaaagcatggatgtcagaggctcttcgttatgcagaaggcaagggcgtattagtcattgtgccggtttgggaattatcacgagatttagcaaaacaaactttcttcccgaatcgttggatggacggcagcaaagaattgactaatttgatggttgttgctccatcggataagaatggcaacccttccatgaattctaattacggtgcgaaagaattggatttgttcgccccgggggtaaatatttacttggcttacatgggtgatacttataaaacaggaagtggggtcagcttggcttctgcttctgttgccggagtggcagctttggtaaaggcttattacccgaatttaacgggagcgcaaattcgtaatatcctgttgaatagtgtgacctcacggaaaggagtggaagtggaaaagggtattattgtagatggcaagcaggctcaagatttattcctttttgaagatctctgtttatccggtggaattttgaatgcttatcaagctattatggctgcggacaagtttggtaaataaaaaagatgagaatgatgtgtaaaataattttctcgtgtcttttttgtatgatattttttccaatggtagcacagcaatacaagactgtgctaccctaccggatggttggtggaaaaatgattgtcgaaatgtctataaatggttcttctcgctcgtttatttttgacacgggaggacgtaccgcattgacgagcgagatttgcgaggaattaggactagaggttgccgattcgctccaagttacagatgtaaatagtaatcaagctttctatccgcttgtgacgattcaaagtttgctcactccggatcagaaaattaatttcacgaatgttccggctttgaaattatcttctccatctcctttcgaatgttttcaggcagatgggttgattggtagtgatttgttggcgaggacgatggtggaaattgacggtaaggcaaagacgattacaattacttctgccgagaaagcttctcgggtttcattacgtaaaatgcttccttttgtgaaagcgggaatgccgattattgcgttgcaagcagggatgggaaatgacattatttgtttatttgatacgggttgtcccagttttttctctctgaaagagagtgattttgataggttgaagacggccggtgcttttcagatccttgcggaaggatatggggaaggttctatcggcgtggccggaatggcaatggcagatacttctttgcgggtacaattccccctattgtcggttggtggaactaaatttcaaaatgtaacctcggaaacttcaactccgccttttaccttgctaggtgttaaacttttagattatggcaaagtaacactggattatcctcgtgctcgtttttattttgaagcttatgagccggagtatgatcttgccagcaaacattataatgtggcccttcgagtgaaagatggagaattaattatttccacggtgtggacttccatgaaaggagttgttgaggtgggggataaagtgacgaaaattaacgggaaacctgtcgggatgtatgatttttgcgagagtattattaatggaattccggagttaaaagcaaagaaaaagacaaagttgaccgtgcaaaccaaacggggagagaaagtgattgtttatcaaaaagagtaagatatgcgaattgttgtattattgctgcttggttttatgacctctttacctgttgttacaattgctcaacaaacaactcgacggatttgtgacacgattcattacgaatatgttcatgataaaatcattatacctgtgattgtaaatggcgtgaaagtgaagtatatcgtggatacaggagggcagacaggaacgataagagagaatgcagtggaaatgaaggctatgagtgggggaacttcacgaggggtatccgatctgaacggaatgtcgttagcttatgaggaagccgtgttgtcaaatgtccagttaagctcgaattataaattaacccagatgaaaagcatggtcttcccgtcaaatggtttcttccgggagttaggagtcgtggggatcttgggaagtgatgcttttgcccaggctgtggttacttttgatgcccgggaacaaatcatgattattaattatccttatcgtccggatggtttgaaaatttcagagggagttgctatttatccggggcagacgagtcatcctatcgtggatgtggattttggtgggattatgaagcgggtgttgtttgatacgggagccaacgggttattaatcctttcggctgatgattacgaggatttaaaagacaaggttgagaatcgtttactttcttgcggaattgggattagtggtgtcggaattggtggttttgatttgaagaacaccatggagatgaaaaaagttagtatcggggagcttaatttcgttgggaaagagtttaacaacatggaaagtgtcacgtgtaaggggagttcgttaatgggagtggatatgttgaaatacggtaaggtggtgattgattatatgcggaaccgtttttactttttcccctatgaaagtagaacagaagatatgaccggagagttgaaaaactggaacgtgggaattcttccggtgaaaggtcatttcgagattacagcagtatgggatagtgctaaagatttggtcgctttgggagatcaagtgatccgtgtgaatgggaaaaatctatccgaattgaaacaaagtcaactggaagtagaggctttacttgatactgtggaaggggacgtgacggaaattgttattctgaaagatggtaaagaaaagaaggttgaaattaaaagaatgtgatatgaaaaatagatgttttatctttttattaataatgttactcccttcattgacgtgggcacaaacaaagaataccgctaccgaggtgaaggattatcgggaagtagacgggaaaattattctggatttgattgttaatggagaacaggctggttttgtgttggatttggcgggtcacacggcgatattgccggaatacgtggaaaaatttaagatagacaccaatacgccggggaatttcggttatgaaggtttcctttacaagcatgtgccgacgagtaagagtgtgttaattagtacgatgtcattcgggaataacgtgtttggcaatggtgtttcggcttttgtgctggaagatgagccttatttacgaaaattgggagtagccggggttattgggggagttttatttcgtaacgtggtgttgacgattgatcgtaagcgtaaaaaaataacgacatcaatgccttatcggccatcatacatgaagttggatcatcgggcagatatagaagttgtacccggttctggggtcgtttgcacggtaacacttgacggaaaggcttaccctttgttatttgatacttggaataatgggatgatctccatgacagctgaagattttgctaaacttggtggaaatcgtggtggtgacgctactattatgaacggttataaagaggccggaaaagcttctgtgacgaaaaccgtcgggacatgtaatttcgtgaaggatcagttgggtagtgtggttgtgtctgagaatacggatctatctcgttctgtgttaggtacggggatattggaaaagggaattgtttcgatagattaccagaaacagaaaatttattttcagccttttgatctgattgaaataaaagatgatgtggttgaggacatagcatcgaaggtagaacccggaaagttaaacccgattacccgtgaatatttcctagagcacatttatgattatcgtaaggataaagaattcgtgtttaagggagataaaccagtggttattgatttttgggcaacatggtgtggtccttgtatgcgtttaattccggagatggaaaaaatggccgaaaaatataaagatcaggttatatttttaaaggttaatgccgacaaggaaaaagaattgtgcagtatgtttaatgtggtggcattaccgacactgttttttatcccggtgggaggcaaaccgattattgaaaccggggctatgcccgaaaaatacgagcaaattattaaagacaagttgttaaaatagtctcttgtttaacattttactaaaggcaagcttctattcgagggttgccttttttctgtctcaatttatcgggtatttagatatgttttttaggaaaaatgattggctttttggaaaatgaagaaatcttgtctatttttgagtttagatataaaagcaataatactcaatacgtgcgagggaaacaggggcatatgattcatttttctgagggaaaatctttctctgtggatgagttgtatgaccgtttttataatgaattggttttgtgggctgataccatattgaatgatatggaggaggccgaggacttggtacaggatttcttcgtgcgattgtgggagaaaaaattgaacgagaacctagagggagagcgggtaaggtcgtacttgtatgttgccgtgcggaatatggctgtccgaaaggtaaaagatcagagccggattcggcggattccggatatatcggtcgtggaaagtgtatgggagaatgaggatgtaacgcgtgatgacatgatagatcaggtgttgaaggcgcttgatgtgttgtcacctagaagccgggaggtgttggaatgtgtgcatttgaagaatatgaaatatgtcgaagtggcggaattactgggcatatccgtggctacggtaaaaacgttgttggtgcgtagcctgaagacgttgaggggtattgtttctgatacagctttgttgttggtgcttgtttatagggaagatggcggtaagcgttcagatttgggaatgttcactaaaaagttagtttgaataaatgtaaaatagtgtcattaaaatgctataatattgttatcatgttgtaagccgctcccattccgctcctattccactcccattccgctcctattaaaatgataaaatattagattataatagtaattattaatgattggataactctattataaaaacttgcttacagaataatagttcgaacagataggtattttatcaaaatgctcacattgcctggacaaatccctgcttgccgaggtttctcgtcggcatgatggatttgatttttccgtatcttcaatgtgctctctacaaggaaaaaaataaataatcacgataatttttgaaaatattttcattttcctgtcaaccgttttgctttttgatgtctactatatgtgaacattgagtagaataatatgaatcgagaagaatgggatatacgattacttgaatactggcagggggaatctctctccccggaggagctgcgggatgtggaaaattggttgggggagaaggtggagaatcgtcggtattatgaagatttgcaacgagagtttttacgccagcgttgggtgatgcgggaagggttggtgtcccggaagggggaacggcgttttcggcaggtggcaaagaagaggatgatgctccggcgagccgtggcgtttgccgcttgcgtgagtgtttttatcttggccggaatcgggtattattggagaagcgaagagatgagggaagtgcaaatggtcgaaaacggggtgattcatcacggttcttccaaagcttgcttgtttctttcaacgggagacatggttgagttgggaaaggaacgaaagtcgttacgagaggagcagtctgttgctattgacgtgaagcaggaaggaatggtcgcttatcgagattcgatggttacaggagaggtcgggaatgtagtgtataacaggttggtcgtgaatcggggaggagagtaccggatcgtgttggcagacggttccgaggtgtgggtgaattcagagagtgagttggtatacccggtgcgctttgtgggggaaaagagagtggtgcggttgaaaggcgaggcttattttaaggtgcaggcagatgcggatcacccgtttgtcgtggaggcgaacggggtggaagtggcggctgtcggtacggaattcaatgtaaattcccggaaggagaaggttgtggcgtccgtgctggtgaagggacgagtggaagtggagaacggaacccggcaggtgatgttgacgccgaatcaactggccgtttgtgacgtggagacgaacgggattgtggtaaaagaggttgatgtcagaaagtacatcgattggaaaaacggggattttgtttttagtgacgaccgcttggaggacgtgatgaataagttggctttatggtatgattgtgacgtggtttatgctgatgcagaattgaaggaaatccgtttgtccggtgatatgaaacgctatggtgaggtggaagagttcctgcactttttggagataagcacgggtgcgcatttcaacgtgaaaaataaaacgattgtagtgagtataaagtaaaaacggaaagattggcagatccttccgtcttgtagtgaacgccagttggctctggctaataataatttattatcaacaaagttatgaaaaaaagtggagaatgtaaaggaaatttacgctcggctcaaaaaatctttagagtgatgaaaatgatgtgttttctgatgttcgtgttactggtacaggttcggggcgacgtggttgcccagaatcaggtggtcagtgtggacatgaaaaattgtagtgtggaagaatttcttcgggagattaaggagcaaacgggtattcgttttatgtacaagagtgagtacgtggaggctattcctcgtttcgatgttcatgttaaggagcggcaggttctggctctgttggatgaagtttttgcaggcaagggaattaagtgcctgtatgataacggggtgattgttttgacgaaagtacaacaacggaaggagccggaagaggtggtgatcaaggggatagtgaaggatgagagggagcaacctttaccgggagttactgttttgataaaagggacgacgattggtgtggcaacggatttgaagggtgagttcacgttgacgactgtgagacaggattctttgactcttcagttttcatttatcgggatgaaaagtcgggaggtgaggtggaccggacagaaaatgctgcatgtcgtgttgcaggatgattctcatgatatggaagaagtcgtggtaacaggttaccagacgattagccggagagagtcggcaagtgccatttccacggtgaaagccaaagatattatggtgcagggagtcggatcgattgaccagatgttacaagggcgtattcccggtatgatggtgctgaatacttccggagaaccgagtgcaactccgaaaatcaggattcgaggaaatgccacgatcaatggaaataaatctccggtttgggtggttgatggggtgattttggaacaggatgtgccctttacggcttcagatataaatagtgaggatgccgaatatttgattggtaatgccattgcaggtttgaacccacaggacatcgagacaattacggtgttaaaggatgcttccgcaacggctatctatggggtgaaggcggctaacggggtgatcgtgattacaacgaaaaagggcgtgattggtcgaccggtgatctcgtataacgggaatctgacgttaaatactcgtccgtcttacaaggattatcatcgaatgaattcgcaagaacgggtgcttttttctcgtcagttgatagagtcaaatatgaatttcgggcgtgtacccacgggggaaacgttcgaggcggcttacgagcaattgatgagcaagcaaatttcacaggcggagtttgaacagaaggtggagaagttacagggtagaaacacggattggtttgatttgttattccgttcggatgtcacgcacacgcatgcgctgaatgttagtgggggaacggaggcggttaagtattatgtatcggcggggtattcaaatatagagggggcggctaagggatctgattctgaaaaattcagtgcattggcaaaggtggatgcggagtataatgaatacttgggatttacggccaagattgattatgccacgacttctaatacggggtattcttccgtggtgaatccgtttgattatgcttattcaacgacccggaccatgccggcttataacgaggacggttcgtattacatgagttatcgggctgccggaagtacgggacgggattatattgggtataatattttgaaagagttgaagaacacgggtaagtcttctaaaatggatgattttaacgctttgctggctttgaggttaaaattatggaaagggttaaagtacgagggaacattttcgtggcatactgggaacacgaatacgagggattgggcgactgcacaatcgtataaagtgactgaaatccggggatacgagtatggcgcttacacggagtacgacccggagttttccgattcaaggttaccttacgggggaatgttgacgcagggaagtactcgcaaaagcggttacacgttgcgtaatatgttgtcttattcgcatctgtttggtattcatgatgtttcggtttctgtcgggacggaggctcgtcggaacgagtataaaggtgtctccacgacgggatacggttgggtgccggagttcggggagatgttcagtccggtggagacgccgagttatatcagcacgtacgggggaaataagccgacgaatacaaattcgttcacgcaagtcgcttcatttttcgggattgccagttattgctatgataaccggtacgtgttcaatgccaatattcgttcggacggttccaataaatttggtagtgacccgaaatacaggtggttgccgacttattcgtttgccgtgaaatggattgcctcgaatgaatcatttttggaaaatgcaaaatggattaataatttgtcattccggggttcttacggtattcagggaaatattcacgagagtgctactccttacttgattgtaacagtgggagatcgagacggggtaactggattaccgatttcaaagatttcaaaattgccgaatcccgatttgcgttgggagaagacaaaatcttggaatgcggctgtcgatttcgctttgttcgacggacgggtaaagggaggatttgatatttaccggaagaatacttccgatttgatcatgtcgaaacaagtggcggcctccacggggcaaaacgtgttgtattataatgcgggaaaaatggtaaacaagggtttcgagggatttgtgaacttgggtttggtgaataaccgggattgggattggcgtttcgggtttaatttcgggcgtaacgtgaacgagatcacgttggcgaatcgggatgatttgagcgaggcttccgtggtggatcagatgttggcggggacgttggccgtggagggacaacctatcggttccatgtatgcttatcgttttgccggaataaatcaggataatggttatcctttgttttacgcgaaaaacgggcaaaaggtgcatcgggcgttgcggcaggatttggaattagtgcattgcggttctatattcccgaaactttctgggggattcgacacgcaggtgactttcaagaaagtactttctttatccttgaattttgcttacagtacgggtagtgtttcccgtcttccgaaattttacgattcttacacgattgatcctttgacgaatctttcggatgagtggctgaagtgttggaaacaggcgggggataacacgatttatccggctccttataactcgacggatatgaagaattacttggccacggaaactggcagcgtgtatgatatttcagaggggatttccgggcattctgatccttacaatttgtataatgacagcgacatccgggtggcgaaggccgatttcctgaaattgaaaatggtggcgttgagttatagcgtgccgcagaacgtgttggatttcctacatatttccagtatgctggtgcggtttcaggtgacgaatttgttcacgattgccgataagaaatggaaaggtctggatccggagacgaatggtgcgaatatcccggcccttccgacgtatagttttgggataaatgtgtctttctaaaaataggtcgttatgaaaaaagtaaatatatatattctaaccttgttcttgccgtggtttttgttggcttgtgatgattatttgaaggaagattccgatgatttgttaattccttcactggtgaatgattatgttccgatattattgggagaggggtatccggataagtttgcgtcccagatcgaatggattcatctgatgacggacgacgtggagatgggtccgttatattatgacgagtcgatgtataacaatagtaaggtgacgtttattgacgatttcgatcccggtatgggttacggggagatggtgtacacgtggtgggcggattattcccagtatatcacggataatttttgggatgcccgttacaaaaatattttggcgtgtaatattatcgttgatgccttgccggacatgaagtacgaggcgagtgaatacgggacttattgcaagctggcggcacagacgtatgctttacgggcttatcattatttttgtctcgtaaacacgtatggcacaccttggtcagaagagaacaagaataagttgggtgtgatcaaacgtacttccccggtcgtggatgtcagcccgacggagcgggccacggtgggagagatttacgcgttgatgaatgaggatttgaagaatgctgagaaatatctggagagtgcgagtaggaattacacgaaatgggagatcacgcctgcggctgtttattttctggcatcccgggtggccttgttccaagaggactgggaggaggtgattcgtacttcagaagagtttatcaatctaggtggcaatgaactctatgatttgaatgatgttgatcgggagacttgcgggttaccgggatcttccggcggaacgttctggattaaccagattgcgattgacgagactgtatttcttttcagtaagaatgataataagtttaattatctggctcctaatctattttacacgaattacacgctagggttccatacgtcatggacgggagacgatgcgttattgaatttgtacgaggatggggatttgcgtaaagaagtttattttgcccggttgttcaaattgggtggaactcggttgagaccggagtatttctcggggcaggctcttccgatgaaatcggatcgttatttatcaacgagtgaaggagaggcccgtgaatgttggcggagtccggaggtgtatctgaatttggccgaggcgtatgctaggaaggagaacggggtaagccagactgcgattaattggttgaatcagttgcgggtaaagaaaatttctagggatacttatcaggcgaagaacgttgcggattttgcctcgcgagaagatttgattcaatttatctgggaggaacgccgtcgggaactttgtttcgaggaggccatgcgtttttgggatatgcgtcgtcaggggatgcctgaggtgaagcatgaattctattcttcgatgacttcatcaaagacatttgtactgaaacaggaaagtccgaattatttattaccgatcccgctttccgaaacggaatacaatgacggaatgacgaataattccagagaaacaattgttggaaattaataatgatagatagagatgaaaacgatgaaaatggcgatatatatcatgttggctttattcctgtcgggaatggcctcatgtggatcggaagattcaataaacccgataccggaattggggaatcctccttttgatttacctcgcggggaggagggctcgttggaagagttgatttattccgtgtacgagaaatacggttcgtttgtgctgtacgattttgatcagacggagttttataccacttggaacgggcggacggtttactggtacgctcccgtgaagagtgggaataaggatcatgtggctcaaatggtgacgtttatgttggagaaagtgtttgccggttatccggaggcatttattgctaagttcctgccgaagaagatttatctggtagattctatttgtaatacgtcttcttataataaatcgaatctggtgaacacgttagtgacaaataatcatggtttggcggtttcgaatgtcggagtgaagatggaagctttcacggatagcgattgggatgccatgaatacggggatcgtgacggcaatcatgagtaatatttataacacgatgacggtgccggatgagttctttgctttggtgacgtatcagtttatttatatgtttgatgaagaggaggatgctgatccggaaggggagtttgatgcttaccattacgttttgtacacgaatggattcgtggggtcgaatgcattccttgagtatggttatttcatgccgcataaggatggagatgacttgggggattatctttcgttcttgatgtcaactccgaagagcgagatggatcgcatttttgcccgtttcgatattgtgaaacagagagctttcctgatcgctgattttatggttaaagagatggagatggacccggttgccttgcagaattcgttttgcccgaatgatccgctccctgttggttattttgataaagaatgaaagatgataataagaggatttttaagtttgatcgtgtgctgtctcctttgggggacaacttgttcccaagtagtttatgatattacgggcgtttgggtggatggagcgggaaaaacgcttcagttgcgaacattggaagggggaaatgtggagggagagtttttggattcagtggtggtggctacggatggaacttttattttgagaggaaaggttgacagaaaacagtgtgcgatgattgcaagtgcaaagtatggttttcgagcaatctttttggatgggacccccatgagatttactattaacacgggtgagtattcgtacaagaatccgtctgctccttacgtgttggataacgagactaaggatcagttggcagctcaagcaatggtgcagttttggggagatgattatattcgcaatttttcgttgggaggcctggggctttcgttaaaaagagctacaactaaagggaaacaggattctattgccgccgagataaagcaggttgaacgggaacaatgggatcagatgaacgctttcctacaacaatataatgatagtgatgttgctccttattttatcgaaatgaatatgttgcggatgatggcgttggaacagatatcttctttttatgaccgttttactgatcgggtgaaacagacagaaaagggaagggagatcggggaacggatagctttattgaagaagttggcaccgggaagttttgcacctgaatttgaattgaccacgtctgacggtaaaaaaattgcattgaaagatttgagaggacatattgtgttgcttgatttttgggcttcttggtgtggaccgtgtatggacgagatgccaaacgtgaaggctctgtacgagaaatatcatgatcggggcttggagattgtgggaatatcgatggataataataaggctaaatgggaaggagcgatcgagagggctgggttggtgtggcatcatgtttcttctttaaaaggaatgaaccgttgtccggtggcgaagttgtatcaggtggtggctattccgaagttgtacatcgtggataaagatggtaagatcatagccaaagatttgcggggagaggatttgcgggagaagatggatgagttgtttcagtaaaatatcagaaaataataatgaaattgtatatgatgaaaatgttgacaagaggagtgatcatacttgcgtgtgttatgttggtgttgtcctgttctcggggaatttcttaccggattacgggaacatgggaaaatggtgcggggaagaaactttttctaaaagagtttgtagaggagaaagaattacgtgtagtggattcggctgtcgtgaagcctgattttactttctcgatgaagggaaacgtggataaggttcagaaaatggcgttgagttatggtaaggacaaaaagaaggagattatcgtgacagaagagcctttggaagttacacttatggaggtgaccaaggaatggaagggtaagccgacaacttcagtgcatatcacttgtaagggtggagaagagcaggaatggcttgaaaagggagccagtttgaaaacgatggtttctttcatgcagttgggaaagatgatggcggccagcaaggtggattatgatgatccggtggcagtggattctgttaaacggatgattcaggtgcttgacagttctctgactcgtaccgtgcaaaattacatggattctactcgtaataattatgcttcgacttattttttcgagtcttacctaatggataattactcgtttgaggaggtcagaagtttttataatcgtttgacggatcgagtgaagcaatcggctccgggtatcgagttgaaaaagaaaattgatgaaatgggtacagtgagcgtggggggaatagccccgaacttcaaggcgatgactcctgacggaaaagagttgtccttgtatgatttgcggggacatattgtattactggatttttgggcttcttggtgtggcccgtgtatggcggagatgccgaacgtgaaggagatttataaaaagtatcacgataaaggtttggaaattctaggtgtttctttggattcgaaaaaagaaccttgggtcaatgcaattgaaaagaacgagttgatgtggcatcatgtttcaacattgaataaatttgattgtcctattgcaggacagtttagggtgacaggtattcctcggatgtatattcttgataaggatggtaaaattattgcccaggatttacggggtgaggagttagcaaagaagatggatgaacttttcaaccagtaaaaaatatttatcagggttagatgttgaggtatgacatcgaagtgggacatggtagccgaaagggtaccatgtttttttattatttgataattatacctatgttattattttgtaataattatatttgcatgatcgaatcttttggatattgggttatagggaattattgatttatcgatatattttttatttttgaaggaagatttaggaaaaactgctttcatggatataattgcagggataaacgagaagaataatcgggtgttcaaaacattttttgagaagaatttctcttccatcgtgatgtttgccgataaatatttggacgatatggaggttgctgctgatatcgctcaggagtgttttatccgtttgtggcatggtgatcagacttttgagtcggaggataaagtgaaaggttttctatacacgaccgcgaggaatttggccttgaatgaattgaagcatgatgcgattgtcgcccggtatgtacaaaaaggaatgttggagtcggaggaatatttgcgggataacgtgatagaagaagaggtctacgcgataatttataaggcgatagatgagttggctccacagtcccggaaagttattttgttgtcgcttcaagaactttcaaatggagagatcgcggagaagttagggatttcgattaattcggtgcgaacgctgaaacagaatgcttataagaagttgaaggggctgttgaaggattatttttatcttcttttcttgttggattttactagctggtcttagtttttatatgtctggtattcatgtcttttgatttgtttgttttcgaaaaagagatgaataaaaaataatttttttgcaaggggattcatcgtttttgttttttcagttgttatatgaatgtaataattggaaaacatatggatatcatttcacaaaataagcggatttgttatttaatcgccaaacagctatgggaagggttggatgacgtcgagcgacgggagctggaagcttggaggcagttggagccggagaatgaagtgctttatctgaagttgactaatcgggaaaaagtgagtcggtatgtagagaagagggcctcgattgacatgaaaaagtatgcgatggtttatgatcgggagatcgggttgggtgttcgtggaaaaatgaataaattgtggggatatgctgcggcaatattggtgttgtgtgttatcggggtaacaatctggatgaatgagttgaagcagaatgaggcgaatcagttagctcaagtgacaatagaaccgggacgggcaaaggccttattggtattggatgatgggcaggaaatcgagttggatgaccataagacgagcaaagttttggaagaaagcgggattgttattgtgaatgattcttcccgggtggagtatcggccggcttcgaggatgggtgagaaagaggtgatgaataagattattgtccctacagggggcgagtataacctgattttgagtgatggaactcgggtgtacttgaatgcggagagcgtgattacgtttcccaagcatttcacgggagagaggcgagaggttactttggagggagaggcttattttcacgtgacggcttcgaaagaacatccgtttatcgtgaaaacgaaagacatggatgttatggtgaccgggacggaatttaacgtgaaagcgtattcggatgaaatgaatgtgcagacgacattattgcagggagtggtaactgttttctccggtctcgagaaaaaggaaaagatggagataaaaccgaatcaacaagcggaatggtgtcggcgtagcgtgaagatgcgggtgagagaggttgacccggacttatttatggcatggaaaaacgggcggtttattttccgtcaggatcgattggaggatatcatgagaacattggcccggtggtatggcgtggaagtagtttatttggatgaatcggttaaaagcatgctttttgccgggaagttggaccggagtgaagaaattactcctattctagatgtgttacggacaacggataaattgtcggttgatgtgaaaggaaaaaagattgtgattgggttgaaataaaaaaacagatgatgctgcgaacatcacctgctctagtttttacctcgtataaatacaagtttaattaaatcgaataacaaagttatgaaaaaaaagtggaaagactgctttccttgtaggggaaagtacgtgaaaatttttagaattatgaagttgtgtacgtgtctactattctgttccatgatgacgttgtctgccggggtgaggggacaacatatcaaaatgagcctcgatatgaaaggggttacgttggaagaggtaatctggacattagaaaagaagagtgatattacttttttctataatgtgtccgatgtgtcaaaggtgactaatgtcagtgccgtgtttaaagatgcgtcgttggaggcgattcttgatatgttgctgaaaggaacgaatctttattacgaaatacagaatagggtggtggtgataaagagcgggcagcctatgtctgtacaggattctttgaaaggagtaacagtgaaaggagtcgtgaaggattctcggggtgggatgttaccgggagtaacggtagttttgaaaggaacaacgacaggggttgccacgggaatttcaggagatttcgtgattacgattcctaaacgggattcggtaacgttattattttcgttcgtgggaatgaagacaaaagaggtgaagtggaggggacaaacagaattgaccgtagtgttggaagaagatatgaacgaaatggaggaagtggtaattacggggtatcaggtgattgatcgtcggaagtcaacgagtgctgtgtcttcggtaaaaatggaggatatcatgattccgggagtatcgacgttggacaagatgctggaagggcagattcccgatttgatggtgatgactaattccggagaatcgggtgttgccccgaaaattaggattcgaggaacttcgacgttgatcgggaatcgggaaccgttgtgggtcatagatggtgtgatcgtgcaggacccggtgcagatttcgccggacgagttgaacgatccggattatattaatcgtattggtaatgcgatttcgggtattaacccgcaggatatagagcgtattgacgtgttgaaggatgcttcagcgacggctctttacggaacgaaggctgccaatggagtgatcgtgatcaccacgaagcggggccacgtgggagaaccccagatctcttaccggggtacggcaacattgaagttaagaccgcgttattcagaccggaatattgatttgatgaacgccaaggagcggttgaatgtttcccgtgagttggcggaggctggttaccaatatgcgacaagtgttacttgggttggatacgagaagttactgcgggagttgtataaccgcacgatctcctacgaagagtttgagaaacaggtggcttatctaggaaaggagaacacggattggtttaagttgttgacgagggatgcgttttcttcttctcacacggtgagcgtgacgggaggaacggaaaaagtccgttattattcttccgtgggagtgaatatcgaggaggatgtggtgaagcctaatcttgacaggcgttacacggggacgttgaatttggatatgaatttcacgccttggttggcagcttcgtttaacgtgaatgcgaacacgtcaaaacgaaagtattatcaagaggagattgccccgattaattatgcttataatacgagtcgggcgattccggcttacacagaagagggaaagtatagtttttacttgattccaagtggtttctcgtactatgactacaatattctgaacgagttggagaatagtagtaagcggcaggagggttcttctgttactttccgggcaaatctggatgtgaagccttgggaatggttgaaaatttcaacgattttgtcttattcggtggcgaatacggatattgaggggtattggggaacgaagacttatcatgctgctctgattcggagaagtgctgatgaggcgggagcggatgaaacttccggaatgccgagagggggagaattgacggtggataaatctagaaacaagtcatatatgtttcgtttgcaggcagacttgaatcgctattggggtgtggagcaacagcataatatcaacgcatcggtgggtatggaaacgaattccacgaaatatgatgcgtacaagaatattacccggggatatgatccggagcgcgggaaacagtttatcgtggttgatccgacggtgtacacgtcctatgcgaattggatgtcagagaatgtaccggtggtgacggataatttgagtaatatgttgtcatggtacggtagtatctcctatagttacgggaattggtttaccgtgaatgccaatgtacggtatgatggctcgaatcagtttggagagagaagtaatgataagcttttaccgatatggtcggcttcgtttaattataacgtgatggagcattttaaaggggagcaggattggtttgatgatttgcggttgaaaatgtcctatgggtatcaagggaatatgctagacggacagtctcccgtggcgattatttcgaagaagccgtataatgatcattacggggagtatgtttcgtcgatcactacttatccgaacccggatttgaagtgggagaaaacgggttcgttgaatgtgggtgtggagttttccatgtttcagcgtcgtttaatggtggtggcctcgtattaccggaagaagacagaggatgcttatttgaacaaggagatttcgggagtgaatggtatgacttcttacgtggtgaacgggggagagattgtgaatagcgggtatgattttgcacttacgctgaatccgattcggaaggaaaatctgcgttggtacgtgtctacgtcatttactcacacgaataatgaggtgaattcgttacccggggcagatcagttcgaacgtatgaattttttgaacgggactgccgtggtaaagggtaagtctgtgagttcgttttactcttacaagttcacgggattagacgcaaagggcttgccgatgtttgatgatatggaagaggagcaggaatcacttcacgggaagtcgaaatacgaggtgtttacgcaagtgttggaggagtcgggaagaagggagccgattatattcgggggattgaacacaacggtgaattataagaggtggcgtttgaatgcggcgttctcttatagtttgggggcgaagacgcgtttgtttaagttgtatgcggataatggagctagggtgcgtccggagagtaatttgaataaaatttttctgaaacgttggcaacatcctggggatgaaaaatatacaaatattcctgcatttatgatagatggcggctcgtcttctagcttgagtcactggtcctgttttacctccgggcaagttccagagattgcggatacaaagtgggagatgtataattatagtaatattcgggtggtgagtgcagattatttgaaatgtactaatctgggattgacttattcgtttgatactgaacgttggggtatttcgttactggaggtttccgcttcggtgagcaatccgtttatcgtgacaaatagtaagctgaaggggcagactcccgtgcagagtggttttacggaagtacagctttcggaacgaccaacatttacttttggattgaatgtaactttttaaattataaggtgtgatgaaatatatatatattctttttattgctttttttgttggggcgtgtaatcatgtggagaagtattccatttccggaacttgggaaggggctgatggacaaatcgtttgtttgctggatggttggggcgaggatgcccgggtggttgatagtgctgttgttcgagatggtaagtttcacatgggtaaggaattcacgggggaaaaaaggttgacactttccatgggatcgggaacagaaactattttactggatcgggaaccgattgtagttgagattgtaggatttttaggagataaaaacatgcggaattcttgcacggtgaagggaagtcccgagcaggcggtgatgaaacgggctggagagttgcaatttactcgtacttttgccgtgatgttcggttacgtgatggatcagaaagatgtgtcattggaagcatttatcgattctaatttgaacagggtatctattgcttatttcatggaagatctacttttgtcgaaatatccgtttgaggagattgctaaagattacgagcgtttggcaccggaggtgaaagcttctgcggcggggagatcgttgaaaggtcatatcgattacatgaaaccaacgcaaatgggaggaattgctccggatattgatttgacgacaccggaggagaaacatgtttcgttgtactcgttgcgagggaagtatgtgttgttggatttttgggcatcgtggtgcgggccttgtcggaaggagatcccgaacttgaaggcgatttacgagcgattcagggataagggattcgagatttatagtgtgtcgttggatgataagcgtgatgcttggacgaaggctatctcggagttagaattaccttgggtacacgtgtcttccttgaaaggatgggattgtccggtggcgaagcgttacggtgtgacgagtgtcccgaaaatgtatttgttgaacccgaaaggggagattgttgcggtagatttgcggggagaggagttggagcgaaaagtggcttcattttttaattaacatgataatgcaggcaatatgaaaaatttatacttgatcatttgtatcttggctttgtgtgggtgttcgggtttcttggaggaatactcgcaggataagtcttatattaagggttatgatgatttggacgagattttactagggaatgcttatttcgaaaggttttacgtgtctaacggttggcaattttcgggcatagcgggagaaaattatttgccttgtctacacgtgatgtcggatgagttggcgcagcagacgagagggagttcttgggtggaagaaggggcttgcggtacaatctacgggtatcatacttggcaataccgggtgtacgagaatttggaagggaagactgcatgggatgatgcggcagatttccgtcacctgtattctcacataaatgcttgtaatattattttggaagagattaaggcgtatgaggatgtgactgaagaggaggatgtgcaaaacgtaaatagaattaagggggagagttatttcttgcggggtagttgctatttcttcttggttaatctttacgggagaccctacgccaaggctacagcgggaaatgatccggctgtgccgatcaagttgtcgaatagtgtcgaagataagtattatcagcgcaattccgtgtcggaggtgtacgagcgggttgtggcggatttgttggaggcagaaaaatatttgaagaatgtgtcgaagaagtcggtgtggcgggcagatgtagtggcagcgagattgatgttgagccgcacatacttgtatatgtgtgattacgagaatgcggctaaatatgcaaaattggtgacagaagaaggaccgcgtttgacggatttgaacgggtatagtaattcacagtttttgtatcccggtttatcggagttgatattttctaccggatctacttctttgccgggggcactttctttttatgcgacgtcggaaacttcaatcaatacttatgtttcgaatcaagatatgcgtatctccgatgagttgtatttggcttataagcctgaggaggcaaaagacttgcgtttggaacatttcgttgtttcttctgatggtttgggattgttgtataaaaagatgcatggacgtacgttcgtgactcccgatatgtcggatgtatttgtgttgcggacgtctgaggcttatttgaatctagcggaagcggcagcttgtggagaggatgaagtgacagcccgaaaggcattgaatgacttgcgggagagaagaattaggcgggaagcttttgacgaggcagaggtaaacgccctttcgggagaagagctcgtgcgctttattcgggaagaacgtcagcgagaactttgcttggagggacatcgttggtttgacttgagacgttacaaggtggcggaaaaattcccgcaagcgacgacaattaatcatgttgttgagaatagagtgcgaaatgaaacaacgtggacgtatgagacgatttggaagcgtcggtttacgttgaccccggaggatccggcttgggtgttgcccttgcctaaagtggaattggacaagaatacgggtatgattgataatcctcgtaacgagaggaaaggtgaagatgttgaataattaaaattaaagagatgaagtatataataggattgttgataatagctggtttatgggcttgtagtaaagaggattggccggataatagccaatctgaggcgaatctgtttgccgtgcctgcaggagccactggcgaggaagcggagttgcggagaggcttttttgaccggacgggtatgtatttattgttttcggatacattgactgcacgggaggtgaatggtatggggggtaagaaggaggtatataccaaagttcatttggagtggaatatggtttcaaccgatcaaggtatagattcttttatttgttatccctacaaagcgttggaggagaagaaggtggtgacggagtttgttgaacgggaggtgttggtaagcgtacctgagatgttttatccttattcgctaatgttgttggatcgtttggtttattttaaatggaattatggatcatataacgatccggtagaatattctttttatgctggcatgcagtcgaccgtcattgctgtaagtaatttgtctgcattcacggcagaggagaaagaggtgttgaagaccaatctcgtgggaagtttgattagtagtaatattactgctatcccggatgatgattgggcggatttttacagttatagcgatgagtattataagttatcgttcaaatatgaggtgcctactccaattgaggcatgcgggtatttacctacttatgatatcggatggggcggtccggattttcactcgaaagagtatgatttgaaggcttacgtggaggagatttttaagttgtcggaagcagagtttcgggaaacttatgcggaatacccgattattatagataagatggaggagatggtgaaggttttacacaaacatggagtgaaggtgtatgaataagatcgggttgattttgttgtttttaattttcttgtgcgctaattccagcgcgcaagaaaaagaattcgtaattcggggacagcttcccggtatgagggatagcattgtggtttcgttgttgacggcggaagagttgcctacgaccacgatttgtgaaactgtagtgaaagacggttgtttcgagttgagggggcgggtgaaggggccgatgttatgcacgttgataacaactaacatcgggagtctcacagagggtgaaaagattagatggacgtacactcccgttttcgtggataatgtggagatgcgtgtgcagacatctcattatgatagtattcctctggatgctccgattacttcagattttaagattatcgggggacgggtgcaggctgattttaacgaatacaatttatggaaattgcaaggaagggggggtaaggattttattcttgcgcatccttcttcggctatttcggtttatttggggaataagatgttgcgaattggatataatttgactcggggagaagtggaggagttggagaaggcgatcgtgggggctcctgatgacccggaacggtttgccacgtttcgtcggaattgtacgttggcgaagttgacagcgaaagggtacccgattgtaaacttggcgttgaatgatatcaacgggaatgcgtgtgagttgtcggaagttattcccacgggaaagtacgtgttggtggatttttgggcaacatggtgtgggccgtgtgttgcggcaattccgggtatcaaggagttggcggaacgcttctcggaggatctcgtggtgattggggtttcgtgtgatacggatttaagcgcttggaaagccgctatcgagaagaagcaagcaacgtgggcacagtacgtgttcacgaaacagggatataaggattttttagagaagtatcaggttggtggtgttccctatttcttgatattggataaggaagggcgggtgatttcgaatcctaaacacgtggaggagatcaaacaagaggtagagtgtttgtgtaaataatgagatattgtaagatgaaaagtttgttattgtatgtagcatttgtcatgtgtttagtgaactggggatgtggcaatcgtgaggtgaaagaggagaagtttgtgattgaggggcaagtggagaattgtaatacatttatgaaagttgcaatagttgatattgagaagggaaaagggcgtgagatagcttcaactatagtgtcgaatggtacatttcgattggaggggaaggtaaaaggacacgtgatgggagagttgcgttttcgcaaggggacggttgattttgttacagtaaagcttatgctggagaatgcaagttatcaagtgaagatggcttccccggaggatgtgcaaaaaacggatgatgtttttcaacgtcgacagatggtgtgcgtgaaaggccccaaggggcaggaggagttgagcgagtacgagaaagaggtattgtatgcggaacgggatcttaataataaattaaaggcttccgctttttcttgggcggggaatttaccggaggattctgtgaagaagtctaatgcggaaattcagatgcttgaggctaaatttcaaggtatttcggagagttttatcaagcggcatccggattatttcgtgtcggcctatttggtagaaaaggaacttaatacttttttccaatacacggcagaggaacaacaatcgagattacggttagtcgagaataatccggatacggttcgtgtgaaccggatgaaacgtgtgttgccggggatgttgaaatatgctcgtttatgtgattatactgattttgaagtgcagaacgtgaagggggacacggtgaggttgtcagaattgatgaccaagaataaatatgttctaatcgatttttgggcttcgtggtgcggaccttgccgaaaggctatcccgcacgtgtgggagctgtatcgggaatacccgaaagagttgcaggtgtttagcgtgtcattggatgaaaaacaggaagagtggaaaaaagctatggcagaggaaaaaatggaatggatgcaattgcgatgtgcgggagagatgttgagagatgtagccatggggtatcgactttcttcgatcccgtatttagttttgctcaatccggagggtaaagttatgtgtgccacgaattcggtggatgatgttataaatcaattaaaaaatgcattaaaagattaagttatgaataagatcgtgttgagtgtgttgatttttctgttctcgatgaacggattcgcccaagatggggtgaaatttatggagggaagttttcaagaggccttgagcgtggcgaagcagcaaaagaaaatggttttcgtggatgtttgtacgtcatggtgcggaccgtgtcgctggatgagtgaggaggtgttgcagactccggaggccgccaagtatttcgataaatattttgtgtgtttcaagattgatgcggaaaagggagaaggggtagcgttcgctaaaaagtatgacgtacatgcttatcctacttttcttatgatactgccggatgggacgttgcggcataagatcgtgggagcagacacattgcatatctttattccccgggtggaacgaggattgaaggagaaaacttcgtgggggcattttatgaaaaagtattcggacaggactttgcagaaaaaagagatcccgatggcagtgggagtgttccgggaagctgggatgaaaaaagaggtgaagagtttgacggattctttgttcgggttgttatccccgaaagaaaaattggcttcccgttattgggtggtttatgaagagttgaaatatagtgatctgtttgctccccggtttaagtttttcgtggaaaataggggtgaaatagcaggtaaaaaatatgaagaggcttctttcaggattattcgtacgatgttgtccgatcatttgattaataacacgaccggacgaatcacgagtaaggaaaatccttggaattgcggggaagcaaacgagataccttatatgcgttcgttgattaaagagtcggatttacctgataaagaatttttccttgtttggtgcgatttggctgaggcttgttatttcgggcaggcagatcaagtaaaggaatatattcgtaaaattaccgcttgcccggaggcaatagaatatggacggtcattagcgtggacatttaagcattattttccggaggatgaggatgcgtatgtggagttgagatcgttgtggaagttgaaaaaataagtattattgtggatttttggactcaaataaaagatatggttatgggaaagcaagtttgtttttatgtgtttatatttattattactttgataggaggatgtgatcaaagtgttgaaaagggaattttagatagatatgaaacttttgaaatgtatgctgattcggtgtttttagggtttgagggagatttattttatcctgaaattatttggggaaatgttgacgtttatctttctgcttttgaccgaatgaaagctcatttaaaagttaaagatgatcgtttaacatgggattttagaagaggtgcagatttgaatatatcggagaatatttatgaatacgtgatcggtgtatggcaaagacaaaatgagaagttggattccggggagtatagattagagctcgttggcgataattatacgatagaaccaattgtgcaaaaagatattctttcatcacgtacggggcagtttattattcccggtagtcatgcctataatatggaattattacataatttgtatcaattacataattctgtttctttaggaggaagatacttgggtgcatatatcgaaaatatatgtgacccttctacttttaggcctggctatggttattcttcaaaaaattggagttatcattgtgataatg

SEQ ID NO: 10698 - DNA, 38197 bp, Unknown
  gut microbiota DNA sequence
aaaataaagtttatataaatgaagttaggggtgtaatggatggacgagttagataaaatattgcaactcttgaaaaaaggagatcgacgagggttagaactattgttccaccatttttataagccattggtattttatgccatgaattttcttgcgcaacaggaggaggctgaggatgccgtacaagaagtttttattaagttttgggagggaaagcgttttcacgctataaaaaatagtctgcgtccttatttgtatcaatccgtgcgtaattattgtttgaatttgttggaagggaaaaaagtggttcttacagagcccatcaactcgagcatggatatggctgagaatgaatatttggatgagtcggaatggaatacccgtattgatcaattatataaagcggtagatcgtttacccgatcggacgcgggaagtttttaaaagaatcgtgctggacgggaaacggcataaagaagtcgcagaagaatttgaaatttctgtaaccacggtaaaaactcttttggcgagagcattagcggctttacgagccgagttaagcgaaaaaacatattcgattttgttactcttcgtgtaatttttttgattttttcttcgaattcttgtcatctattttttcttttctcctgtcataagtatagaaccaatggagaataaatcatcatgttaccagaaaatatagtacaattggctttgaaatctcgtaaaaagggattgactgcaaaagaacgggaggttttggatcagtggcttttggagaacgtggaattgcaggaagaatttcaccagttggtagagtgtggttccgtggtacaggctgctcgtttgtttgaggatattcagattagagatgcttggcaaaatgtggaacaaaaactttcttcccgaccgggttggaaaaaacgtcatttgactatttattggagtgttgctgcaacggtagtgattatgctgactgcgggatggttcttgtttagacaatcacctgtaagaaccgagtcggagaaggtagtgcagataaccccggggagtttgaaagccgtctgggttttagaaggtggagagaaatatgaattaagcgaaaatctgggacgtgatatcacgaacagcgggggagctacgataggtaaggactctttgaatacgttggtaattcaaggggggaatagcgggcaaaggagtaccgtgagggttccggaagggggggaataccgggtggtcttgagtgatggaacgaaagtgtggattaactcggggagtgaattgacattcccgatgaactttgaaaaaggtgaacgggtggttgaattgaaaggagaggcttatttcgatgttactaaaagtaaagaatggccttttatcgtgcgtacttgtcgctccagcgtgaaagtattgggaacctctttcaatgtttgcagttatgaagaagatgctcttgagcaggtgaccttggaacaaggtggcgtggaagtgaaacatcatgatgagacgtatcttttgcatccgggagagcagtttgaattagatacgacaaacgaagaggttgaagtgaagcctgtaaacgtgaaactatatacatcatggattgacggaatgttccgtttccataatatgccgctggatttattgacggtgaaattagaacgttggtataatgtgcattttgttttctcgaatgaagtttgtaaaaattatcgtttcaccggggcaatccgtaaagacgtggactttaacgaatttatccgtctgatagaacggacgacaaatgtgaaatttattataaatcagaaggatataataatagaagaaaaataaaaagcaggaagtacggtcatactccccgctttgtttaaataagattcatgctttttttcaagagcatgagagtactaatttcaaatacaaaagtatgaaaaaaaagagaaacacttggtatcgttacgggaaaataccatgtaaaagaagtttatgtatcatgagattaacattattactaatgcttgggtttgtgtttcagctctcggcaacgggtgtggcacaaagcgtgaagattgaaaagcagcttcaatccttagaaactgtatttgaacaggtagaatcacagacaggtttgttgatcatgttcagtaataacgaattggacgtgaatcgtaaagtgtctcttgatgttcgtaaatatacgttggaagaattacttcgcaaagtgttagagggtacgaacatggattttgacttggaacagaattacgtggtcatccgtccggctcgttcagttgctgtacgggatagtgtggtaaagacgaataaaataaaaggagttgtcgtggatgcccacggggaacctctcccgggagtgaccgttgtggccaaacgtggggagattctcgtgacaggagcggcttccgacgggagtggtaagtttgagatcgtggttccggctgatattcgggaactttctttcactttcgtggggtataaaactgcggttgttccggtagaattgaataaggaaatgactatacgtatggaggaagaggtgagcgaggtagatgaggtggtggtgacgggttatttcacgaaatctaaatctagttacactggagccgtgaaaagtgttaccgccgagcaattgaaaactgtctccgggacaaacgttgttgccgctttggcagccttgacgcccggtttgaatctagttgaaagaagtgaactggggtcaaacccgaatcatgttcccgaattattgttacggggaatgagttcattttcggatggttccactcaagtgaatcaaccgacgatcgtgctggatggagttgaaatcagtatgcaggatttgtacgatttagatattaatgagattgaaaatattaccgtattaaaagatgcatcagcaacggccctttacggatcacgtgctgccagtggggtaatcgtggtggagagaaagaaattggcagaggggagtatgcgggtatcttataattttacgggaaacgtgcaattcccttacttgaaagattataatatgttgaatgccgcccagaaactggaatacgagcgtttggcgggattgtattcaaccgaggtgaaaagagatccttggggaaatattacgaatgaaggggaacaatatgctttggacaaattgtataatgaacgttatcaggaagtgcaacgaggtgttgatacagattggttgtcgcagccggcacgcacggctttttctcacgatcactccctacgtttgtatggcggagcttccaatgtccgttacgagttatccggacgtttcaataacgtgcagggggtgatgaaagaagactaccgtcgtcgttataatttgggttttaaattggaataccatgtacagaataagttgaccatggccaaccggacgacctacagtgaggtgaattacaagcaatctccttacggttctttctccaagtacgtagaaatgaatccttacgatcggatctataacgagtttggggagtataacagaaatctatcttgggatatggataacccgttgtacgaggcaagtttagggaattatgatatttctaaagataaatcgttctcgaataccacggatttccgttgggaaatcaacaagttgttccgcttgtcgggaaactttaatattaccgtgtccaattccaacaacgaagtgttcaaatctcccgattctcaggattttaaaacggagaccgaactttctaaaaaaggttcattgacccagaaaaatggaagtggcgtgtcttatgccggaacgctgacaggtgcatttaatttgatgaccgataataatagtttatacagtgtgaatgcgggtgtggaaatccggaaggaaactagcgagtcttccaccatgacaggagtgggcttttatgatgatgcgttgaatttcatggggcaggctgctggttattcggataaaacggatcaaaaaccgaccggaactcaagctatcagcacggaattgggatttttcgtgaatgccaactatatgtataataaccgttattatgcagacgtggtttatcgggtgaccggatcgtccaaatttggagccaataaccgttatggtaatttctggtcagccggattgggatggaacatacacaatgaaagttttgttacttccagcaaaattgatattctgaaaatccggggaagtttgggatacactggtaaggtaaatttctctcctttccaggcgatgaccatgtatcaattctccggggatctggaatatttaaacgggataggagctgttccgcaaggtatcggtaatgaagatttaggttgggaacgggagttatcgtataacctcgggacggacatcagtcttttcgatcgtcggttgaattttacgtttgacatttacttgaaaaaaactaccgatctggtattggatgcctctcgtgctccctctaccgggactacttctgccaaagaaaatatcggagagatggagaacaagggattggaattccaagtggatggtatgctcgtgcagagaaatgatttctattggcaggttgctgctaccggaagtatgaaccggaaccggatattgaaaataaacagtgccctaaagaaagcgaatgaagatgccaataaggtggattcaaaaactccgttggcacagtatgaggaaggggaatccaccacggcattgaaggtggttaaatcggcagggattgacccggcaacgggacaagaagtatttataaaattgaacggtgagagaactttcgagtattctgcggatgacaaatttgtgatcggggacacggagccgagattccggggaacggtttccaccaatttgttctacaaaggtttcagtctctatctgttgggtcgttacgaatgtggtgcttacctgtacaacgagactcgtgccacgaaagtggaaggtgcaaacccgaaaaagaatgcggataaacgggtgtttgatagtcgttggaagaatccgggagatattgctttttataaagatattgccgattccgatggatgggggacgaatccgaaacattccgatcgtttcgtggaaaaagaaaatgtattcacgttgggaacggtgaatttcggttatgaattcgggcagaatatctgttccaagatcggggttcggaatttacgtgtcggagtgaatttgactgatattgtgcgttggtcaaacgtgaaaatagaacgaggaaccacttatctatatagtaacgggtttgaatttacgcttagtacaacattttaaaaggaaagattatgaagataagatttagaaatataatgatacttttagtcttgttcgtcgggggaagttcttgtgacagctttttggacgtgcaacctaaaggagaagtactggaaggcgatttattgaaggatgcgaagggatttgagaatgccctctacggggtttatgctaaaatggggacagcgggactttacgggcagaatttgagttattatgctttggacttgatggctcaatactatacttctgcaaataatgaagaggcagagccgctcatacagtatgattataaaagtacgaaagtggaagatcgtttctataatatctggtgcgaaatgtattccaatatcgcatacgcgaataacgtgctggaacatttggaacatttttctccttcggatatgcaattttataatatttataaaggagaggctttaggggtacggggattcatgcattttgatctcttacgtattttcagcgagcaggttacggaaaacgagggtgccgacgggattccttattcaactcgcttctctttgttcgccccggacgtgttgaaggctaaagacgtgtataaacggattatttcggatttgaaatcggcagaacaactgttggatgacgaggagttatatgcatcggcctcttcgaatgccaatttcctgaaagatcaaaatatccactttaatttgcaggccgtgcaggcaacgttggcaagggtttacctgacggaaggagtattggatagtgctttatattatgcgcaacgagtgatgcagtctcccgggctttctttattagattacacggagatcgccggggatatggctggaaaattgtcgtccaaggagactgtgttcgggatttattccaagagctttgctgatccggtgatcaagattttacacaattcccaaacggcatattctcttgaaatgcgttacaatattcaacagttgtaccaagttgacgggactgggaatgattatcgttggagcgcatggtacacgtataatgacgtggctaaagactggaagttggataaattgacggattcttatgtgttgaacaataacgaatattctcgtccggcgggacaaattcgcggtattaatatgattcgtttgtctgaaatgtattatatcgcggcagagtgtgctttgaaattgggacattatgatcaagctctcgattattttaatgaattgctggaaagtcgggggttggtagctctggacgagagaaccccggctgaaactttgacgattgacaagatcacggatgaccggtataaagagtttgtcggggaaggccagtctttctaccatatgaaacggttgaatctggatatcttgaacgtggagggtaaaatcatacctgcagacaagaaagtttacgtggtggatattccgtcacaagagtttgaatttagaagatgaaatcgtaaataagaagcatatgagaaaaataacatatataattattagttgcttgttcgtgtcgttcggcacaggactgacttcttgcaacgaacaagattataaattgttcgactcttcccgtaccggaatttatttcacggaggatagtgtggtgtattctttcggggtgacaaaattggaagtcacttcccatgagatggaacttcccgtgaaaataatgggggctccggtgaaagaggaacgttctttcaaggtggaggttgtgacagacaaaacgaccgcaaaagcgggagagcattatattatgccgacggagttaattattaaggcggattctgtaaatggagtacttccggtgactgttttgcgtgaagatttaggaagtgatacatattggcaggttgctttccgtttggtatcaacagatgattttgagccggaaaatgagatactaaccgtggcaatagcttctttcaataacatcgtggaaccgcctcaatggaaagattggcaaggtaatttaacatggcctaattataaattaggagtgtgggatccggtgaaatgggtgaagttcatggagtacttccgggcgatggagcaaagtgccccggccacgtataaaggcatggttgaaatgtacggtccggatttggaaaaggttcaatacgggtggatggacgagtataattatgcggcaaccaagtatatcttgattcccatgtatgatttctttgaagcaaatccggaattattggaaagcgggcgaaatgatatcccgaaaccgtattgatagaatgaatgatatatgtaataaaaacagatgattatgaagttgaaatatttatatatatggttaataggcttattggcaatcggttgttttgatgatgacacgacggttgacacggttcggatatccgaagtggccattgataccaatagtttgcagaaagaatataaccgggataagaatcagacgctggtgattgatattacttcttatgtaactcaaaaggaaaaagatcttcctttgacattccaatgggatatggattacaagttttattcggattcatcggttttgtacgtggattgtcaggagttaggtacttttccgatgcgggtaaaggtaagtaacgaacatagtagtgccttctacgagttcaagttgcatattaattcgccttacgaagagggaattgccgtgttgagtgaaagtaatgacgggacggggatgctttcatttatgcgtcagatggctgatggtactttggggagttttgaaactcgttgtttgtcaacgaataatcccggagttgtgttcccgaaatcacccacggatatgtcaaaaaggttatctcaattatttatcagttataaagatgatccttctatttatatggtaaatgccaaaacgcttgaattggagaatgtcgtgacggctaccgagttttcggattttgtccccgtggcaatgatgatgccggacaacacggctcgtacggcaatcgctctgtccgagaatgggaaagtgtataatttggccagtatggagggattgatactctctcatacggcgttgagatcaacctattctttggtacaccacggttatttcggtgcttataatcctgcatattatctgtgggatacggatctacacacgatttgttattataacgggtacacggttaatgattgttcccaattcggggcaatttgggatgaagatcatgaagtggttgcgatatttgagaatgagaaaggatcgtcatttaccgtattgacacgaaagaatggtgagatttggaaaacctctttaggtaattatatctacttgcaagatcctgatacttatcaatatgtaggtattgattatcgggatgtacaaagagtgattaccaatccggttcttgaaaaagagaatccgaaagtagccagtccttcttaccaatgcttgttctacgcgcaaggtaataagatttatcgttggtactattcttccacttcgttcccgaccgaatcgtgggcgacgattgatgacattcctaacgccgagatcacgacaatggcgattagcccggatgaatcccaagtgtacgtgggagcttatcgctcggatgaatctggtgaaaacgggtatgtctatatctacgacacgaggaccgttcgtttgatcaattcttacaaaaacgtggcctacaagccgataaaaataatgtataaagtaaaatgaagcatataatcagtattcttcttctgcttgcaaccatcggttgcaggcagaaaggccccgcagaggttaccggaatggtaagtccgggagaatattcggaatatcaattatttttgattgatggagacaagagagattctttatcggttgaaaatcaaacaggacttttttcgctccaactggatggtgacacatctcggatcgtaactttgatgggagtcgtgggaaccgggcaaaataagtggccgtttgaacaggcattatatattgaaccgggaacaaaagttgagcttgatattcaattcaaaaatcggagggtagaaatggccgtggataagaaagatcgtaataatgcggcattgataacctataatcgtttttatctggataaaagtcgatcgatatgggagaacccgcccgtggcgagtgaactaaaaaatagtatgggtgaaatctatactcgggtgaataacgtgatagaagaatttcgacctgccaatatgacggaaagctacctacgtatacaggcttatttgtcttttatacaggctttggatggcgtgacttatatgtattcccgaaatggagaggtgttacccgatggtatgaatgaactggttcccccggtctacgaggttttggatgatcccatggcttcacgtttttataacacgaattctttcgtgttcaattatctgaagaaagaacgtgagacaccggaggaacagattcaactattgaaagagcgttttacggtaccatctatcgtgttatctgtgagtcgtttggtgttgcaaagtttcgtggcaaattataactacaaaaacggttttaaagaaggtttgctgcgtttaaaaaatatggcggctgaactaggggaagaaggggagaagctggtaaagaatttcgaatccaaaaagtattccatggaaggagcggctttgcccgacgtgatgctggaggacgtggatggtaaaatgcacaaactaacggatttcctgggaaaatatctttacattgacttgtgggcttcatggtgtggtccgtgttgtcaagaagttccctatttgcaaaaattagaaaagcaattaaataatcccatggtggaatttatcagtatctcgctcgatacgaataaaaaagcatggaaggaaaagatgaaacaattaaacatgcatggccaccaatatatcgtgaccggagatcaatttgccacgatgatgaatatcaaaggaataccccattttctgctttatagtaaagagggtacattgatgcagtataaggcggagcgtccctcttcaggtgatagaatacgaaatgtattggtccggttaaaataaaaaaaaggttccgtaaggaaccttttttcacacaaatgtgtctgagtaattgaatattaaacgagagttctttttattgctttcttaaaaactgaatccactttggaaaatgttcgactggttgtaaggaaccaagttcccggagaaagtcaactctcttccgttcgtgtttgaacttacggttactgtagaataattactcccgtagccgaggcgaacagtaacttgagcgaataaagcggcacccatcacgttgaacgtgtaagtgatatttccgtttttgtcaactctttcgttaatactggaaggccagccggtgagcgtgatcccgcctaagccgttcggtccggggttaaacccgttgaatgccagctgcaaggaaacttgattgttgtccatggccacgaagttcaagttgttcgttacgggaatggcagccccgaaattattgaacagcgtgttggcttgtaacacccaactgttacttttaagtgcttttactgcgtcttggtaggcgatcatattttgttgttcgcgaaccattctgttgtgcatcctcatgcattccctgtgagcttttctttttgcccgtagttctttttttgtttgtgcttgcatcgcgaagtcactgaacaggaatgtagtcattgccaataaaaaaataatttttttcatagcgtctcttttttattttattctgattagtttagtttacgaattgacatatcccctcaccatcttctgctagtccttgaaagaatgactaatagaatattcaaattctatggcgtatacgtcatgaaatcggacagggttatccttatctctttaaaaaagattaattttataaagttggtctttatataacttgctaattctaacataagtttattctgctttacagtaaactttttaggggtaatacagggtgtttacccgttgcatattcgatgtacttagggattaaagacgtatcaacttcgatacaaagacgttttaaaggcgttcacgagcgtgtttgtaccgaagttgataggtttttgatctgtgattatttggtgactaccctaagtattcatcctctcttcatttgataacggggggaatatatgggggcttgcctttttagggattatataattaccataacaaaaaagaggggcttttgatatttcccctcttctgttttcccataagcatatttttatttgtgctttttgttttttagaggtgtttcgtgtgtcatttcttcaactaaataagacggaacatcttttttgttcttgcttttcttcggttttttgtttccggctgcacccatgataaaatctcctataatttaagtgttaaatatttaagtgatcaaatgagtagagatcggttattaaaaaatagctggtcctatccatttggtgacttaacaaagggcgtgccagacggcttggcagtgacacgaagagacgagttgacggttgttgatgtcggattggcagaattggaaaacaggtgggtgggtaaaattcagtctttttttagctgatcttttcctttatctttgcctgcataaaatagattgatatgaagcataactggaagccgggaaatatgatttatcctttgcccgccgtgttggtaagttgcgggagtgagctgagtgaatataacgtgctgacagtggcatgggtaggaacgttgtgtacgaatcctccaatgtgttatatttccgtgagaccggagcgatattcgtacccgattattcagaagaatatggagttcgtgattaacctaaccacgaaggatatggcgtatgccacggattggtgtggggtacgttccgggaaggattacaataagtttgaagatatgaagctgacaccgggaaaggcaaaggtagtgaaagccccgattattgaagagtctccggtgtcgattgagtgtcgggtgaaggaaattattcctttgggatcgcatcatatgtttattgcagaggtggtgaacgtgcaggctgatgattgttacttggataaggatagcgggaagtttgagttggcgaatgctgatcctttggtgtatctgcatggaggatattttgaattgggagaaaaaattggtaaattcgggtggtctgtggagaagaaaaggaaaaaaaagtaatgtttaacaaaattgttgtagaaaacgtagaagttggtaatggaaataaagagtcaacatatagaaatagaaaaacatccattagaaccgttcttgccggaaaatgccaagttattgatgttgggaagtttcccgccaccaaaagcaaggtggtctatggagttttactacccgaatttgcaaaatgatatgtggaggatatatggggtgttgtttttcggggataaagattattttttagaaaaggggaagaaagcgtttagtcgagagcggttagtcgcttttttggaagaaaccggggttgccttgtttgacacggccatggaggtgattcgtcaacggggaaatgcatccgatcagtttttggagattgttactcccgtggatttggatgccgtgctgaaacgaattcccaaatgtaaggcgatcgtaaccacgggacagaaagcaacagatactttgctggccttggttggggctgagaatcctaaagtgggaggttttagtgattttgaatataaagggagggctttacggttgtaccggatgccttcgtcttcacgggcttacccgaagcctttagaggataaagcggcagaatatcgggtgatgtttcatgatttaggaatgttgtaagaagatgaagactgtattgttggtagtggatatgcaaaacgatttttgtttgccttcaggttcgctctacgtgccgggagctgagaaagacgtggagaggttaagtcggttgatcaaggagaaaatgactgttattgataagattattctcacggcagatgaacatcacgtgatggatattgctcatccgtcttattggaagaacaaacggggagagcatccggctccttttacaactatttcatggtgggaggtgttatcgggagagtggattcctttcggagataaagatgaggtgattgattatttacgtcgattgattgaaaacgaggaatataagcacatgatttggccggagcattgtctgtacgggagtgagggggcagctataactcctgtgttgatggaggccgtgacgtgttgggccagagaaggaaaatattacgaggtggtggaaaagggcttgaatccttcgactgagtttttcggtgcttttcgggcaaatatccctttggagggtgatgctgacacgaagtttaacatgaaactgaaggacgagctagagtcgtatgacgtgatctggttggccggcgaggcaaaaagtcactgtgtggcaaacacgttgaggcagttgtttgattatcctgaggtagttcggcgactggtaatactggaagattgcatgagtaatatttcgggatgcgaggatttagctattccaatttacgagaaggctgcccgtatgggggctcgttttgagacgtcagaatctttgttgtttgcataaaagggaatagaatgatcatccatgattttttagataacgatttgtacaagttcacggtgatgaatgccatacaaaagaagtttccggattcggaagtggtttatcgtttcgtgaacaggggaaatgcgagttttccacccggttttgccgatgctttgagagaagaggtggaggctatggcgggagtggtgctttccaaggaaaacgagaaattcatgcgagcgaaatgttattattttgattcggtgtttttcgatctcttgaaaggttttcgttttaatcctgccgaggtaaaggtgagccaggagggaggaaagctggacgtggagattcggggattgtggtaccggaccgtgttgtgggaagttcccttaatggcgatgatttctgaattgtattttcggatgactggacaagtcgcccgagatttggaacggaatgcaacggagaaagcaaaagcctttgcggatataaaagcggaaatttctgaattcggtacccggagaagatactcctttgacgtgcaggatcgggtgatcggcattttgaaggaaaatatgaaaggcttgctgaacgggacgagtaacgtgtattttgccatgaaatatgatctgaccccgatgggtactcacccgcacgaatggttcatgtatcacggggcgcatttcggttaccggtcagcgaatgccttggcgttggaaaattgggtggatgtttacgatggttatttgggaatagctttgaccgacacgtatacttccgataatttctttaatagttttgacacgaagtatgccaagttgtttgacggtttgcgttgggatagcggcgatccttttgaattcacggagaaagcattggaacattaccggaaacatcgggtggacccgaaaagtaagacgatcgtgtacagcgatgcgttggatctagatggggtgaagagaatcaaggcttttgtgagcgggcgtttgcatgacgtgtacgggatcgggacgtacctcacgaatgacgtaggggttacgccattaaatatggtgattaagttatttgaatgtcgtccgaaagggagtgaggtatttttacctgccgtgaagttgtcggatgtagagggaaaacatacgggttacccggacgaggttgatttatgtttgagcatattaagattaaaatgatgaaaggatatttatttttagagtacccggcgtgtagtacttgccggaaggcgaaaaagtggttggatgaacaaaaagtgaattacacggatcggcatatcgtggaagaacgcccgacatgtgaggagttgaaaatatggttcgagagaagtggtttgccgttgcggaagttctttaacacgagcggtttattgtataaatccatgcagttgaaagagaagctggacgggatgagtgaggagaagcagttggagttactagcgtctgacgggaagttggtgaaacgtcctttggtaatcggggaggatttcgtgttggtgggattcaagccggaagagtggaaaacggtattgttgaagtaaaaggttatttttatgttagtcacgtacgaggatatacgaaatgacgagagtataaagtgttatatcacggaggcggatagggctttgtctgctttaggatacacggaacattcatttccccacgtggtgaaagcggcgacgatggcggagatgattttattaactttaaattatccgaagcgaacggctgagttagccaagattgccgggtatatgcacgatattggtaatatcgtgaaccggattgaccatgcacagagcggtgcggtaatggctttccgattgctggaccggatggggatggacccggtggagatagccatggtcatcagtgctatcggtaatcatgacgagagtacggctgctgccgtaaatccgattgccgctgccttgattttggctgacaaaactgacgtgcggagaagtcgggtgcgtaatcaagatttcgcaagttttgatattcatgatcgggtgaattatgccgtggaggaatccaagatttattttaatgaggatcattcggctattattttggatttgaagattgatacgtccatttcggcggtgatggattatttcgaaatctttttaggacggatgatgttgagccggaaggctgccgagtttttgaatattagttttgaactggtgattaatggtcaaaggttgttgtaaataaaccttgtgatatttttcaaaactttttgcgagcgaagtaacggaataagcaattgtggtcgtgtggaatattattataaaatgtttatatttgcgaaagaacaatgcttttcattatggctatcgtatcgcataaagagtttaaagctttcttcgagactttttttattcccgtttacacgttgatacaacgctacacgggagagcgtgaattgtcgagagatttcacgcaggaggcatttgtgagagtattcgagcattggggagagttcgagacggaagagaatgccaaagctttcttgtacaccgtagcccgtcgtatctatctggatcattgtaagcatcaaaagatagaaaatcagtaccagaatcgggtaaacgaggaagagctcgaagaatatgattttctgaaggaggttactcaacaggaggtgtcccgaatattgtacgatgctgttgataagctaccttcacagactcgttcgatcattttactgaacttgaaagggtttaacaatacggaagtggcagaacggttaggtgtttccgttaatacaattaaatcattgaaaaagagtgcttatgtgacgttaagaaccttgttgtcaaaggatcttttgatgattttgttcgttttagtcgataaataatttatttttacgctcacccacttttttttctcaatcgtcttcttaataaacgctaaatttaaatcgtatgaatttgctaagaagacgttttaaaattgctcatttgattgcggaagagtttgccggggtgattacgaaagagaatcaagctcggttggagcaatggcgtgtagaaagccctgctcatgcaaaagaatatgatgagattcggacatatatcatgacgggaaacgagcatagggagaaaggaaaacaaacagtaaagaatgagtggcgaaaatttgagcgtgtctatttcaggaagtatgttatttggaaaagaataggccggtgtgcggctattatggtgatacctttattggtgtgcgggtatttcgtgtcttccgagtggaaatcttcggaagtcacgataattgacaacgtggaaattgttccggggacaggaagggcccagttgattatggctgacggaagattcttgaaattggaacaaaaagaaaatatgaaattggatttacccggggtaaaaatagttgcgacggaaaagaaaattgtttatcgggcaatagaagaagaaacgagtaccccgaaggaggaggagtataacacgttggttgtacctcgcgggggagagtatatggtggaattgtcagatgggacgaaggtgtggttgaattccgattccgagttgcgctttcctattacgtttgtcggggataggcgaagtgtggagattgaaggggaggcttattttgaagtggcaaaggatgaagggaaaccttttcacgtgttagcgaagggggtggatataaaagtgttgggaacgagttttaacgtgatgacttatcggggacgtacgattacgactcttgtcgagggtaaagtctgcttgacttataaagatgaatcggtacttatggtaccggaccgacaggcagaggtgattgcggagaccggaaagattttaatgagggaggtggatgcaaggaatttcacgttatggaaagatggggtgttttatttcgaaaatgcggctttagagacgattgccgagcgtttgtcgcaatggtatgatgttaatatagtttttaatgatgaggcattgaaaaagttaagatattcggttgaaatgaaacgctataataatattcaggatttactaactaaaattgaaaagacacaaaaagtaaagtttctaattcaaggaaaaagtatttatattcataaatggttggaaacctacgatttgctagagtgaacctcgaaaagaaaatccctataataggggatttatagaatagatttcgaaggttacttttgtcaaaatttattagcataatcgaattcgaaaaattgtaatgtaactttaaaatgatgcaagcaggtaatgtagccccattacctgcctactaagctcatcatctaataaaatgtgaaacctaaaagcaaaagtatgaaaaaaaatgacaaccccaacagtttaaggagattaaagctgtggagaaaattgttaattgtgaaattgctatgcctgtgcttgttcttgcaaaacactgctttgttggcaagtgtttactcgcaagagttaaagttgacgttgaaaggaaatgatattagtttaaccaatatcttttcccagattcgggaaaatagtgattacacgtttgtatataatctggatgacattcaaaatgtacgggtgaagtctctggatgtgaaagatgcttctattcgagaggtattggataaatgtctgaaagggacgggattttcttacgagatcgaggatcacgtggtgattatacgtccagatcgtccggccaagcaagaagtaaagaaggtgacgttaaacgggttggtgatggatcaggattccgtgccgatagcgggagtaaccgttatgttgaaaggaacttacgtgggggtgaccacggatatttcgggaatgtttcagatgacgattccggaacaaaaagaggtatttttgttgttttcgttcgtgggtatggagacgcgggaggtgaaggtgacggatttcaagagagtggtccgggtggtgatgaaagaaaaagtcggcgagttggaggaagtggttattacgggatatggtcaaaaaacaactcgtacttcaacaggctctactgctagcttgggacaagatgtttttgccaataaggctacaccgacagtggatatgttgttgcagggacaggttgccggagttagtgtgatggcggtttccggtagaccgggagaggcggctaaagtcagaatacggggaacgaatacgattagtggggatgcggagcctttatgggtggtggatggtgtacctttacagcagaatgtcccgaatatttcgacagggcagattaaatctggtaatctgaatgaaatttttgttacgggaatagcgggaattaatccgaatgatatagaaaatgtaactattttgaaggatgcttcggcggcggctatttacggctcaagggctgcgggaggtgtgattgttatcacgacaaagaaagggaaagcgggcaaaatgagagtaaattattcagcgactctttctgtcgggttgaaaccacaacgagatccgggattgatgaattctgcggagaaattagtctgggaacaagaattgtgggatgaattttcttctgagtcttttgaatataataaaacggcgtctcggaagattcatagcccggtggtgggaatagtaggtatgcttcggtctgaaaagcttggaaaagatgataaactttggcatgaggataattttgaacctatgagcggggaggaacaggaggcgtatatctcgaatctggccaagcattcaacggattggtttgacgtgttattccgtaattcattctcgatgaatcatcatctttctttctccggtggatctaaacagtacacgtactatgtgtctttaggagttacggatgataagggattggtaaaagagacagattatcaacgttataatttaaatgctaagattgatttgaatccatctgcccgtttgaatcttgggtttgggatagatctgtcaaaacaaaaatctgatagctattccatgatagtagacccgtttaaatatgcctattttgcgaatccttacgagacattgtataattcggatgggagctatcggtctgatcggacctattttaatttggcaggtattaatgacgggaatttgagtgatggggtgcaacctcctagtgggtttaatattatgcgtgagatgaaagagacttcaagttcggcagataatacaagtggaaccgtaagggtcaatctcggttatgatattatcgagaagttgaaaatctcggggttagcttcgtacacgtactataacaataaggtggatgacgtgaagggaagagatacgtatgccgcttttttggatcggctttattttgatgaaaataacggggattggattccctatgggtcaataacccagacttcatcggacggaacgagttataatgtccggggacaattagaatatcgggatgtatttggtgatgcccatcggattgctgtattggggggagccgagttacgaggtgataaaagtaaccgtacttatgcaaaacgtttcgggtatgacgatgtaactggtaattcggctatgccgatgcatccgaatcctcaaccggaagacgtgaaaagatatgccgacttgatagaccagttatcaggagaggttagttccgaaagccgttttgcctcattctatgcatccctggactatagttatttggaacgttatttattaagtgttacgtttcggacagatggttcgaataactttggtagtgacgagcagtttaatccgacatggtcattagggttggcttggcatttggatgaagagaggtttatgtatggtttgcatccagtagtgaatcgattgacattacgggcagcgatggggtacaccgggaatatcgtgaaatcagtcagtaaagatttggtattgaactattctacgacttattgggacggattgagaaccggatcgatcagtaaagcacctaatccgaaagtgcgttgggagaaaacgaaagacatgaagattgctttagatttcggtttgtttgaggatagagtcagtgggttggtggaagcctattaccggaaaagttctgatatcgtgtctacggttgatgtgttatctacgacaggattctccggacaaggatttaatacttccgagataaaaaataaaggaatcgaggggacattgcgagtaaagattttggatggtaaagatttcaagttcaatgtagccggaaatattgcatggaatcgtaatattttgtccaaatacagtaaaaaaagagtgatacaggacgggcgatacgaggggttccctttggagtctgtttttgccggacgttacacgggaatagacccgcgtgatggggtgtatacttacgaattaagaccggatgctcagatttataaaggaacagatttacaagccgtggataattatcgttattatttaggcacttcgatttctccggttaccggtggttttaacgtggatttttcctatcgaaatttacggttgaatgttggaggcgtggtttcttcgggtgcgaaattattgaatatggtgacttccccggcaagttatgagattattacttcgaatcgaacgggagaaacgcctcaaacggtgtatagcgatttgtatcgtaatcatttgaacgtttcgaaagatatggtgaatcgatggactccggaaagaacgaccggggtgaaatacccgaggattatcgattttatgggtgatcgtttattattggatcagtataacgtgcattcgcaggagataacgaaaggtgcttatttggaaaatgtatcttttttgagaattaaaaatatttcgttgtattatgatataccgcaatcaatagtaaaatctttgggattgagttcggtaggtttctcttttacgatgaataattttatcacgtttaccaattattccggaattgaccccgaaacaccggggacgacttacccgattacccgttccatgacgttaggggtgaatgtgggattttaaatgattgaatttgaatattaaaattttaaagatatgagaaagtcaagtttatacatcatgatcttgttccttttctgtaatctgtcttgtacggagtatctggacgtgaagaacaaaggcgaggtgattccggaaacagcagaagaattctctgcattattacacagacatttatacaatatcgatggagctagcgaatacgcttttttcggagctccctcaacagtagcggcctatgaagcttatacggataactgggatgctgatttgacaaccaagttggatttgcctatatacgtgggaatagatattagtagcttatcgtttcgatttaaatcattgtatgaagtcattcgggattgcaatatcgtgatagaggaattgaaagagcgggatactgattttggtaaaaaactattggcaacggcttacacgattcgaggcgtgtgttattacacgttgatgcgtaattattgtgagccgtatgataaaaacaatgctgataaaatgttaggtgttcctatcgtgaaagtgtttgatatggagggaactcccgaacgttcaaatttgaaagaaacagctgatttcgtcgttgagaatttgaaacaggccatcagcttgaatcaaacggatcaacattatcgtttttacgtggatgtttctaaagcttatctggccagaacttatttttgggtgcaagagtgggaattggcagcgagcacggccaaggaggtcttggataaatacccgttaattagcggggaggcttataaagagatgattcaaactgaggtgaagcaactgggaaatgtgttgatccgttccggaatatccaaatcggaaggatacgtgtacacggatatgcagaaaactaaaggacgtccgttgcctttggagtttgtgaatttgtttacggaaagagagagggatattcgttatactttttcttttgatgcggagtttgtaaatactaaaatgttgaaaacgtccttacgttcggcggaaatgtgtttgatcatggctgaaagttatgctcattccggagatacggaaaatgcattgaagtatctgaaccatttgcgggagaatagaatttccggttataccccttacacggaatccgatttaccggtggttgatcccacggcattaattcaagtggatgcagaaggaaaagctttaactccattgatgtcttcaatattgaatgaacgacgtaaggagctgtatttggagggtgatcgttggtacgagttaaagcggaacggacgaccggaaagatggtgcggctacaacggggtgaaatacgtgacagccaaattcctgtatacattcccgatcccgaaggaagatattgcattgaacgcggggttaatacaaaatcctgggtatgagacttattgactgtaaaatttaaatagaatggatatgagaacattaaaatatgtgttaggattggggttattcatgttgttgtttacaggatgtgatgatgttgatgatacgcctcctcgtctggtagatatgaagacggaatttgttttgccggctcccagccgtttaacaaatgctgagcgggatattattcaggccaagagagatgcttatgaagaagcaatcggaaattaaagagtttgaacgaataaaaaagatataattatgcgaaagattttatttgttttctcgttattcttaagtttgagccttatattggcttgctcggatgatgataatagcgatccgaaattaagttttgggcgtcctatctatatattgaaagcggcagaacctttggccgtggagttgatcgtttcggaacccgtgacggaagagataaaagtacctttcatgatagacggttctgctgttttggatgaagattacacgatttcagccaaggagttcgtgcttcatcccggcgattggattgatacggtttgggtgactccaaaggagaacgtgatcggacagagggagattcgcctaagcttgcaggaggtgccgaggtatcgtttgtggaataatcgctgggccattattccggtggaaacaaaggatatctttacctgttctttttcacaaactacaatggatttgaaaagtgaggtcgtggtttctatgaaattaacggtgggaggtgttgactatatgtataagcgggaggagcttcgtgttccttttgaaatagatcctgcatccacggcggtagaaggggaacattacgaaattgtgggaggtggacgggaattgatcatgggaatccagaaggcaacagctgacgtaacgattcgtttcctgaaaaaagaggtcggtaaagacaaggttattattcgtttggttgaaggtggactttttgaaggtggaacgaatacttctgttacgattaatgtgaatggtcccactttgtacgaagactttgttggaacttgggtttctccgacttttatcagtggggattttattaaaggaatggtatggggacaccctactgattgtgataatctaccggttaataatttatccacggataggattgtgtttactgccggggcaacgaatacgctgaacgtggatggagtgcaaggtgatctggctaaatatcttcggaattgtgaggtcgtttatatcggagaagagccggaacagttatgggatcaagatgcttacgggataaaacgggatgtagttacgttggaattaagtaaagcaaatgtgaattattcggtaacaaatgtggcggagagaaaagcgatcgtgctcgtacggttactgaataaaggcaaggtacttgaattccggatcgttgattatgaaccgacagatttcttgacaggaacctattatgacgagactcacccgggttggggggaacctaaagagtatcccatgagagagttgtatcccttggtattccgttttaataaagtagaataacctcttttaatgtcttactataaaattgaaaagtatgaaaaaatggatgctagtattgttcgtggcacttttcgtgctaccttgttcacgggaagcggatgctaccgggcggaaaaagaaaggtaaaaatgccgccacggctaaggtgacggagaagaaaagtgcttatgacaaattatttcagaaagagtcgtgtgagacggtgaaaagcaattttatcaccttgcataaggtggatggaaaattgtatttcgagattcccatgaaatacttgggacgggagatgttattcgcttccacgttgacatcaacctccagcaatgatttttgcgacgtggggtacaagcagaatgacccgctacacgtgaggttcacgaaaattgatagtacaatctacttgaacgaggtgaatgctttcgtgacttccaatccgaaagaaccttctttgcaaaaagcgattgataagaattttgcggatgccgtgttgtattcatacaagattgcagcctacacgccggatagtaccgcggtggtgattgatgtgacaccgatattcacgacggacatgaaggaatttgcctttcttccgacgacgatcatgggattgatccagttgaattctacattcaacaaagacggtgttgctttaggtgaagtcaaagcatttgatgataacttgagcgtgaaatccatgttatcttataaagtgtcgttgaaattcatgtcgttctcgtttcttgataatatgtcattgacggccacggtgacccgttctctattgttgttgccggaagagaaaatgcgtccccggatttccgattcacgggtaggcatttttatcacgagtaaacaacacgtctctacggagaaggatggaattcagaattatacgctggctaaccgttggcgcatggagcctaaagatatggcggcttttcagcggggtgaactcgtggagcccgtgaaaccgatcgtgttttatattgacgatgctttcccggaattatggaaacagccgataaaagaaggtacattgcggtggaatgcagctttcgagaagattgggtttaaaaatgccgtgcaagtacgtgatttcccgaaggatgatcccgaattcgatccggataacctgaaatattcctgtattcgttatttgccctcctcgacggcaaatgcaatgggaccgtcgtgggtggacccgacgaccggggaaattgttaatgcctctgttctggtttacaatgacgtgattcgtttgattaataactggcgtttcgtgcagacggcgcaaatcgatccgtccgtgagggcgaagaagatgccggatgacatcgtgaaagagtctattgcttacgtggttgctcatgaggtggggcattgtctcggtttcatgcacaatatgtcggcttctgccgcttatccggtagattcgttgcgttccgcttctttcaccaacacgtacggaacaacaccctgtattatggattacgcccgttttaattacgtggctcaacccggagacaagggggtgcgcttgaccccgccggatttgggtatatatgattatttcctggtgaaatggaactatcagcctttaccacaggtgaataatgaatgggaagagcaagctattcttgagagttgggtggacgagaaagccggggatcctcgctatcgttatggaagacagcagatttattcccgctatgatccgagtgctattgaagaggacttgggggacgatccggtgaaagccgcggagtacgggataaagaatctgaaatatatcttgtctaacttgggagaatgggtgaatgacgatgcggatttcacgcaccgggaagagctatacaagcagctggccaatcaatattatcgttatatcatgaacgtgatgtataacgtgggtggtatttatttgacggaagtaaaagacggaacgaagggacagcgccatgaaccggttgctaaggaaaaacaacgagcttctttagcgtggatactaaaagagtttaagtcttcggattggctaagtaagacagatttgaaaaagaatttcaccatgggagtggatatgactccggtgttacaaaaaagaatactggaccagttggaacgtttgaccgggaatattattctgtcctctcatctcgcgtccaacccatacacgattcaggaattcctgacagacttgtataatggtgcgtttgagaacacggtaaaaggacgggctttgacggatgccgataaaatgttgcaacagtttatcgtggatgtttccgccagttcgttgaaagacgcgggtgcaggggctttgcggatgttgacggatgcggcttatatgccttccgtggaagagattgcggcgtatggcctggatgaaaccggattgatcaacaagtatcttgatcaattccgtcaggtggagcaagaacgtggccccggttacgtggcacaacagatggcgttaaatgaatttggttatggatatggtttcgtgcggaaagtgaataccggagagattgataattctaaagtgtacttgcaggatatggccttgaaagctcaacgacttttgaattccaagattgccggtgcgacaggagatacgaaaattcattatcaatcgttgttgatgaagttgaataagtctttaaaggatagtaaataaagataaagagcccgatttttccgggctctttttttatgattctaaattctcgtagaaaaacttccaaagcgtgtcattcaagggtgggggagcgacaatcgtgatcttttcctgtttcaccgggtgggtgaacgtgatagaccgggcgtggaggctgattccaccaccttcattggagcggggaaaaccgtatttcaagtcccctttgataggacatccgatctttgccaactggcaacgaatctggtgatggcgtcccgtgcaaagtttcacttctaacaaatagtaacgttgtccgcatcccaataatttatattccaggatggcctctttcgctccacttttgggtttattgtaagcataggatttattcttttctgcatcccgcaccatgtagtgggttaatttggcatgatcttcttcgggaagattacccacgatcgcccagtatattttggtgatttcctgatcatgttcctggaacattttgttcagtcttaccagtgccttactggttttggcgaacaatacaactccacttacggggcgatccacccggtgaggaatcccgaggtaaacatctcccggtttgttatatttctctttgatgtatgccttaacacgctcgctgagaggttcgtcacctgtctggtctgcctgcacaatatcggaaacctttttgttgatagcgataatgtggttatcctcgtataatatttccagattcttcatgtatttttgatttatgatttacgatttatgattcatgatttttaatctaaaatctaaaatcataaaatctaaaattttaatattgttctctctcgttcgggaaattaccgcttttcacatcgttgatgtaattgcccacggctcccgtcatctccgcgtacaaattgtggtaacgacgtaagaaacggggagaaaattcctggttgatacccagcatatcgtggatcacgagaacctgcccgtcaacgccgcccccggcaccgatcccgatgatcgggatagtcaattctttggcaacttgcgtagccagttttgccgggatcttttccagcacgatagcgaaacatccggcctcttccaaaagatgggcatcttcgatcagctttttagcctctgcgtcctcttgggcacgcaccacataagtaccaaatttatggatgctttgcggggttagtccgaggtgtcccataaccgggattccggctgacaggatacgtgttatggattcaacgacttctcgcccgccttccagtttcacggcgtcggcactagtctccttcatgatacggatagctgagcaaagcgcttctttactgtttccttggtagctaccgaaaggtaggtccacgacaaccagcgcacgatctacacctctcaccacggatgccccgtgatagatcatttgatccagcgtgatcggcagggtcgtttcgtttccggccatcacgttagaggcggaatctccaaccagaattacatcaataccagcattgtcaataatttgagccatcgagaaatcgtaggccgttaacatacttatcttttcccccttgagtttcatttctgataacacgtgggtggttactctctttactttcttttgaacagacatagtaataatgatttacgaatcttcggtatgattacttggattcgggttcttgaaatgttccgataagggtttgcgaccctgttactttttggccgagtttcacgtcaattttagttcctaatggtaggtacaaatctacccgggaaccgaatttgatgaatccggcatgttcgttctggcgggctttacccccgaccggagcgtatgaaacaatacgttttgccatggctccggcaatctgtcgcatcacgatttcttgtccgttggttgcctcgatagcaatggttgttctttcgttttccgtggaagacttgggcaggtaggccgccatgtatcttccctggtgatatttgaaaaatttgattattccgttgataggaaaccagttaatatgaacattgaagatgttcatgaaaatggaaacctgaatacattgttttttcaggtattcgggttcgaaagtttcttccacgaccacgattttcccgtcggcaggggcgaggatcgtgttatccttcacgacaatgtgcctgttggggaaccggaaaaagtttaccatcaagaggtacaaaattccgctgacgatcagtaccgcccggaaaacaatgatattagggatgaaggcatacacgagtacattgatgaaagcaaagagcacgaatgctttgaacaataaggtataacctgctttatgtatcttcatattaatttcgttacgttagtaaaacagcgggcaaagttaatacatgaattccatataaacaaaaatagcgggaattgtgaatatgattgcatcgaatctgtctaaaatacccccgtgtcccggtagtatattgccggaatcctttatttcgatactacgtttaaacagggattccagtaaatccccatatattccgaaaacaaccacgatacacgaaataatggctgtatcccggatcgtgtaaccctcgatatagggagatacacacaaaccgatgataatggtcatcagtcccccgccgatggctccttcccacgatttcttgggagatattctggggaaaagtttatgtttcccgagtaatgaaccggaaaggtaagcgaaggtatcgttaacccacacgagtaagaacgggaaaaagatgatttccggcatccatttccctgaggtcatgtagggtaggtatattagcaacgtgaaaggtaaactgatgtatagcaaagcgtagtaggagaaggctatgttttggaacccgtttccccttttccggtagagttcacagatagacatgatgaaggtcaacaggaagaaatagagatagccgtccttgtaattgatgtaattatgtaaaaatcctacggtgaacaggacgctaccgcaaaggatgcagaagaataggttcacgtggatgttcatgtgtttcgccatccggctgaattccatcaggccaagaatgttgatgataaagaacaggatataaaaacaaatggggtgtatgaaaatacaccctgttagtactacgacaaacagcagaccgctgattgctcgttttaaaaaattactcacgatcataatagtctttaataactttcttggcttcttcctgatcatcccggctgaccatcacgctgatgtcgccaaaggtttggtaagaagagtctttttgattcaaaatcacggccgggattcccgcctcgtccagtagatcttttacgatccctgcttcgagttctcttgttgttgtgaaaacagatacccaattttccatagtcctcggttttaagtttatactgttttttcctgtcgggaatccttccgccttgccgctacaattcttccggttgttgtatttcctcttcctctgtccacggacgtttcccgagaatattctccaagtcatcactaaagataacttctcgttcgatcaataattccgccacttgacggtgttgttccctgtgatcgctcaataactgtttggctcgctcgtaagcggcagaaaccatatcttttacctctgcatcaatcaattctgctgtcttctcggaatagggcttggtaaagctgaaatcgctctgaccggtggaatcataataactcaacattcccaccttgtcgctcatcccgtagatggataccatggcgtaagcctgtttcgtggctcgttcgaggtcattttgtgcacccgtggatatttccccgaacacgatttcctcggcagcccgtccacccagcacggaacacatctggtcaagcaactggtctttcgtggtaatttggcgttcctgcggcaagtaccaagcggcacccaaggcttttcctcgcggtacgatagttactttcaaaagcgggtgagcgtgctgcagtaaccacgatacggtggcatgaccggcctcgtgataagcaatcgctttcttttcgctcggtttgataactttactacggttttcaagtccgcctacgatacgatcgatagagtccagaaagtcctgtttttccacggccaatttatttttccgggcagcaatcagtgcggcctcgttcgccacgttggcgatgtctgcgccggagaatcccggggtttgttttgccaaaaaggcgtagtcaatgtcttcggcgagtttcaacggtttcaagtgaactttgaaaatctcttcccggtcttttagttctggaagatccacgtatatttggcggtcgaaacgtccggcacgcaacaaggcgctatccaagatgtctgcccggttcgtggctgccagtatgattactcctgaattggtttcgaaaccgtccatttcggtcaataactggttcaacgtgttttcgcgttcatcattggcacccatgttcgggtttttccctctggctcgaccgatagcgtcgatttcgtcaataaagatgatacagggggctttttctttagcctgtttgaacaagtcgcgtacgcgggaagctcccacaccgacaaacatttcgacgaagtccgatcccgacatggagaagaacggcacgtttgcctctcctgccatggcttttgccatcaaggttttaccggttcccggaggacctaccagcaaggctcccttcggaattttacctcccagtttggtgtatttatccggggatttgaggaaagatacaatctcttccacctcttgtttagcctcggctaacccggcaacatctttgaaggtaatctttatgttggattctttgtcaaataatttcgctttggattttccgacattgaaaatgccgccaccgccaccaccgccggctcctttgctcatgcgacgcatgaagaatatccagattcccacgaatatggcgatgggtaggaatagtgtaatgacttctccccaccagttgaaatcgtctttatagtcaatgaacacgtcggatgcttcttccgggtattctttctgtgcatcctgtaaattcttttcaaattgctccagcgttccgaaaggtacgtagtattggggaccaacacttttctgattaaatccttttgccaccagatcgctgtgagtttccactttctctggtttcagggtgatttcggctttaccgccatttctgacgatgtaaatgtcctttacctcacctttcgctaaaaggtctgttttaaacttctgccacgagatccgttccggattcgaaggcatactgaaaaattgaatcccgataatgaaagcggcaatgatgataaatgaccagtagccgccgaatttcgggcctttattgtttttcccaccgacaggagggaagttgaaactatcttttttgttattttctgccatatttaagtttaattttcttctacattcgttatttccgcgtcagcccaaaaatcttcaagttgataataatctcgttgttctttttgaaatatatgtacaatcacatttccgtaatccaacaccacccactgggcttgttgttctccttctacgtgtaatggtttttctcccactttctcgttgacctcgtcatagacaaagtctgtaagactagccacgtgcgtgttggaagttccatgacatattacgaaaaaactacagaaacagttctcaattcttctcaaatcaatttttacaatattaacccctttatttttgttcagcgtttcaataatttgttccactaatttttctgctccactcattctttaaaaactaatttctaattaaggtacaaatatacattttaatatttaatccaaacgtgttttgtaagtacacttcactgttttttatacaaaaagcgtacctgtaattcccgctatcagctattatgacgaattggcataaaataagttcggtttttgtcccgttttttatgacaagagataaacttccggatggtttatttttcttaattagtttgtgttgtaattatttcagagctttgagggcgatttttcgacaatgccggaaatctttttcctgcaaggggaattttttcgttccgcctctctcgatggtagagacgattttgaatccgctccatttgagaatttcctttagtgctttgacggttcctcttgtttggttgaaaagtatattgaacgggtagggggtagtacaggtgcttacgatgatggctttttttcccttgtgtagcggttggggaatcccctttgggctttcgcccatcatcccgtaaacgatgcggtcgaacaggatttttaattctcccggtaggtttccccagtaacacggggaaccaacgaccagcacgtcacatttgtttattaattgaagagtggcttgagccccgtcttccgggagaacacaagttaagtttttccggcaattcatgcacccgttacagggctttatttgtaaatcgtgaacatggatagctggaacgttcgctccctgtttttctgcttcttcttttatggcctccaacattttcgagatgttcccatttttccggggacttccgtttataatcagaatgttctgcatgagatcgttaatgataaatttgtaatcttccaaaagtaattatttatttttacctagggacgtgttggagaggttaaaaatgaatgtccttttttaaaggcaatgatatatgtatgggatgcgtttggaagttaaaataacgattattttcatgtaggaaaaaagttggaaacgtgatagaatctgaaattattactatatttggaatggcggaaataaatccggtacttgaaggttctgggaggtgtttttatccgctaattaattgattgatatttgcttgtctccttgtgttcggagataagttgaatgggaaagtgaatgattaagagttaagaaaattaaatattagttcaaaagagatggaaaaatatcttataccgttagtaccgggacctgttgctgttccccaggagattttgaaagttgctgccacgaattttgggtctgccgattttgagccggagtatctggcactgtacaaggatacggaaaagttgttgcagaagatgatggaaacccgtaatcgggtggtgattcagacgggagaaggtatgttggtgttgtggacggccttgaaaagtacgttaaaaccgggagatcgggtgctggtgctttctaccgggttgttcggcgagggattcggcgatatggccaaggcgttgggctgcgagattcgggtgctggattttggctatgatgaaacgatccatgattttgatgtcgtggagaaagcgatcgtggagttcaaacccaaaatgatcacgatggtgcagaacgaaacacctagtgggacgacgaacccagtgaaagaaattggtgatctgaaagtgaagtacggggtaccgttgctttgcgtggacatcgtttccggtctaggcggaaccccgattcacgtggacgattggcacgtggatttcgcgttgggcggttcgcaaaaatgtctttccgctccagctaatatgtcatttctttcggtgagtgaagaggcgtggaaaatcgtggaggaggtgaattatgccgggtatgaggcattgttacctttccggaatgtaaccgaaactgggtatttcccgtacacgccctactggcagggaacagcccaattgcataaggcttgcgagctgatattcgaggaagggctggagagttgcatcgctcgtcacgagaaggtggctatttactgccgtgaacggattaaagagatgggattgaagatataccccgtgaaaggagccgtgtgttccccgacagtgaccgcggtttacgtgccggagcatatgacttgggagcgcctcgattcggaattgagagtgcaggggatggtcgtgggaggtaattatggtaaactggccgggaaagtattccggatcggacatatgggttcccaggcaaacatcaacctgatcaaggaggcaatggatatactggaaacagtagttcatgatatttaaaatttaaggtatagattatgggagattttgacggagaaaggaaagacttaccgaatgctacggcagcgcttgttttaggagcgctgtcgttggtgttttgctggtgttacggaattataggcctggtacttggaatcttggccgtggtactggcttcggctccccgcaaggcttatctggagaacccggagcgattcacggaagtatcctataagaatttgaatgccgggagaatatgtggcatcatcgggatttgtatcggtgcgattatcctgctggcagttattcttgtcgtcgtttttgctgtatatacttcggtaaaaccccatttgcttgacacgataaatgtatgaattgagtatttggacgtggctggaaggacatcaattgccttgcttggttaaagataccttcgggatcgagtgtcccggatgtggattccagacggcggtgttattgctcttgaaaagagagttgtgggagtccgtgaaaatctatccggggttgatccccttgatcgtgtttatcggccttgccatggcgcattttgtaggggtgaaaaaaattacacccggggcaataaaatttgcaggttttgtttgcttgctaataattttaatttcatatttgcttaaattaataattcattaaaattacgaccatggagataatggaaatgaagaaaaaggatcttcctaacgcaacggctgtgttggttttagggattttgtctctggtgttttgctggtgttacggattcgtggggttggtgctgggaattctggcagtagccattgcttccgggccccggagggcttatctggaacatccggaagagtacacggaggcttcctataagaatcttagtgccggacgggtttgtggtattgttggaatctgcgtggcgttggctgttgtcgctttcgtgattttaatgatattgggtgtaacggcgctgggcgtcggttctgcattgatgctaggttaaaataaaataacatatggactacagatttgaaatcagtttaccgactagttcggattttagatgtgagattgctgttggtggagaacagacatttcaacaatttcacgataaaatagttgagacgttgaattatgacagctctcaaatggcatcttttttcacgcttgaccggatgggaaaccgggtgaaagaaattgcattgatggatatgacgacggaagatgaggagaatgaaacactcgtcatggacaacacgaaaatcagtgacatcattaaaccggggtgtcttgaattggagtatgtgtatgatttcttctctaacaaatattttaaggtagagtatgctggggaatatatccgtgattcttccgacgtgatgccggtatgcgttgcttgtgagggggatattccggaacaattctcttacgaggatgggaatgctgattgggagtttgacaagccagaggaagagtacgagggggattatgacgatagtttcatggaagagttcggtaacggggattatgacgacgagggtcgccaagaccggggtggtgatgatgagtactatcgtgacgagcgctacgagagtttggatgattatatagatagactttaataattttagattttaggttttaaattttagattgcggccgcacaaggcttattttttcaatttaaaatctaaaatcattaaatctaaaattaatatggggacgttaatcgtattgcttggaccgacaggagtggggaaaacagatttgagtattgagctggccaagatgtacgggacgtcgattatttcatgtgattcccgacagatttacagggaaatgtatataggaactgccgtgccggaacgagagcaactggaggcagttcctcatttttttatacaaacggagtctgtacagaattattttaactgttgggagttcgagcaacaggctatccggaagatccgggagttgttagagacgaaagaggtagtgatcatggcgggtggttccatgatgtacattgacgccgtgtgcaaaggtattgacgagatgcctacaattgacgaagaaatacgtctttctgtgaaggaaatgtttgaacgggatgggatcgaggcgttgcggatgttgttgaaaaggttggatccagtctcatatatcacggtggatttgaagaatgccaaacggatcatgcacgctttggaagtttgcctgatgaccggaaagccttattcttcttttttgaccgggagcgtgaaagaccgggagtttgacatcgtgaagatcgggttgaaccgggaaagagaagaattgttcgaccgtatcaatcgtagggtggatcaaatggtggaggccgggatggagggggaggctcgtagactttatcctttacgccacctgaatgccttgaatacggtcggatacaaggagtggttcgattactttgacggtaagtttgaccgggaagaaaccattcgacttattaagcgaaatacccgccgatatgcaaaaaagcagcttacctggtatcgcaatgacgctgatattcattggttccatccggatcaaaaagatgaaatcaaacgctttcttttaagtgttgtttcttaggttttagattccagtcgcactgtagtttcctaaaattggtttactagatttgacattcaataaattgtaaaaaacattttctattctctttt

SEQ ID NO: 10699 - DNA, 17755 bp, Unknown
  gut microbiota DNA sequence
aagccgggagggagtttttggaaataaaatgacttttgccacacctcttgttttttaagcggagttactaaattttactaggcctttttcgctttgtaagtcacttttgtctccatcgcatccatgattgtggctctcaccaaagaatcaagttctccgtctttcacggtccccgtggcagtcactttcatcggcattccattatacgtgtaagtaaacgaaatattcaacttgtacacggtcttcccatctttcacttccggtttcacggaaaccccgtttgaacgatagctaaacttctgcccgttgggtaacatgaaatccttcactaccacgatcacgctatcccggtgagtccgttgcaattcgagctttaacttcatcttctgttgcatgatttcgataaaagcctccccgttatacgtcccggcaactgctgccgcgtagtctttcttattcgcgttattcaccggtgtggcattcatcgatcccccgaccgcaaaacataaaagaagaagtaatcctacaaatttcataatcctgatggtttaattgataaaagtttatatttttagcggtcgaaaatacaaaaataaatcaatagttcatgaaacggaatattttctttatagggatattattagttgttatttcaacaacctcactattaacatcttgcaacagttgtagtgatcgtcgggtacacgacgtttcctccttacccggcctatacgagggcgaggccacaatcatcctacccgaccacgtgaaggctatgctcaaacccgacgctaacggcaacacgcttattcccgaaggtccgattccctgtaaaatcagcatcacggcggataccagcaagaacgtcacgctgaatctcgtggacttcaccatgcccgtgaaaggcatcacggttaacccggcattgagtaaagtaaccgaaaccgactccactcttaacttggaaggtggcggtaaagtatctgtcggtcaacagaccatttcctacactcacaaggggaaagtggctgaggatcaacttaaccttgacatcacggtaaccgtgatcccgatgatcgtggaacccaagatcgtgttcaaggggaaaaagaaatgagtttacaaacttatttgtaacttcgtgaccgaaatttcgaatacaaaatcaataaaaacaatgagaaaaacaacttttatggctgcaattattcttcttgtggcatcttgcggaaagacggaacaaaacccgctcttatcgaattttgacacaccccatcaaacgcctcctttcggtaaaatcaaggccgagcactacgaaccggcttttgacgtggctatcgaggaagccaagaaagaggtagagcaaattgcctcctcaaaagagaccccaacatttgaaaacacgatcgtggcactagataacatcggtgaaaaaatgaatgccatttccggcatattcttcaacttgaatgcttgtctcaccgacagtctgatgcaggacattgctcaaaacgtgtccccgaaactgacttcattcagccacgctatttatatgaacccgcaacttttcgaacgggtaaaacaagttcacgagcaaaaagcaactttgaacctgaatcaggaacaggccatgttactcgaaaacacgtggaaagccttcatcgacgggggagcaaacctagaaggtgccgaccgcgaacgtttcaaagagatttccatcgaactaggtaaattaagcctgacctttgataaaaacgaactggccgagaccaacgcgttcgagttgcacgtgaccgacgaaaaagacctttccggtctccccgaaggtgccaaggaaatggcagctatgacggccaaacaacggggcaaggaaggatggattttcaccctccactacccgagcatggggcctcttatgaaatacgctgacaaccggacattgagagaaaaaatgtatcgagccaactcgacacgggcatacaaagacaacgagtataacaacgaggaagtggtcaagaagatcaccgccctgcgtctggaaaaagcgaaactcatgggttacccgacctacgcaaattacgctctaaccgatcgcatggccaacaccccggagatcgtgaataatttcatctccgaattgcacgaggcgtcttacccctatgcactcaaagataaaaaagaggtggaggatttcgcccgcaaagcgggattaaagggagaattgcaacgctgggactggtcttattactccaacaaattaatgcaagagagatacgcccttgacgacgagatgctgaaaccctacttcaagctcgaaaacgtgcagaagggtgtctttgacctggcaacccgtctctacggcattaccttcaaggaagtgaacaacatcccgttatatcaccccgaggtaaaaacctacgaggtatatgacaatgacggatcgtttcttgccgttctctacacggactttttcccgcgggaaagcaagggaggcggagcatggatgactcaattccgcggtcagaaaatggttgacggtaaagatcagcgcccgttggtatcactcgtgatgaacttcacgaaaccaaccgacacgaaaccatccttgctgacgttcaacgaggtaactactttcttgcatgaattcggccatgctcttcatggaatgttcagtaaatgtacttacggttccacatccatggacggtgtgtcccgcgacttcgtggaactaccctcgcaattcatggaaaactacgcgctcgaaaaagagtggcttgatacatgggccgtacactaccagaccggagagaaaattccgcaggaatatattgacaaaatcaagaaatcatccaatttccaagccgggtacgcgagcgaccgtcagttaagttttggcatggtagacatggcatggcacacgatcaccgaacctgttaccgaacctctcgcggacttcgagcaacgggctatgggcaaaacggagatcatgcctcttgtaaaaggtagtgccttctctcccgctttcggacacatctttgccgggggatacgctgccggatactatggttacaaatgggcagaagttctggatgccgatgccttctctctattcaaacaaaacggtattttcgacaaagctaccgccgaatcgttccgccgcaacgtgctggaaaagggggcatcagaaaacccaatgactctctacaagcgcttccggggccaagagccgacggttgacgctttactggaaagaagtggattgaaataggcttagattgccgcttgcaagttgcaggttacaggttagcaagttacaagttctcgactcccgcacaaggaagaattggaaaagattgtcgggaaaaagaacttgtaacttgtaaacttctaacctgcaacttgccaaaggcaataaaaaatcatacctttgcgcccaacttatggtaatggtatctacctcgaaccgcttgaaaaagctgatgatgcctacatgtaaaatgttaaaccattaagtaggcgtagtatatgtttaaaacactatttatcatcggtctcggaagtttctgcgggggaatatttcgatttctcctcactcgtttcgtacaaaatcatttccttgccgcattcccttttggcacgatgatcgtgaacatcacaggttgcctgttgatcgggattttctacgggttgttcgagcgaggcaatctacttaacacagacctacgtctgttcttgaccgtgggtttatgcgggggatttaccaccttctcctcttttatgaacgagaacttcgtgttattgagagaacaaaactatctatattttatgtcctacacggtcctcagcattgtactggggttaacggccgtttacgtgggacacctcattgtaaaagcattataaccctatccaagtaatgaaaaccgtagcgagcatgaaatcaacttgccccttccacaatttgtggtattattctacacgaaaacacgccatttgtgaaatgaataaacgaacagtattcacaaataatgttggacctcaataagataacttatttttacaatgtcacgtaaaaatgtagcatgttattttcataacataagaagaattacgacgaaaatgtatacaaaatcaattaatatgaaagaattaggaatagcaattacactcgtgtcattcattctcttgtccggatgtaaagacaagaccgaaccggaacggcaagtagtggctgtagaaaaagtaggagtagataacgtagaaatatacggggaatacgtcgggcagatccgggcgaaaggattcgtcgaggtgagagcccgcgtggaaggttacttggaacagatgcttttcgaggaagggaagcgcgtgaaacggaaccagccccttttcaaaataaacagtgatctttaccaagcacgtgttgacaaggcaaaggcacaactggcaaaagatcaagcccaagaggcaaaagccgagcgtgacgtggaacgcctgcgccccctttacgagcaaaaggctgccagccagcttgaccttgacaacgccgtggcggcctacgaaagtgccaaagcgaacgtcgccatgagtaaagccgacctagcacaagctgaactcgaattaagctacacaaccgtgcgttccccgattgatggatatattagtgaacggtacgctgacatcggtacactggtcggtcccggagggaaatcccaactggccaccatcgtggagagtgacgaggtactcgtggatttcagtcttaccgccctcgactacctgcgtagccagcaacggaatgtaaccctcggggaaaaagacgccaaccggtcatggcaacccagcgtgaccatcacgctggcggataactcggtttatcccctaaccggaatcgtggacttcgccgacccgcaggtaaatccccaaacgggtacattcggcgtgcgtgccgaactccccaatcccgacaggaaactattgccgggacaattcacgaaagtaaagttgttactcgacgtgcgtgaaaacgccatcgtcgttcccagcaaggcggtcgccattgaaaaaggcggcgcctacatatacgttgtccgccgcgacagtacagccgagaaacgtttcatcgaaaccggccccgaagtgaataatcataccgtggtagaacgcgggcttggacccgacgagctggttgtcgttgaaggctaccacaaactaaccccaggcgcgctcgtgaaaccagtgagccccgaaatgattaaagaggaggaggttgcattatgaaacccggtttctttattgacagaccgatattctcggctgtgctatctatcgtcatcgtgctggtaggattcatcgggttgttcctgcttcccgtggaccagtacccgcaaatcacccctcccgtcgtgaaaatatccgcatcctatccaggtgccagtgccgttaccgtttcacaggcggtagccactcccatcgaacaggaattgaacggaacgccgggaatgttatacatggaatcgagtagctccaactcgggtggtctatcgattaccgtgactttcgacatatccacggatgccgaactggccgccgtcgatattcagaaccgcgtgaaactggcagaatcccgtctcccggcagaagtcgtgcagaacgggatcaaggtggagaaacaatcttccagccagttgatgactctcacgctgacctcatccgaccctcgttttgacgagatatacctcagtaacttcgccactatcaacgtgcttgacgtgctgaaacgtgttcccggcgtgggacgtgtttccaacatcggtagccgttactacgccatgcaaatctggattctccccgaccgtatggccaacttcgggttaacgatcaaagacttacagaacgtactgaaagatcagaaccgggaatccgcggccggggtactcggccagcaaccgatgagcgggacggacatcaccatccccatcacggctccgggacgtctttcctccgtaaacgaatttgaagaaattgtcgtccgggcaaatcccgacggttccatcatccgtttgcgcgacgtggcgagagtatcgctggaggccagctcgtacaacacggaaagtggattgaacggtgagaatgctgccgtactcggcatctacatgctccccggtgcgaatgccatggaagtggccaagaacgtggtgaaagccatggaagaaatcagtaaagattttccggaaggagtaagttataacatccctttcgatatcacgacttacatctcggaatccatccacgaggtatataaaaccctgttcgaggcgcttttcctcgtgatcttcgtcgtgttcctctccctccaaagctggcgggcctccctgattcccctcgttgccgttcccgtgtccctgatcggaactttcgggttcatgctggccttcgggttctcgctgaatatgctgaccctgttgggactagtacttgccatcggtattgtcgtcgatgatgccatcgtggtcgtcgagggtgttgaacgtatcatggaagaagagggattgtcgccctacaaggccacccgtaaagccatgaaagagctgacgggagcgctggttgccacctcgctcgtgctgggagccgtgtttgtacccgtgagtttcctgccgggaatcaccggtatgctttaccgtcagtttgccatcacgatcgtggtgtccgtgttgatctcgctggttgtggccctgacgctaagccccgccatgtgtgccatcctgttacgcccgtctaacgggaagaagaacttcgtattccgtaaaatcaacgagtggctcgcccgcgggaataacaaatacgttcatttcctgcaacgggctcttgccaacccccgacgaatcatcgccgggttcggaatggcaatcgtcttcatcatcgtgttaaaccgggtaatccccagtagtttcctgccggaggaagaccaaggatatttcaaagtagaactggcgttgcctgaaggagccacgctggaacgcacccgcaaggtgacggaacgtgctgtcgattacctgaaggaacaccctgccgtggcatacgtgcagagcgtggcgggaagtagtccccgtgtcggaacaaaccaatcccgctcggaattgaccgttatcctcaaaccgtgggaagaacgcaagaaaggcggaatgtctttgaaagaagtgatgaatgatgtccgcaccgaattcaaacaatacccggaggcccttgtattcctctccaccccgcccgttatccccggattgggaacgtcgggaggattcgaactacaagtggaagctcgtaacggggccaccttcgagaatctggtagatgctgtcgacacgctggtgaaatacgctgcaaatgacaaggccctttccggggtatcttcctcgttgcaggccgagattccccagttgtactttgacgtggaccgtgaccgggcccaattcctaggaatacccctagccgatatattctccacgatgaaagcgtacacgggttcggtatatgtcaatgacttcaacatgttcaaccgggtttacaaggtatatatgcaagcggaagccccctaccggatgcaaaaagagaacctcaacatgttcttcgtgaagacatccaaaggaaacatggttcccctgacggccctcggtaaagcggaaaataccacgggacccggatcaatcaagcgattcaacatgttcacgaccgctgtcatcaacggtgaagccgccccgggccatagttccggtgaggccatgagagccatcgagaaactggcacgtgaacacctgcccgacaacatcggtacggaatggagcggtctttccttccaagagaagaaagcggaaggacaaaccgggatggtgatgtcgctcgtcttcatcttcgtgttcctcttccttgccgctttgtacgagagttggttcgtgcctatcgccgtgttattatccctgccgattgccgctctcggagcttatctcggcgtgtgggtattcgggttggaaaacgacgtgtacttccagatcggtttggtaacgctaatcggactggcagccaagaatgccattttgatcgtggaattcgccaaggtagaagtggataaaggcgttgatgccgtacaagcggccatcaccgctgcccgagcccggttccgcccgatcttgatgacctctctggccttcgtactcggtatgttgcccatggtacttgccacgggtcccggatcggccagccgtcattccatcggtaccggaatcttcttcggtatgatcgttgccatctccgtcgggatcgtccttgtacccttcttcttcgtgcaaatttataaggtaaaaatgtggaaaaagaaatagtttacggcccattattaaaacacatcgtcatgaaacactatcacatcatacttgctgccattcttattggaagtttagcgacttcctgcaagatcggtaagaaatatacccgtccggaactggatttaccgacaaccattgccgacacgaacagttcggacacgacgaccgtggctgacatccaatggccgacgatctacacggacaccgtgttacaacgtctaatcaacacggcactcacttacaacaaggatctgctggctgccgcagcccgggtgaaagaaagtcgttacgcccaccgcatggagaaagcgaatctcttccccaaagtcggagcagacgccctcgcggaaagggaatatgaccgttctcccggtaacacgttcaacgtggaggccaccctctcttgggaacttgacctctggggaaaactccgctggagttcacaggccagtttggctgcctatctccaaaccgtggaaggacaaagggccctacacatgacgttagtttcccaagtggcacaagcctatttcgagctacgggctcttgacatggaattaagtattgtcaaacagacccacgaggctcgtgtagagagtgttcgtctggcaaaactacgtttcgaaggcgggttgacttccgaaacagcctatcgtcaggcacaagtggaactagcgaagaccacgacactcgttcccgaccttgaaagacagatccggttgaaagaaaacgaaatatccttgctcacgggccattatcccggggacatcccccgcggagcgaacatagatcgacagacgctgctgaccgatctcccggtaggattaccctcttccctgcttgaacgccgtcccgacatccggcaagcggaatataaactaaaagcggcaaacgctaaagttggtgttgcctataccagccttttcccgcaaatcacgctgacggccagatacggacggaaagatagcgaactcagcgacttcctgaaggcaccttacttttacttgggaggtaaactactcgcccccgtgttcaatgccgggagcaaccgggctcgtcttaaagcagcccgtgccgcactggaggccgagacgtacagctatcaacagaccgttctatccgcgttcaaggaagttgataatgccttgaccacgttctcgaaaatacgggatatgcgggaatcaagagcccggttggaagaggccgcccgctcgtacatggaactagccaacttgcaatatattaacggggtgatcagttacctggacgtgttggatgcccaaagaggttacttcgatgcccagatcggcctgaacaatgccgtgcgggacgaactgctttccgtcgttaatctttacaaggcattaggtgggggatggcaataaaacatccccccaattccccaactgatcttaaatttagtaactgtagattttagaatccttaactccttgttcggtaagttaccggtaagttaccggaaagtcaccggaaagttaccggagataagcggtaaatgtcaaataacttaacactgattttcacttgctttttcgaatctaaacttaaggtaaccagaacattacaataatctatcaagaaccgtaaaaaagtactccaagttgtaaaaacaggtcttttcccggtaaaacgcttgtaacacactatttatcacaaagttacaagtaataaaagatgttaatttaaacgattaaaaacaggatttttcctcttaaacgtacaggattattgtaaagtgaacccgaaaacaacatgtgcatcctgcgcagcagggttcaataccacccggctaaaaacaggcaaggaaaacctctttgaaatccgaatctctttcgcggcggataacgcaatattacacacatccaaacctccggttccatacatattccggctctcgtaaggagtaaaacccagtgttgccgtcaggttgatctgccgaaccgtgaacgggtaattcaattccacgtaagaagaataattctgtttcccgtcccgggcatccttatcagctccccaaaacatcgtgttccaagccacggacaggggaaacttctcggaaattgtccacgaaatcccggcctccagacgatgtttcgtgtcatgattatccaaattaaaatacttggcagaagaatgatcctctttttcccagaacttgtcaccttcccaccagtagtcggcaacagacacggatacacgtccgaaacggtaggcagccgtaatatcaatttccttgtgtaaatcgctgatctctttcgatccccaaaccgtaagcgagaagttacccgcactcattcccagagttggttggatactggctccggcattgtaagctccacgccatatgtaagagctcaccacgtcggcactcactttaaaattcaccttgccggcatcatgattctcactcgttacctttttttcaaccttcttctccacgggaacattctcttgtccacacacatttaaagcaaggagtaaagcccctgccatcatcattgttgtctttattaactgcatattaaaacttatttaattaaagggtaataacatcccttgcggtcacccgaccgtttcttcaatttttaagaaatcgggggtgtccccaaaagtcaattttgaacaactaccccctccagctcccccttacacagggggagagctaattaccaagcggtttctccccctgtgtaagggggagttagtgggggtagttggcaaatacaggcagaactttggggacagtcccatgcaaaataaacacctaactaaatcaaactaatcggctttctcgtccaaggccatatttagttttagaacattcactttcaacgggccgaacattcccaacaaggggccttgtttcaccttttcaacaatcgctttcaccgcctcttccgacatcccccgggctttggcaactcgtttcacctgcacgtaggctgaagtcacggaaatatccgggtccaaaccgctagcgctggccgtcacgatgtcggcaggcacttcctcccgtttcaggtagggatgtttcacgagaaaggtatcgatacgactctccacctccttcagatactccaggttcgtcgttgccttgttacttccggccgaactggttgcatcgtacccgtcaccggcacaggaaggccgtccccagaaataaatatccttcgtgaaattctgtcccacgttagcacccccgaccactttcccgtcaagcactgccacctcagcgtttccaccgttcggtcctgccaccttggcaaacaaccaaaggacaagtatgtagaaaacactaaaaaaaacacaaaatacaagggtcaatctgaacgatttcaataaattcgatttcatgattatctttatttacaagtttccattttataataaccaaccgatcagtagatcgatcaacttaatcccgataaacggggcaataattcctcccaacccgtagatcagcatattccgacgtaacaaggctgaggctccgatcggtttgtaagccacccccttcaacgccaacggaatcagcaacgggatgataacagcgttaaagatcaccgcagaaagaatcgcgctttcggggctgtgtaatcccatgatattcaacacgcccagcgaggggattgttgccatgaacaaggcaggaacgatagcaaaatacttggcgacatcgttcgctatactaaacgtggtcaacgtaccccgtgtcatcaatagctgcttcccgatttctactatttcgattaacttcgtcgggtcattgtccaaatcgaccatatttcccgcctctttcgctgcctgtgttccactgttcatagcaacccccacgtcggcctgtgccaaggccggggcatcattcgttccgtctcccatcatggcaactaatttcccttcttgctgttccttccggatgtactccatcttgtcctctggttttgcctcggcaataaaatcatccaccccggctttctgggcaatatactttgcagtcaacggattatccccagttaccataaccgttttcacacccattttacgcaaccgctcgaaacgttcccggatacccggctttataatatcctgtaactcgataactcccagaatcttctcgttctcgcaaaccaccagcggtgttcccccgttaccggaaatcgtacgaatcctttgttccgtttccagcgggaattcgttcccggctctctccgcaatcgcacgaatggaatcgaaagcccctttccgaatccgggtaccgtctgccaagtccacaccggaacaacgggtttcggcagtaaacttgatcatccgggtcacagccgtgtcaatatccctcatccggagatgactctcccgccctagttccacgatagactttccttccggtgtctcgtcggaaagcgaagacaacatacaggctctcacgaaatgccgttcatccaccccggcagaaggataaaaacgagtggccttccggttaccgatcgtgatcgtacctgttttatccaacaacaacgtatctacatcacccgccgtttcgaccgccttacccgattttgtaatcacgttggcacgtaacgcccggtccatcccggcgataccgatagccgaaagcaatcccccgattgtcgtcgggatcaagcacacgaacagagatataaaagctgccaccgtgatattggttcccacgtaatcaccaaaaggtttcagcgtcgcacagacaatcacgaacaccagcgtgaacccggccaacaggatggtcagcgcgatctcgttcggggtcttctggcgagatgcaccttccaccagagcgatcatcttatccaaaaaactctcgcccggctgggtcgtcacctgtacacggatcttatcggaaaggaccttggttcccccggtcacggaactcttgtcccctcccgcctcgcggatcaccggggcgctctcacccgtgatggcactctcgtcaatagaggctaatccctcgataatttccccgtcggaaggaatcacgtccccggcctcacactcgaagacatcccctttcttcaattgggagctactgaccacctgtactttaccgttcacgatcatcttcgccggagtctcctctctcgtttttcgcaaactatcagcctgtgccttccctctcgcttcggcgatagcctcggcgaaattggcaaacaacaaggtgataaataatatgatggaaaccgccacgttataaccgaatgatccctgatccgtgatcccggcaaaaagaaaatacaacgtggcaacaatcatcaacaccgtacaaatctccaccgtgaacatcacgggattctttaccatcagtcgcgggtttaacttcacgaatgactgctttaagctctccagcaccaattcccgcgggaaaagtgaagttgatttattggatttcatattcatacacgatttataattcaaattctaaaatgataaataatcagcaataggccctaacgtcaatgccgggaagaacgacaaggctgccacgataaagattacgaggaaagtcatgacggcaaaagtcgtcgtgtccgtctttagcgtacccgcgctctccgggataaacttcttacttgccagcaacccggcaatggccacctgaccgacaatcgggagataacgccccatgatcagcacgataccgcacgtgtagttccaaaaataggtgttatcgctcaatccctcgaaaccggaaccgttattggctgccgaagaggtgtactcgtatagcatctcgcttaaaccgtggaaggaagggttattcagccaagctcccgccagttcgggattgtgagccgccaaaaaactagctatcgccgtgaacaacaagataaagaacgggtgagccaatgccacgatcatggcgatcttcatctctctcgcttccaccttcttccctaggaactccggggtacgcccgaccatcaatccactgataaacacggctatgatgataaacacgtagtaattcatgaatcccactccgacaccgccgaaccaacagtttatcatcatgttcaacatcgtgaacattcccgtgatgggagtcaggctatcgtgcataccgttcacggaaccattggatgttaccgtagtcacctggctccacaaggccgtacccgcggaaccgatacggatttctttaccttccatgcttcccagttcttgggctattcccagctcgttgatctgctcactgcctcgcatttcaaaataatgggcagcaaaaactcccactaggaaggcaaacaacatcacaccgaagatcgtgtatgctaactttttgcgtttcaaatagaatcccagcgcgaacaccatcgccatcgggataattaatatcgaccaacattccgtcatgttcgtcaggaaagtcggattctccaaaggatgggaagaattcaccccgaaataaccaccgccattcgtccctaactgcttgatcggcacgatggcagccgtcggtccctgtgaaatcatctgggtctgtccttccaacgtgatcacttccattttcccgtcaaagcccatcggaacaccttctatgatcaagataaaaccaacaaccaaggctaacggtaacaagattcgggtacaactcttcacgagcaacgcccagaagttaccgaaatcccgtgtcgttttggctgccatcgcccggaatatcccggccaacgcagccatacccgtggcggctgtgataaactgaaacaacatgatcacgaacaactgagtgaaataagtcaatcccgattcaccgctataatgctgcaaattacagtttaccatgaaactgatacaggtgttgaacgcctgatcgggggtttgtcccacattcccatccgggttcaacggcagatgcccctggaagaccagaaggaacattccccagaagaaccaaaacaggttgatcgtcaacaatgccaccaagaatttcttccagttcattgactcttccgggtttataccgcctaatttaaacatccatttctccacgggagccataaaatccgtccatacacgctcccccttgtacacttttgcaatgtaacgtcccagcggataagccagtactagcaacaggacgacctgcaacacactacctagaatctctgtattcatttcttactttatctaaaatttctcgggccgaaccagtacatacatcatgtacccgaacatcaccacactaaaaataaataataccgtaaacatcttttccacctttaaatcttctcaaaccaatcaatacacttaaagaaaaaccagtaacagacgacgcctgtcagacacaagaaaataaatgataatacctgttccataatttcatatattaattcaataatctttgcccttgtgataccaatggtatgccacacgaaggaacaattattataaccatctatgaaacaagaatataaacatcattataggaaagaataaaagataagaaaccctaccaaaatgaaaaggtcatcctttcatttcggtatagcaaaacggaaaacaaacgaacgatacttgttatttgtctcccaacccgtattcctcaattttacggtacaaagtagttaacccgatacgcatcaaccgggctgcctccgtcttgttgccccccgtgtgttgaagaaccctccggatatgattcttctcgatattcgccatgtcaaaatcggaaaatccacccgtttctcccgcggccgggactggacgtcgcaattcaagcggcagatcatccaccgtcaactgcccctctcccgcaatcacgatactccgttccaccacgtttcgcaattcccggacatttccatgccagccgtaacgtttcaagcattccatgtaatccggatgaacctctagccccttcttcttcatttttgccccgaaatattgcacgaaagcccgcgtgtacacttctatatcctccacccgttcccgcaacggcggaagcggaatacaaaatacggaaagccgataatataaatcctcccggaaatgtccgttctcgatctcttttgtcaaatcccggttcgtggcggcaatcacccgcacgtccaccttcgtgggtttcgtatctcctattttaataaattcaccagcctccagaatacgcagcaacttcgcctgtaaatcgaacgccatctccccgatctcatccaagaatatcgtgccatgattcgcctcttcgaacagtccctttttgtccttcaaagcgcccgtgaaagaacccgccttatgtccaaacatctcgctctccagcaactccttgctgaaagccgcacaattcaccgccacgaaagacttcttggcccgttcgctattccggtgaatcgcctgtgcgaacacctctttccccgttccggtttcccccgttaatagcacgggaacatcagtcacggaaaccttctttgccagcgcaatagcctcccgaattgccattgaactccccagaatcgtgtcaaacgagtattcccgatctaccagaatctccgcctgactctcctgcttggcctttgccacctgatccatagcccgactgatcaacgggataatccggttattatcatcccctttcgttagataatcaaacgccccgtttttgattgcctgcaccccatcgggaatattcccgtgggccgtcagcatgatcacctccgccagcggctttacccgcttgatctcggcaatcaactccaccccgttcccgtccggcaaacgcacgtcacacaacaccacgtccggatcgtgcaaagccaattgctttaacccgttcttacaggaatccgcctggaagacctcgtacccctccagccctatgatccgggataataatccccttaattgatcttcatcgtctataattagtactttattcataaaatgccaatatgggtacgaagatacaatcattttattacattaaaaagaacacgggtttccaaaaacgactttctggaatctggtccggaagacttcgtggaaaatgccacgttaaccactactgtcacgatcaagtactccgggaataatgccacgttttcctccctccccacgggagtaagtgtatcatgtaacgggaccgaccaagtgatgacaataaaataaaaaaagagtcagctttcttgtgctaactctctcgttatttgatcgtttttcgcggagagggagggatgactcgaagtccttcagacttctcatgaacgcgttacgaacccaccatcccttcgttcgaatcctttaaaatacaaaaaaagagtcagcttttgtgtgctaactctctcgttttgtgttacttgagcggagagggagggttttgaacctataactctaac

SEQ ID NO: 10700 - DNA, 108751 bp, Unknown
  gut microbiota DNA sequence
caaaccactggattttgttgctactgacataagtttacttgttgaacaagtcaacttttttaggataagacaatgtgtacttccgtatcactaccgtgtaaaacgctattagaacgctattaaaaccctattaaaacgctatacttagaatagcgttttaataagattttataagcttattaaaaattttatatacggaagtaatccactagtgattatgatttgtaactctattattttattattagaaggtgatatcctgatgacaagttataaaaaatgattatttcccgtgttaacgtgaatctaaatgttaaatttaagatattcagtttttatctctatctttgcatgatataataaaggtttctatgacagaacttcgggaggaaatagtaaaaaaggcgtttctgcaattcttgaacagggggtataaggcctgttcgctgaaagcattggaacaagccacgggcttgaccaagggggccttttattattatttcaaggacaagaaggagattctagaggcaggaatggaacggtatttcagcgtgatgaaggaggagagcgaggaggatgtggaacgtgtaacctctttgcgggagtacattgatctcgtgattcggaataaagaggaaagtgctgatgcttcccagagagtttttggatgttttatgctagaagttctgtttttccagttggtattggaagtggctccgatctttccggagtttcgggagcggatatacacgatttccaagaggcggttggcgaactgggagtatgttattttgaaagcaaaacaaagcggggaaatcagggaaacactagatacttcggtgttggcgcgtaacttgatgtccgtgtccggtagtatgttgaatatcgagttggaacaggcgaattttcagtatatgttttcagatacccggatgcagtttgaacaatattatatgttgataaagaaatgaacggaacgagagacacgatcatcgagacggctttcctgttgttcttgaaaaagggattcaaggcggtaacgcttaccgacttggagaaagccgtggggatgacgaaagggacgttttattatcattttttgaacaaggaggaggttttgaaagagggggtgacgaggtattaccgtatgttgaataaccgacgggccgaggagatgagccgggtgcattcgttacgggaatttgttgacttgacgatccataatttagaaagtatcggtcattacggggccaaacgtttggatagtgatattcccgaaattttgtgtctctctctgatggttgaggtgatttccttgtacccggagtttaaacagatggtgagcgatacgaaaatttcgtggatgtcgaaattggaaggcgttattttaggggcaaaacgggcaaaagagatacgagatgacgtggacacgtctattttggcaaagaatttgctgaatataagcatagggttgataaattacattgtcatgcatcaagatatttcttatgcattatcatcggtgcgttaccagtatgaacaactttattcgttagtaaaagctcggtaaagtttttacgggggtacataccgaaaagtataaatttaaagagacttgaagttagattataaaaacgagaaagtgatgaagaggattacggaatgtaaatctggattaagtttagtcattgtattactgtgttttatgtcgcagttgaatgcgcaggaagtgttaagtttggaggattgtcggcgattggcgatagagaataataagaaactgaaaattgcagatgaggaggtaaaagcgagcgaggcgcaaaaagcggaagcattcacgaagtatttgcctagcattgacgctatgggcgtgtatctgcgtaatcagaaagagattaacttgttggctgatgatgctcatttgcctgtcgggtcgatcagttcggacgggaattttacgttccgtcctgatcagttgatggttggtgcggatgggaaacccgtaatggtaaacggacaatatgtcccgaaggattacgccttattgccgaaagaggcgatgaccgtggatgagcgtaatctgggaatcgtgcaggtcgggttgacacagccaatttatatgggtgggaagatccgggcttataaccaaattaccgggttgtcggagcggttggcgaagagcaagcggtcgcaggagttgcagaacgtgatactttcaacggacgaggcttactggcagattatttctctggtgaatcgaaagaaattggctgataaatacgtggagacgttgacgaaattcgtgcatgatgtcgagttgatgcacacgacgggggtagcaaccaaagcggacgtgctttcggtgcgagtgaagttgaacgagggggagatggttcaaacaaaggtggataacgggttgagtttgtcccggatgttgttgaaccagatttgcggtttaccgacagacacgattgtgatgttgaaagaggaggtggcagacacggatgtggatgaggtgccgatggagagtttggaacaggtgtatagccgacgtccggaggtggcgagtttgcagttggccacggatatatataaaaagaaggagaagattgctttatccgaatatttgccgacgattgctttaacggcgaattatttgagcagcacgccttctttctttgacggggtgagtacgaagttcgatggaatgtggagtgtgggtgtcgggattaaagctccaatatttcattggggggcatcccgtaagagtttgcgtagtgcgaaagcacagacaaatgcgatgaattataagttacaggaggcgaaggaacagatcgagttacaggtgaaccagtcggaattcaagatgaaggaggtgacgaagaagttggcgatggcccgtaagaatctggaacgggcggaggaaaatctgaaatttgcaaatttgggttttaaggaagggacgattcccgtgttaaatgtgttagaggcacaaacggcctggttgacggcgaattcggagctgattgatactcagattgaggctcgattgtgtaaggtctatttggagagagcttatggaacgctagaattttagattccagccgtgcgaggttaatgttttttgattccattctaaattttaaattaattgttatgagtgaaaagaaagtaagcgggaaggtattgatgtttacagggatcgtgatcatcgtatttttgattgctatattcgggtttattttttgggagccggtgccggagataattcaaggtgaggcggaggccacggaagtacggatttccgggaaggttccggggaggattgagcgtttttgggtggacgaaggggatcaggtgaagaagggggatacggttgcgattctggatagtcctgaggtgatggcaaagtttaaccaagctcaggcggcggaagaggctgcccaggcgatgagtgataaggcccagaaaggagctcgtgaggaacagaaagcgatggccttccaaacgtggaaaaaagcacaagcagctcttgatgtggcgaagaagtcttttgaccgggtgcagaagttgtttgaaaatgatgtggtttcagcgcagaaacatgatgaggccgaggccaattataaggcgatgttagccacggagcaggcagcgaaggcacagtatgagatggcgaagaacggggcggagaaggaagataaattggcggccgaggctcaggtgaaccgggcgaggggggccgtggaagaagttagttcttatattaaggagacatttttgatttcaccgatttcgggagagatttccgaacgttacccgaaggtgggagagttggtggggacgggttcccctgtgatgagcgtgctggacttggaggatatgtgggtggtttttaacgtgcgagaggatttgttgggcgacttgaagatgggagccgtgttcacggggtatattcccgctttgaacaataaggaggtgcagttgaaagtgactcacatgaagaatatgggtacttatgccgcttggagggccacgaagacaacggggcaatatgatgcgaagactttcgaggtaaaggcggttcccacggaaaaggtggaggggttgagaccggggatgagcgtgctgaaaagagttaaaaactaagaactaaaaactaaaagtttaaagtttagaatttagagtttaaagtgaaattaggagcgttgatttgtgcggttggaatctaaaatttaaaattagtttatgcgtgagaatataagggctttgggggtgttgatgaaacgggagattcggatgttggctggacatcggatttactggttcgtgatgatttttgcacctttgttctgtttcctgtttttcatggatttattgaaagacgggttgccgaagaagttgcctgtggctgtggtggatgaggataataccacgacttcccgttctctggtgcgttcgttgaacacgtttgctcagacggacgtggtgatgcgtacggtgaatttcagcgaggcccgagaagctttgcagcgaggagatgtttacgggatcttttatatcccggcagactttcggcgggatgcgtcgacggggaaagagcctgtgttgtcgttttacacgaatgatacttattttttggcgggttctttgttatataaagatatgcggatgcaatcaaatttggctaacggggcggttcaacagacgttattgttggcgaaaggcgagggaggaccgttgcttgcagcgaaattaatgccgatcgtgctggatacgcacccgttgaataacccgtggttgagttacgctgtttatttggcgaatttccttttaccggcgtttttgtgtatgttcgtgatgtttaccacggtgtacagtattagcgaggagattaagcggaggacttcaagagggtggttggaggcggggaatggttctattatcgtggcgttgatggggaaacttgtcccacaggcgttgattttcacggccatgggaatgcttgctctttccatgttatatgggtatgcccatttcccgttgaatagtggatttttcccgatgtttttggctatggtactgatgattttagcctctcagtgttttgccctgtttgttacgggaataactcgtcggagtaggattgcgttgagtgcttgtgctttgtggggcgtgttgtcattttcaatatgcggttttacatatccggtgcgttctatgccggagttggcacagatcggggcgaatttgttccagatgcgtcactattttttgatatatgtggatcaggctttaaatggtattccgatgatattttcttggcagagttacgctgcattgatagtatatctgttcttgccgatttttatcctgccgaagttgaagttggatttgttggagtttaagtatttgccatagtaatctaaaatcaaaaatcattaaatctaaaattgatatggttttttggacggatatatattatgtttttaaacgagagttttatgcggtgtttcgggatcatgccgtgctgacttttttcgtggcattgatgttggggtacccggtggtctacacgtttatatatagtaatgaggtggcgagggaagtgcctgtggcggtggtcgatcattcgaagtcaacgttgagccgggagtttatccggaattgggatgccacggcaagcgtggacgtggtggcccgttgtgaggatatggaggcggcgaagttgctgatgtataaaaaaggtatttacgggattcttgagattccctctgattttagtaagaacgtggcccggggggaacaggctcacgtatctctttattgcgatatgggagcgttgttgaattacaaggctttgttaacggcagggacggatgtttctttggcgatggggaagaatatacaggtgcaaggaatggaatatgccacggagatcacagagcagattgcatcttctcccgtacggattcaagacgtgaagttgtttaatccgcagggaggtttcacttcttttttaattccggcggtgttgattctggtggtacagcagtcgttattgttgggcgtggggacgattactgggacggaacgggatcggcgtcggagaggtttattgttacctgcgaataagcatttccgtcgtccggcacgggtagttttaggaaaagcttttgcttatttgcctatttatttcgtgatgagttattgggtgtttttcatcgtgcctcgtttgttcgggatgacccaggtgggggaacggggggaactgatattgtttttgttcccattcttgctggcgtgtaccttttttgctattaccatgtcgttttttagtcgtgaacgggaaatgcctttcttgatattcgtgttcacgtctgtgccgttgatgtttatttctggaatttcttggccgaagtcggcaatcccggaatattgggtgtggtttggaaagttgtttccttcctcgttcggtattgatggtttcgtgaaaattaataatacaggagccacgttgtcagaggtgttacctgaattttgggggttgtgtatattgatggtgttttattttattgtggcatgtttgttgtataaaagagagtgtaaaaagttaaaatttaacatggtttagtgataaaattggaaatgatgaaaggtgttgtattttctttgcttgggttgattttattgatgtgtgcctgtggaagttctaaaacaaagcaggaacgcggtaagactacggtgcaggccgatacggtgaaaagttatcagggggaattgtcgattatttatccgggaaagatcaaggcagcttcagaggtaaagctgtcatttcgggtagccggacctattcgggctgtgttgccggaagtgggggcattcgtgaagaagggagagctgatcgctgagattgatccgagagattacgagattcaactttcagcgacggaggcggaatataatcaagtgaaggaggaagccggaagggttattgagttatataaccgggggagcgttccggtgaatgactacgataaggccgtggccgggatcaagcaaattacggcaaagtataatgcccataagaatgcattggctgatactcgtctgacagcaccttttgacgggtatattcagaaaaaatattatgattctcacgagacggtagctgccggttatcccgtggtgtctatgattaatagtaattattttgacgtggatattgatattccgtccagtgattttgtacgacaagatttgtttaagtcgttttcttgtgcgattgacgtgttcccgggacaagttttcccgttagagctaattgaaattacccggaaggcgaacttgaatcagttgtaccggatgcgtctgcgtctgaaacctgtgccgggagtggatattgcggcagggatgagcgtgaacgtgacgatcgagtataacccgaacgaggaagcgttgacggtggtgccgttgtccgctatgttcgaagaaaacggagaatctgccgtgtgggtatataacccgaaaactcaaactgtgaccaagcgtgttatccagttgaaaaagttgttgaaaacaggtgagttgattgtttccgaaggattggcagccggggagatcgttgtgtctgccggtgtacatagcttgaaggaaggaatgtcggtagaattattaaaaccggtttctaaaacaaatgtagggggactgttgtaatgataaatttagcggattatgcattaaataatagggcgctggtaaagttttttattgcagtgctagtgattggaggtatttttgcctttaattcgatgagtaagttggaggatccggaaatcaaggtaaaacaggcgatggtacttacggtgtatcccggggcctctgctcatcaggtggagttggaagtgacggatgtattggagaagtcgattcgttcgatgggagccatcagtagtatagaatctaaatccatggcagatatgtcattgatcacggtggaattggagagtacggtgagtccggacgagttggagcagaaatgggatatcctgcggaggaaggtgacgaatgcgcaagcgcaaatgcccgatggggtgcgtccttccgtggtgatggatgatttcggggatgtgtatggaatgttttatgcgataacgaccgacggggtgggtgacgagcagttattggattatgcccagttggtgaaacgagagttgcaggatattgagggtgtgcgtcgtgttgagatctatgggaatcgcaccccgtgtatcaatatcgagatgatgcaggataagatggcgaatctgggggttcatccgatggaggtgttgtccacgttgaatagtcagaataagaccgtgtatcccggttatttcaatagcggggatcagcgtttgcgggtggctattaatgatagctataaatcgatagaggatattaagaatctaattatacagggacacgaggatgatcagttacgtttgcgggacattgcgtccatcacggaaggttatgaagatccggctcgcaacgggatgaagtatgatggcaagcaggctttcgggttggcaatttccatggaaaaaggtgggaatatcattactttgggagagaaggtggatcgggagttactgcagttgaaagagtcccggattccagtgggcgtggattttcagaaagtattttttcagccggaccgggtgagggatgccattaatgttttcatggttaatttggtggaatcggtggtaatcgtgattctcgtgctgatgcttaccatgggattccggagcggggtgattatcggtacgggactggtgattatcgtgttgggttcattcgtggtgctttatctttttgacggaaccttacaacgggtttcgttgggatcgctgattgttgccatgggaatgctggtggacaacgcgatcgtgattgtcgacgggatactggtagatttggaacggggcgtgaagcgtccggcggcgttgacgaatatagcgaagaagacggccatacctttgttgggggccacgttgattgccatattggctttcttcccgatttttatttccccggacacgacgggagagtacgtgcgggatttgtttatcgtgttggcggtatccttgttgttgagttgggtgttggcgttgacgcatatcccgattcacgcggatcattcgttgaaagtgaaaccgaaaaaggcgagcgagaatttgtacgatagtaagatataccggttgttccggcaattcctttcctttatgttgtggcataagtccatggcaatcggggtggtagtggttttattggcgattactgcattcttgtatcgttatatcccgcaggggttcttcccggatttgagttacacgcagttgtatattgaatttaaaatgccggagggtacccgggtggaacgggtcgagtcggatttggcgaaaatagaagattatttgttgagccgaccggaggttactcatgttacaacgagtgtaggcgggactccggctcgttataatctggtacgttctattgcggagccaacgatgagctacggggagttgatagtggattatacgaccccggaagagttgaaggcgtcgatgaccgagattcaggattacctgacggctcattatccggatgcttacgtgcggatgaaacgttataatttgatgtacaagaagtacccgatcgagttgatgttcacgggaccggacccggccgtgttgagagagttgacggagaaagcggaacagatcatgcgtgacgagccggctatcaccttggtgacgaatgattgggaaccgatgactcccacattgatggtgaattattaccagccgatagctcgttccgtgggactttctcgctcggatgtcggtttgtcgatgctagcggcgacggatggtatgccggtgggatctttttacgagggagttcatgcaaagcctttgtacatgaagagcgtgaatagtgagggggagaaggtggaagcgttggataatattcccgtgtggagcgtgttgccttcaacggcggctttgaacgaggagtcgttgaaaggattgttgatgggaacaatgtccggggaggatttgctggctcaaagtatcggttctattccattgaatcaggccacgcaaggtatttctttgaaatgggaagatcctgtcgtgcggcgttataacgggcagcgggcaatgcgggcgcagtgtaataatgctttggggtacacggcagagagcgcccgggcgttgatcgtggagaaggtggatacaattactttgcctgagggttacgctaaacaatggttgggagagcataaggcgagcggggagtccatgaaatatttatttggaaatattccgttagctgttattttgatgatcgctatattgattatgttgtttaaggattttcgcaagccgattattattttctgttgtttacctttggctgctatcgggatcgtgctgggaatgttgatcagtggtaaagagtttggtttcgtggcgattgtcggagcgttgggattagttgggatgatgattaagaatggggtggtattattagatgagatcgggttgcagattgcttccggaaagagccagacacaggcgttgctagactcttcttcttctcgtttccggccggtgatgatggcgtctttgacaacgatattggggatgatcccgttattgggtgatgatatgttcggttcgatggccgttacaattatggggggcttgttggtaggaacggtgatcacgctggtgtttattcccgtgttgtacgcaatattttttaaggaaaggaaaaattaaatgttatgagatatttgttgatcatattgctggttatgggtatttctcctgttcggggacaaatttcgttgaatttggagacgtgcagagagatggcattggagagtagtaaaaagatgtcgattgccacgaaacagggtgagaaagctgaatttgagcgaaaggcttatcgtgcgaattttttgccgaagctttcggctaccgggttatatgcttatatgcagaaaaagagttcgttcacgattgacgggggatatttgccaacgttcgtaccgggtgccaatggggagttggtttataatctatatattgatccggcaacgaaacttccggtgatgggaaaggatgggttgcctttggcgaaaacatatgcgtttatgccggatattgagttggagttagggttacgaggggtttattctgcgggagcgatgttggagcaaccgatttatatgggaggtaagattcgttcagcttatcgtatggccacgatcgggaaggagatggccgagttgaataagcaatatacccgtgcggaagtaattaccgaggcggacgaggtttattggcaatacgtgcgtctagtggaattagagacttctgctcagaagtacaaggccgtggtcaatgagttagtgcggaacttgacggatgcttatgaaacggggatggcttctcggaatgatttgttgaaggcgcaagtaaagttgaacgaagccgagttgatgttgcaaaaggcggaaaacgggaaggcattggcggggatgaatctttgccgggtgatagggatagacctttattcatcgatacaggtaagtgattctttgtgcggggaggtgactccgggagtgctgaatgccggggagggattgcagcaacgtcctgaatataatttgttggagaaagacgtggaattgaaggagaaacaggtggcattgactcgttccgatttcttgccggaagtgggagtttccgcttcttatggattttccgggggaatatctctgaacggacagacggaggacgtggcatctttcatggcgatggcttccgtgaagatcccgatttatcattggggggaaggccggggaaagattaaagccatgaaggcagaacaggagatgagccgattgaagaaagaggagatgtctcaaatgatgcttctggagattgcacgagcccgctataatatcgaggattgccacgcaagggttatactgacccgtaaatcgttgagtcaggcagaagagaatctaggggtgagcaagaatcagtatgaggtgggtatggagacgatcacgaactacatggaggctcaggcacaatggcaaaaggcgtggagtgactggattgatgcgaaggcggaattacggttgagcgaaacgagatacttgaaggcgacaggacggctgaattgatttttggagtatttgaaggtgcgtgattgttgtagggatttgatcctcaattgataaaatagaggaattgtttgtatttattccttattattagtactattgtacaatcgtgtggctttcgtttataaatttaatactccaatatcatggacattcataacttaaaaaccgttgcttgttataattcgagattgttgttaagaagttggatgttccggctgttcttgttgttgctttttctgattattatactttatcaggttttggcacagaccaatattttttatgggataaatagtggattggtgacattatcgtcttactttcctcatgaaaatgcttatctattcacaatcttacaaattgtacccttgatttttttagccgggtcttttcttgggaaagagaggaagatggattcgatggacacggtttattatcgtccggagagtaatgcggactacgtggtggggatgatgttgggattcacgaagacttttatgacgatggcggggatttctcttgttgtcgggatgttgttgcatatttttgcgagtgagtctccttttaatttctggctttatcctttttactggctcacgatgatttttccggctttggtatttgctttgggtttctctttcttcattcatacatggattcgtcaccggggacttggtatattgattcttttggtggtatttggggtgtttctgtttcagttgggtaaggtgcgggaagggctttttgatccgttcgggttgtctttaccgaatgctttttctgaagtgacgggacatccgggaatggccctttatctcatgcagcgagtttgttggttattggtgggaatgggatttgcgggattgaccgtgttgatgtttcaacgcttgccgaatcgtccggtgagccgaaagcgtgtgatgatcgtggcggttggttgtttggggctgggggtactatttgggggagttgtctatatggcacgtgagaacgtggagtgtgttagggaactttatgccgaaacttataataaatatcaaaaatttccgaaagggaacgtgatttcgaataccttggaggtggagcaaaagggaaatgtgctgtccgggaagagtacccttcttgtcaaaaatcaaggggggcaggaattatcggaaattattctttacctgaacccggctttggtggtgtccgcgataaaagaaggtgagactgacgtggcgtttgaacgggagaatcaagtgattcgggttgcccggagattgttacccggagaggaggtggaatttactgtggagtatcgtggcgggattgatgagcgggtgtgttatttggacgtggattttgataaattatttcaattgcagcccattcccgggcatagttctaccgcgggaaagcggtttgcctttgtcggggatgatttcactgtgcttaccccggaatgtctttggtatccggtagcccagccgtcggtgaatcctgcatccccgtatgatgctttgcccgattttacttcctactccttacgggtggcatcgacagatgggcgaacggttattgctcccggaaagcgggaggcgaaagaagggggtgtctgttttacaggagaaattcctttacccgggatggggctttgtatcgggaattttgaaaaatatgatgtttttgttgactctacattgtatgagctttatctttttgaggggcatggtaagcttttacagggcttcgaggagattcgggattcaattcccgcgatcattcgggatgcccgttataacgtggaggagcggatggggatcacgtatccttattctcagctgacattagtggaaacacccatttctttttccggttttgcccgtcccaataaaggggggagtgagatggcccagcccggtatgttgttcctgccggaacgggggatcggaatgtggaatgatcataaggcgagtgctgcttttagaaagcgaatgatgccggagatgtcgtctttttacagttctccggaggatatgcttagtgcggatttggttagttcgttgtcttcgatgtttttgaatgaatatcgttataatgtaaaccaggcaagtttgttgttgtattcgcttgtttcgccttctcttttgtggagtcgaggggttactaattcaagtgttggtaatttgtacacgattagccccatgttttatgaacagacgatggcattacattctgcggaatatccggcaattaatacgatattgaccgatgcgttaaagaagtcgaacacgttctttgtctcttatactgatagggaccaagttgaacggtttgccggacgtagtgtgggtgatcttttccgtgatcgtttggataacccttacgaggcggcgactcttttacatggaaaaactcgggaattgttgcgtttgttgagcgtgagaaatatacccacggaacaaattgcggaatttttgacaacgtttattcgagaaaatcgtttccgacaggttgaatttgacgagatgaaccgggagtttgtcgagaaatttggtgttgactggatggatgttttgcctcaatggtatgagaatcgtaaaatacctgttttctttgtcagagattttaaggtggaaaatattacctctcaagagaatgaaggtgacggcctttctgttgttacgtcctcggggaatttcgtgatgcatgattgggataatatgccttcccgggtatcggtgagtgtttttaatgatagtgatattgatggtgttgtttctttcgagactcgggaaatgatgtcttcagggggaataaatatgcgtaggcagggtagtggtgttgagaaagtgtctactcgaaattttttgattaaagcgggaaccggtaaacagattgccgtggtgatgaaaggtatgtcgatcatgtttaatacaaatatatcgaataatcttccgacgaatttctttatgtcgggtatgctgggtagatcaaaaactacggatacgacggagtttgtaaaagatttggatcgttcttattttatgccggttcccggggaaattgttgtggataacgaggatgaaaattttaaattaatttctccttcttcccggaaacggttgaaaaatctgatttctcctttgcaagaatcgaaatatgagttgggaacaaatcttacgataagggaaggggttgaagttgttccgaaacatatgattaattcccaggcttatggattgaataagttgactcacgcctttatgttacagggaagtaaggcgacgatggaatggacggcccggattgaacgtgaaggagagtacgaaatattggcgtatattcccccgaaagtttttgcgcatcgaattgaggaacaagagagaggtggtagggggagtggattcttttctatttcagtttcttctgtgacagaaacggagccggaagagataaaacagtattacgtcgtgaatattggaggggagaagcaggaggtttccgcagatgtaaaggaacaggtgggatgggtttccttggggctttttcagttgcctgtcggagaatgtaaaatcgtgctaacggatcaaggaaacaaggatcaggtacttcttggcgatgcgattaagtgggtctatacggggaataaatgattttatagaaactttaacacggccttttgagtatatatactcgatttaaaagtttatatatatgaataagacagtgttttcggtattgaagtgggcttctgtttcaggagttttacttgttgtgatgtcttgtcggagggctaccccgggcttggagatctcgcaactggtgaagacggcagaggtgcagaagtatgatggggagtgtagtacgacctatcccgggaagattaaggcagcttcagatgtacagttggccttccgggtggcgggacctattctacgtttcaacgctgaagtgggggagttcgtgaagaaaggggaagtgttggctgagatagatccgagggattacaaattacagtatgaggcaacaaaagcggagtacacgcaggtgacggaggaagcggatcgggtgatcgagttgtatcaccggaaaagtgttcccgtgaatgattacgacaaggccgtggcggcaaagcagcggatagcctctttgtatcatgcgaatctgaatgcgttgaacgatacgaagttgaaggctccttttgatgggtatgtccagaaaaagtttttcggtgctcatgagattgtgaataccgggactcccgtgttgtcgatgattaataatgattactacgaggtaaatattgatattccatccagtgattttattcgccgggagagctttaaggagttttattgcgaggcggatgtcttcccgggtgtaaagatccccttggagttactggatataacacaacaagcaaattataatcaacttttccgggtgcgtttccggatgaaaccggaggagaaattgaatctagcggcgggcatgagtgtcagcgtgaccattcgtttcgaaccgggacaggaggggctatctattatcccaatctcttccttgtttcaaaaagaggataagtcttatgtatgggtgtacgatacggcccaaacgaccgtgaagatgaatcccgtgaaagttgtcgaactggataaagacgggcaagtcatcgtggaatcggatttggcctcgggtacaagaatcgtttctgccggagtgaatggtttgaaggaagggcaaaaagtccgtttactacccccggtgtcctcttccaatgtcggcaaactgctttaattttagattttaaattttagattttagattccagttgcacatggttgcgctgagagaatttaaaacttgtaacattgcgaagcaattaaaatatgatgaattttacggaatatgctttaaagaatagagcttttgtctacttctttgttttcgttttggttgttggggggatatactcgtttttcacgatgagtaagttggaggatccggcgataaccgtgaagcaggctatggtggtgacggcctatccgggagcttctgcctatcaagtggagctggaagtgacggatgtattggagaaggcaattcgttcgatgggagacttggatcatgtttcctctcgttcgatggatgacgtgtcggagattatggtagaattgagtagtacggtccccttggcggagttgcaacagaagtgggatatattgagacgtaaagtcatgggagcgcaagctcagctaccggatggggcccaaccttccatcgtgatggatgacttcggggacgtgtacgggatgttttatgccatgacgtccgatggttttgattatcaggaaatgtcggattatgctgaactggttcgtcgttccgtgttggatattgacggggtgagcagtgtggatgtatatggagaacgtcagtcctgtataaacgtggagtttttggaggataagatggctaacatgggcgtgcatccggcagagataatcatgaccctgaacgggcagaataaaacggtttactccggttatttcgatagtggagaaaaacgggttcgggtgaacgtgaatggagcttataaggagatcgaggatattcgcaacctgctgatcaagggacacgaacaggatcaaatccggttgtcggatgtggcccgtgtcacgaaaggttacgtgaaaccggagcgggaaggcttgttatatgataccttgccggcgatagcgatttcgattgctatggaggaaggcgggaatatccttcaactgggaaagaaggtagatgccaaattggccgagttgaaagaagatattattccggcggggattgattttcaaaaggtattttttcaaccggcacgggtgaagagtgctatcaacgtgttcatggtgaacttgatcgaatcggtggttatcgtgatcttggtggtcatgcttttcatgggattccggagcgggtatatcataggggccggtctggtgattgtcgtgttgggctcgttgctcgtgttgtacatgatgcatgggacattgcaacgggtttcactggcctcgtttatcgtggcgatggggatgctggtggataacgcgatcgtgatcacggatgggattctcgtggacttgaagaaggggattcccaagccggcagccttggtgaatatcacgaagaagacggcttggcctttgctgggagcgaccacgatagggattcttactttcttgccgatatttttatctcctgataccacgggagagtatgtccgggatttgtttatcgttctggccgtgtccttgtggttgagctggattcttgccctagcgtatgttcctatacaggcggaccggggattaagagtgaagccgggagaggtggaagatgagacgaaaatgtacgatacccgggtatatagggctttccggaatacgttacagttttccgtgcgtcatcgggtatgggtgattggtggaattgttctgttactggttgttagtatgtatctgttccggttcgtgcaacagggatttttcccggacttgagttataatcagttgtatatagaatataaaatgccttacgggacgaatcctcagacggtgaaacgggatctggcctctatcgaggaatatttaaccagccgtccggaaattacggccgttacgactagtttgggaggaacgccttcccggtataatctcgtacgaacggtggcagaacccgctttaagttacggggagttaatcgtggattttacttctcccgagacattgaagtcgaatatcgattcattacaggtatatctttcggagcattacccggaggcatatgtccggatgaagcaatataatttgatgtatatggattatccggtacaatttatgattaccggtccggatcctgccgtgttgaaacgtttgtgcggggaggtggaggagttgatgaatgaggattccacgacgatgttggtgacgaatgactggggaccgatgacgcccgtgctgaacgtggattattatcagccgatagcccgtgtggcgaacctttcccgggaggatgtcgggttggctttactggccaccacggacgggttgcctgtcggatcatattacgagggggagcatgatttgccgatttatattaaaagtatgggtaaagacgggttacgtccggggcgtttgaataatgttccggtatggagtcttgtgccttcgacgaatatgttgagtctggaaaccgtgaaggagttgatgatgggaatgatttcgacggatgaggtgatgactgccgtcgtgggttctactcctttgaaccaagcgacaaacgggatcactgcttcatgggaggtcccggtagttaggcggtataacgggcagcgatctatatcggcacagtgtaataacgcacccggctatacggcaaatgacgtgcggaatagtttgctgcccaaaattgaaaagttgaatattccacccggttattccacggaatggcaaggggagtatttggcaagcacgcaatccaaacagtatttgtttaaaaatataccgttgggaattgttttggtgctagctatcctgatcgctttattcaaggatttcaagaagccgctgatgattattctttgtttacccttggcgattatcggggttgttttgggaatgttgttggccggtaaggaattcgggtttgtggctatcgttggagccttgggattggtcggaatgatgattaaaaacggggtggtattggtagacgaggtggatatacagattcgatcggggaaagatcgtttcctggctcttttggatgcttcttcctctcgtttacgtccggtcttcttggcggcgatgactacgatcttggggatgatacccttgattaatgatgatatgttcggggctttggccgtgacgattatgggcggattgtttatcggtacggtgattactctggtgattttgccggtgttctattcgttgttctttaaaatcaaagctgattaatttatgattttagattttaaattttacactatgcgttttattatattatcaatcgggttgttattggctttcgctccttcacgtgcccagcggcagttggacttaaagcaatgcagagagatggctcttgaatatagcaaacaattggctatcgcggaaaagcaaaaagagaaggccgtgtggaccaagaaagaatacggggccaattatttgccgaaactttccgcatcgggcttttatctgtatcatcagaaaaagcaggaatacaaattaagcggggggtatctgccgacttacgtgcctggtgctgacgggaaattgcaacccaatgttgtcatcggtgctgacggaaaacccgtgatggggacggatggaaaaccggtctttcatgaatatgcttttctaccggatatcccgttgacgctttctttgagaggggtatatatggcatcggttcaattgcaacaacctttgtttatgggggggaaaatccgggcggcacatcaggctgctaaatttggggaagagcttgccgaggaaaatattcggttgaatcgttcggaagtgcttgtcgaattggaacaggcttactggcaatgtgtccgggtacaggaattggtgttggttgcccggaaatacaagtcggtggtgaacgagttggtgaagaacttggaagatgctcagcaggcggggatggccccgttgaatgatgtgttgaaagctcaggtgaaatataatgatgccttgttacaactgcagcaagcggaacatggaaagcagttggctcaaatgaatctttgtcgtttggtgggattagatttgaataccgaattggtactgaccgattcactatcggccacgataatgcccggtgtgctggcgttgccggacgggctggaacaaaggccggattataacatgttggagaaacaggtggagatgaaacggaaggagataaacgtgacccgtgccgatttcctgcctcaagtgggtgtttccgcgggttacggttatggcggtggcttgaaactgaatggtgacgattccaattccggttcttttagtgcaatggcgtccgtggcaatacctattttcaactggggagagggacggaataaagttcgggtggtgaaggccgaggaagaaatgagtcgcttgaataaagagcgattgggtgaaatgatgcaattggaaatagccggaagtcgttttaagctgaatgatgcccaaacccggatacgtttgacggaatctgccttggagcaggcaaaggaaaatctgagagtgtccgaggatcagtatgaggtaggaatggaaaatctgacaaacttattggaggctcaggcccaatggcaacaggcttggagcgaatgggtggatgcgaaggccgctttgaaattgtgtgaatcggaatacctgaaggcgataggaaaactcgaataattttagattttagattttagatttccacccacgaagtccacgttttttaattataaatcataaattataaatcgtaaatgaaaaaggttggtttgattttattggggatattgatggcggtgggtgtttctgccgaggtgaagaagatcaagggaacggggtatcttgtggtgcatgatcgtcaggcggatcagccgtttacccgtgtttccgttcaacagtcgatcaccttgtatgtatcacaaggaaaaacggaagggattaccgtggaggcggatgataatattattccttatataaaaacggagataaagaacgggcaattgaatattttccttgacccggaagtgattgttcggggatatacggcaatgaatgtttccgtgtccatgcctattatcacggatataaacgtggcagcagccgggcgtttggaaggaagttcgccttttaccgtgaataaactggaaatcgtggcatccggtgcagggagcgtgaagttggaggtgaaaggaagtgaagttgacgtggaagcatccggcgctgcaagactagaacttaaaggtgaggtggagcagtttgatctggaaatgtcttccgctgccacgctgaaagcttgggaattgcgtgtgaaaaattgtgatgccgaaattagcggggctgccaaggcagaagtttccatttccgggcagttggaggcagagatttcttcggctggcattctaatctatgatgggaatccgcggattaccaaacaaaacgtgaccgggcggggaactttggtaaaaagaagataggataaatgcgattttgtgcagttttttatacctttacatcagggggtagttggccatatacggcttataaagataaaaactgtagcaaatgaataaacgtgatcgattgataggagtgttgttgatattgtctgtacttttctttcaatatttatggctactcctttccgtgttgttgcttgttgttctgggtattttgatttttgatacccggtatgatcgttacgctttagtcatggtggttctcgtgatgctcttgtatttgagtacaaagtttatgttttacgagacctatctggtgcccacgaaatcgatgttgcccgcactgaatagtaatgtgaccgtgcagggcgagaagtggcggtatggtggtatctatctttcggctgtcgaggaatggcctttggtcacgatgttcacgcgttccagtaaataccgtaccggtaagtttgcggcaaaggaccggataaaaatgatcggtttttggaaacccaagaaaaatgatattttggcgtattatgctcctgtggattcctcccggattcacatcgagcggtgcatcggtttgccgggtgatgtcgtctccgtggaggagggacgtgctgtcattaacgggaaagagcgagaggaggacaaaacgttgagtttgcgttatatggcttatttttcggactatatgagattccgggaggcgtgtaaagagttgtcattgtttatgaattcggatgattattcggtttctgaagatgccgtgtatatgtcgcttgataaaacaatgttagatcgtcttcgtcaaggaggggtggtcgatagtcttgtgttccgtcaacgcggggaaacccggcggaaagtgtttctcgcggattcctgcggatggagtttccggcattgggggccttacaagttgccttacaaggggatgagaatcgagttgactctagagaaccggatgttatacggttctctgctgcggggaccggaatgtgttgccgatccggataaattgacttcctatgtttttcaaaaagattattacttcatgttgggcgataaccggggcaattcattggattcccgttttctcgggccgattccctcttgctgtatcgaggcaaggattttacatgatgattagtatgggggtgagagtcttgttttttcgcacgttcggaacacgcgggtaagtaatgatttgtcccccaaaaagcggaattcggataggatttatttctgatcctgttaaaataattgtattaaacagttatcatacatttaccctcttgttaatgtatactatataagtataattgttcgttattttaataggaggggaataggggcggaatgggaggggaatgggagcggctcactctgaaatggcaatttgatcatatagtgataacattattttacattagatgggacaaaattttttcatctcacctctgcatttttaaatgtaaaaagtgaaaagcggatagggagctacctgcaaatacaaactgaattttgaggactctcccgtgtgaattagttttctatccctagtaataacctagattttgcctgcacgaattttgggataatccggcgaggggtacccgtgtcgagacttctactgctccgactattcatgaccggggtggcaatcgcatcctgcgtgatgagttgaagggttgcagccagcaagggttcttctttatctcctagttggtgttgatggtgaaattgctctaagatggggaacatggggggtatgccgcctttgacggattctccccgactgtttctgtattccgtggagatcaacatgatattccagttctgtaagtctttgtcgttaggcgtgtagatgattccacccatattttttcccatggtaatgtcgccaacgacgtttacttccatgtatggggataaggcactgatcagcatttcggcggctgatgcggtcactttactcgtgatcacccacaggcgtttcaagtttagacgggagtcaaggggcaccgttttgtcaaaatgttcttccaaccgggcgggatcgtcggcgtatttttcctgatatgctttattccagcttttgtgaataagcagttcttcgttttccacgacttcttccggggcgagaagtgaacatagttgttttacagcaaaaatgtacccgccttgattatatcgtaaatccaaaataaattcgtcaatattggctgattttaaggtttggaacacgttgttcagttgtgccagcgacgtgttaccgcggaacacgaaatccgtgtagatcatgtacccgattgtttggttctccaagggaatcaacccgtaatcaagtaccggatcgatcgtgtatgtttgggcggtcagctttttcgtttcgtacggttctgatacttcatcgtttgatagcccgagagaaagctgggatgcgtagtacaaatttgtgtaattttccgtcgtgatcctttccccgtccatgtgagtgatcaggtctccccgttttagtcctgcttttgctgctggagaattcgggtaaacgaaattgacatccgcgaatatgtagccctctttctcccagaaagtcaagttatagccaaaaccttcgtcatacccggaggcgtcggcaatttctcccaaacctttggaactcgtgatgcgtgaccattggtcctcggggtatttcatggtagcgaaatattccgctgggttactatctggatcaatgtttttgtccttgacttcatccgcccaaaagtattggtcggtcattttgtctttcgtgaacgtgttaatccggacatacgagtaagggcccggagtagggcttactccgcgtgaatcctcacaacttgataggaatcctgctaaaatcgaaaagaagaatagtctatacataagtttatgtctgatagtaaactacaatattacgaatttttaatggatttccgtatgcgattttgaataaaaagtttttgatgatattgcatatttattcaatataactgtttcgatcgttttcttcatgttttagagatggtgaaattagtacgttttcttcgtgtaatgcttgtggcatttggaatgagtggcactttgcttgttgtttttatttcatgtaatatattgtttgattgtttgctggtggtgggtgtcaaggcgttttcttttctttcggtgaaaaaaatgagaaaatatttgtttttgccgcatattaatgcatatatttgcatggtgaataaataaatatgcacaatgagtaaccaaaaagaatttgaatgatttagattaaactgtaaaaagatgaagattgaagttgtagttgcatccgagaaacacctgtcatacgtgacagcgataaacgatgcgattgatcaggctgcaaaagcaagaggtactggtatagccagaagaacggacgagtatattgccgataaaatccgaaacgggaaggcaattatcgctctgaatcgagaggagttcgtgggcttctgttatattgaatcatgggggcatcagaaattcgtggcaaactccgggttgatcgtggtaccggcctaccggggattgggagtggcaaaacaaataaaggaggctgcttttcatctgtcgcgaaggcgattcccgcaagcaaagcttttcggcttgacaactggtgagcaggtgatgcgaatcaatacttcattgggttacgtgcctgttacttttgccaaactcacggatgacgaggagttttgggccggatgcaagtcttgcgtgaattatgacatattgcaacggacgaacatgaccaagtgtctttgtaccgggatgatttatgatccggaggtcgtggccagacaacaggcggcggctaaaaaggtggctaaggggaggtcattgcctttgttcaagcatctgcgtcatgttgtggggtccacgttggcggtttgcgggttaccgatttctcgctctgccatgaaacatacggcaaatttgtaacttgtaatttatattcatgaaaaaagtagttttagcatatagcgggggattagatacctcttactgtgtcaagtacctgagcgaggaaatggggcttgaggtttacacggcattggcgaataccgggggatttacccccggtgagctggccgggatcgaggaaaaggcgtatgccttgggggcgaagaaacacgtgacactggatgtcacgggggaatattacgagaaatgtattaaatacatgattttcgggaatgttttgcgtaacaagacttacccggtatcggtcagctccgaacgtactttccaagcgttggctatcgttcgttacgcgaaggagatcggggcggacggcttggctcatggaagtacgggggccgggaatgaccaggttcgttttgatctttgtttttccgtgtttgccccggaaatggaaattataaccccgactcgtgatttgaaactgagccgggaagaggaaattgcctatttgaaatcgaaaggtgtggagcgggattggtccaaaatggcttattccatcaacaaaggactttggggaacctcggtgggagggaaagaaacattgaattcatgggagtatattccgggagaggcttatccttcttctttggagaaggagggcgaagaggagttaatcttgtcgtttgaacggggagagttatgccgggtaaatggtgaatgttacacggataaaatcgaggctatccgccgggtggaggctttggcctctgcttgggcaatcggtcgtgacacccacgtgggggacacgattgtggggattaaaggacgtgtcggtttcgaggcggctgctccgttgatgattattaaagctcatgaattactggaaaaacatacgctcacgaaatggcagatgtattggaaggaacaactggccaactggtacgggatgtttttacacgaggccatgtacggggaacctgttatgcggaatatcgagagtttcttaaaagatacacaacgatacgtttcgggtgacgtgcgggttctgatgcgtccctattgtttcgaattgttgggagtgcggtcagatcatgatctgatggatgccacgtttgcttgttacggggaggagaacaaggcttggacggcagaggatgtgaagggttttacccggatgttgtcgatgcctttgcgggtttatcatgcggtgaacgagaagagcaaggaggagttatgatcagagtgggcattgccggggctgccggttacaccgcgggggaattgatccgcatattaatttctcatccgcaagtggaattacgttatttacagagtgaatcgcaccggggagagcctgtcggacgggttcatcgggatttgatttacatgaatttgaagttttccgatttggatttgacggatattgatgttcttttcctgtgcatgggacacgggatgtcggcccaatttttagaacggcatccggttccggcatccgtgcgaatcattgatttgagtcatgatttccggttaaagtcaaatgccggggattttgtttacggtttgccggagctgaatcgggagcggatacgaggagcttggcacgtggcgaatccgggatgttttgcgacggcaatagaattggggttgctaccgttggcgaagagcggtttgctacctgcccacgtgtcggtcttcgggattacaggggcgacgggtgcgggacagaaaccgacggaagagacgcattatagtcatcgggcgcagaatctttcggtttataaagttttttctcaccagcatttggctgaaatacgggaaactttggccgggcaggatgaagatgtgcaggcggatattgcttttgttccggtgcgcgggtgtcatgcccgggggatcatggtaaatgcggttttcgcaagtgaacgggatttgtcggaaattcgatctatgtatgctgcttgttacgagggacatcctttcacggtgatgagtgacgagcctgtttatttgaaacaggtagtgaatacgaattattgttttgttcatgtcgaacagcaggatcgtaacgtgttagtgacttccgtgattgataacctgttaaagggggcatccgggcaggctgtgcagaatatgaacctgatgttcggactggaagaaacagcgggtttgggtttgaaagccagttatttttaatttattcgagtatgtttgatgtttacaatttattggatatagagccggtcaaggcggagaaagcttatttttgggatcgtgatggaaataaataccttgatttttacgggggacacgctgttatttcgatcggacattcccatccgcattacgtggagttggtgacggggcaattgaatcgtatcgggttttattcaaatgccgtgaagaatcatttgcaggaggagttggagcggaagttacgggagctttccggttgtacggattataatttgtttctttgtaacagtggggcggaggctaacgagaatgccttgaaactgtcttcttttattacggggcgttcgaaaatactggccatgcacgctgcctttcacgggcgtacgagcggggcggttgccatcacggataacccgacaatacaggcaccttggaacagggggcatcaagtgacatttatcgatttgaatgacgtggagactttgaaacgggagttgtccaaggaggaatatgcggctgtcatcgtggagggaattcaaggtgtcgggggaatccggattccgacaggagagtttctgcgggcggctcgtgaggtttgtgatcagacaggtacgttgttgattttggatgaaatccagtcaggctacgggcggagcgggaaattctttgcttatcagtatgcggggatcgagccggacatgatcactatggcgaaaggaatgggcaacggattcccggtagccggagtattgattcgcaagtcgatcaaggcggagaaggggatgttgggaaccacattcgggggaaatcatttggcttgtgcggctgggattgccgtgttggatgtgatcaaggacgagcaattggtggaaaatgccgatcgtgtcggtgggtatctgatggagcgattaaaagttttgaacggggtgattgaagttcggggaaagggattgatggttggggtggatattgatattcctcattcgattttccgtcgtcgtttgctggcgaatcaacacgtgatcacgggaaatagcgggaaaaacaccttgcgtttattgcccccgttgtgtattacccgggaggaagttgatgagtttgtcgctcggtttaaacaagtaatgaattaacagatgaaatgtaaagtcataaaaatcgggggtgccttgatcgaggatgcgggactgctgagccggttgtgccggaagttcgcatcgatgacttctccttttgttatcgtgcatggtggcgggacttttgccgggcagcttgcggaacgattggggattccccgcaaaatgattgatgggaggcgggtgaccgatcgggagactctggaagtcacggtgatggtttatgccgggtgggtcaacaaaacgttggttgctcgtttgcaggctttgggggtgaatgcttgtggactttccgggtgcgacctgaatctggtgcaggctgatcggcgggaagggcagagtattgattgggggtacgtgggggatgtccgactggtgcgtatggggactctcgaattattgttacaggccagggtggtacctgttatttctccgatcacgcacgacgggaagggtgtgttgttgaattctaatgcagatgggattgcggcggcggtggcagagacgttgggaatgtgctatgacgtggagttgatttattgttttgataaaaagggggtgttgacggatgaaggttccgtaattccttgtcttaccccgtctttgtatgaaaaatataagcaaagcgggatgattcattccggcatgatcccaaaactggataacgcatttaaatctgtttctaacggggtgcaggcggttcggttgattcatccggatgatttggaccaaccggatgcgggaactaggataatattggaaaaacaatggatgcgagtggagcaatagaacttttaaaacaaattatatcaatcccttctttcagtaagcaagaggataaggtggctgatttgattaccgatgtgttgaaaagatataggttcgacgtgcatcgcaaaggtaataacgtgtggagttgttcaaagaatttcgatgaaacgaaacccacgttattactcgatgcacacttggataccgtgcgtcctaacggaacttgggatagtgatccttttacgccgattgtgaaggagggaaagttatttggtttgggaagtaatgacacggggggaagtcttgtctcgatgctggcagtttttgttgaattggcatccgagagtttgccgtgtaatctgatattcttggcatccgcggaagaggagaatacgggaagtggcgggattcaaagcgtgtttccggaatttggtcgggttgattttgctcttgtgggagagcctacgggaatgtgtccggcgatagcggaaaaggggttgatggtgttagattgttacgctcggggaaaagcgggacacgctgcaagggaggaaggggtgaatgccatttatgaggcaatggaagatatacattggtttcgtacttatcggttcgaaaggatttcggaattattagggccagtgaaaatgagcgtaacggggatcgaggcgggaaccttgcataacatggttcctgcaacttgtcatttcatggtggatatacgggtaaatgaactttacacaaaccaggaaatatttgatacgatccgtgatcacgtgaaatgcgatatgatccctcgctctttttcactgaactcatcttctgtttcgctttctcacccgatggtgaaacgatgcatcgagttggggttatctctttacggttccccgacgacatcgaatcaggcggtgattccatgcccctctctgaaaataggacccggggacagcgctcgctcgcacacggcaaatgaatacatttgtttggaagagatccgggaggggattgaattgtttaaatctataattcaatattttgaattatagatttaaacaagctaaaagttaaaaactaccccctctggctcccccttacacagggggaggatgcgctgcattgggatattgtggtggtttcttgcgttcgtttctcccccttgaaaagggggagttagagggggtggttgaagagataaaagctaaaaactaaaagataagagctacaagttaaaagtagaaaatcaaaaggcgttggctttgtacggctggaatctaaaatttaaaatctaaaatagaatgaagctttgggataaaggatatgatatagatggttttacggaatcatttacaatagggaaagaccgggagctagatgttatgctggcgggggccgatgtcattgggaatttggctcacttgaaaatgttacatgctgtgggcttggtgaacggggaggaatataaatctttacaacgagcattggttgatatttacgggatggtggaaagaggcgagttcgtgatagaagagggaattgaagatgtacattctcagattgagttattgttggtgcgggaatgtggggatgcggggaaaaagattcacacgggacgttctcggaatgatcaagtgttacttgatttgaaattatttacccgagaggcaatattcgagacgttggaacatatagaacgtttgtttgatttgttgatacggcgggcagaggagaataaagatgtgttgattcccggttacacgcatttgcaggtggccatgccttcttctttcggcttgtggtttggtgcttatgccgaatcgcttgctgacgatttgttggcgttaaaggcggcttacgatatggtgaacacgaatcctcttggttctggggcaggttatggctcgtcgattgctttgaaccggcaaatgacgactgatttgctcggattttcaagtttggcttataacgtggtttacgcccaaatgcaaagaggaaagatggaaaagaacgtgttattcgggttggctgccgtggcgacgactttgggacgtttggctgctgatgtttgtctttttgcttgtaataatttcgggtttgtacatttgccggataagtacacaacagggtccagtatcatgccgcacaagaagaatccggatatattcgagttaatccgagcgaaatgtaatcacttgcagtcgcttcccatgcaaatggctatgatctgtacaaacctgacttccgggtattttcgggatatgcaattgaccaaggagttgtttttacccgcttttcaagagttgaacgattccctttttatggctcatctcgtgttacaggaaatggaagtgaaacgggatgttttatgcgattcccgttatgcctatattttttccgtggaggatgtgaatgaacgagtaatggccgggattccattccgggaggcttaccgggaaattggtatgcaaattcaagaggggcattaccgtgatgggttacgggagattcatcatacacacgagggaagcatgggtaacctttgtctgccggagattaaagataaattcgagcaaagagtatctggctgggatattactacggttcgtgaggcggtagaagacctgttggggaacaggtaatctacattttgggaacaggttgtagggattttttccacacttgttctacatctttccacatacttattctttcaatgttgttgtgcaagtaattgatatacataactatgtttcgcaattacgatttctgttcagcgatggcatacaattctctatactataagcaaatggttgaatgattaaaattgattggttatgggaatttgtatattttttatcgtaatagctatttcgggacttttgttaccgcatttcttagcagaacctgaaatgaagtagtgtgaacctaattatctttatgatagacaatgattaatataaatacgacggatatacgtcaatatctgttagtaagagcgggagttttattcgtgtagttggaggtttgaagagatttattacatttgtttctagcaggtatctcttttttagagggttacctgctttcttttcctaaattccgttaaaaacttttttgtttagtcgattaaggctattttcgtgttagaaataaatcgacttatggcaaagattttaatcgtggatgacgatacaacattttgtatcatgttgagaaaatggttggaaaaacgtggatttgaggtagatactgctttttcctacaaagacgctgtaaaacaattggataaagcaggatttgatctcgtgttgacggatttgcgtttgccggataaggatgggattgatttgctccgggtgatcaaggaaaaaacaccggaaacacaggtacttctaatgacggggtatgccgatatacagactgcggttacagcgattaaactgggagcttttgactacgtggctaagcctgttatcccggatgagattcttaaaaagttacaggaggctttgaagttggaggctggtcctgttgccaagtctattcctgcgaaagcgaaaacgacgagcttttcttatataaaaggagtgagcgagggtgccgaccggcaatatgaatatattcatctggtagggcctaccacgatgacggttttgattaacggggagagtggtacgggtaaagagtatatcgctcgcctgattcactcgatgagtaaccggaaggatgggcctttcgtggcggttgattgcggggcgataccgaaggaccttgccgcaagtgagttcttcggacatattaaaggttctttcacgggcgctgttaccgataaacaggggtatttcgtgaccgcatcggggggtacaattttcttggatgagattggtaatttgccttatgacgtgcaagttcagttgttgcgcgcactcgaagagcgaaaggtgcatccggtgggtgggaatgttgatattccttttgatgttcgtattatttcagccacgaatgagaatctcaaagaggccgtcgcaagtggtcgtttccgggaggatttgtatcatcgtttgaatgaattttccattcaggcattgccccttcgggagagaaaagaggatattctgatttttgccaatcatttcttggataaggcgaacgaggagttggggaaacaagtggctgggtttgatgaggaggttatgcgtatttttagaacttactcgtggccggggaatttacgggaaatgcgtaatatcgtgaaacgggcgacgttgttgtgtatggggagtttgatttctaaaacttgtttgcccccggagttggagcaaaaacccgtggagcctgaaaagacatctacaacacggcgagagatggaaattgaactgatcaaggatgccatgcagaaatgccggaataacaagagcgaggctgcccgtatgctccagatagacaggaaaacattgtataataaattaaaaagtttcggtctggaggacttatgagatattttgagagattattggcgtgtttctttttccagtaattggagaacatcgtttccttcttgtaggatcttttcaatattctctcttattttattttcctctgtatccaatggcattttttccaagaaaagcaacgagggaatgacatcgttaattgctagttgcttgaacatgggtagcattttgtgtgctaacttggcaatctgttccgtttcatgtgattccagatgttgggccaatagctgaaaattggtcttgcaatccgatataaaagacccgataatttgattggcggcatctttatcgttatcggcaaagaccatgatcatgtctaaattgtaaggggcgtttttatcggaggtttgtgttgtcggttgattcatctctattgcgcatcctaataggtcgtttaccctgctataaagttgttccggggtatatggtttgtttagataagctgaaaagcctgcttcttgatactccttttcgtgcatatcgtcacgggcagacaaagcaattaccggaatgttttttatttgttggtttggggattcacggatttgttgcacaagttcgaatccgtccatttccggcatctggatgtcggatagaacaatattataattccctttttccaaacgggatagcgcctcttgaggatgcgtacatgtatcacattgaatgcctgcttttctgagtaattctgttgtgacggtcaattgaaggatgtcatcatcgacgataaaggctttcatcccttcatgcataaccgggagtgaagagggtgtttctgtcggttgggattcctgtgatgtggcctttatcaacgggaatttaaccgtgaaggtacttccctcgccttttttactttcgagggttaattcaccatcaagtaaatggacgagttgtaatgtgattgttaagccaagacctgtaccttcggccccgttgttgtgctgcggggttaggcgggtgaattctttaaatatcaattcttgttcttctttcgtcattcccggtccggagtctttgattacaatgataaactggtcgtcttttgtaccggaaataaaggcggataaagaaacttttccttcccgggtatattttatggcgttcgataggatgttaaccacgatttggcgaactttcatggaatcaccaaggtaaagtccgtttaggacgttgctaatatcgcttttcaatttcaggttcttttgtgccgctaaagggaggaaactatccgccgtctcttgtaacaggcgtcccgggttatatggaaccgtgttgatttccattttgttggattccaatttggagaaatcaagcatattgttggcaagatgcaggatatgttcggcagaccccttcatgtttttgagaaaatagtgctgtcgctcttccagttgggtgttatttattagttcaatgtacccgatgatggagcttagaggggattttatgtcgtgagtgacagttagcatgagtttctcccggttatgtagtaaccgttccgtgtatgtttttgccgcttctagttcccgcctgtatcgttgactttgcgtgatgtcattgataataagaacgacgaaaaagaccactagtacgcaagcgatgattgcgatccaggatatagttctggtgagatgatgcgtcgtgatttgctgttgttctaagcgtatcatcgtgttttcgagttcttctttttcaaggtctttcagtactcgcttgaggcgttccgtgatgtgttgaccactctggataacgatatcctctcgccgggagacttccgcatcgatctcttctttttgctgctggtattggctccatgaatcccgaattacgttcattaatgtgtccgtgttgttatttgttgtgaccatactgagcgtgtcaacgatgcgatggagggtcgtatcgacttttaggatggaatctctttttgttcggaataatccttttctttcccggatgatatagttactgtcaataacggtaataatcttttcccggagatcggggatgacatctgccgaatctttgagcgtacctattttttcaattgttttgttatagaaatcttcgggtatatagtattttttgacgtaatacaggtctttcaaattctcgatacgtttgcctaaaagcgtatttatcgtgtctattcgcaggttctgttctgagcttatggatagatttttcaaggtatccatattatccttgatgtcctctatcaatttcatatacgtgtcaaaattcttctgtgtccccgtttgggaaaaagcgattccggtattttctgcctcgtatagtttggtgagcgtgttacttatgatgaatagtttttgttgcatgacgatttcatcattccctttttgggttaaggcaatagtttgtttgtagataaagacaattgcaattgctcctaacaagagaattaggatatatcccgtgatgagtttgagcttggtaaatttgaaaggtctttgcatagcgaacagatttatagcaaatgtataaaaaaatagtcaaccaattaataaggttgactattttagacgtgccgatgtactactctttaaagttcgtttttgtaaaatgaataagtctcttctataatttctggtgttgcggcatccaattgatataaaatctcccggcaaaattccaaaggagcattaccgttagccgttacgatgttattgtctcttacggcttgatcgtttatgtaattagcttcacccgtgtactgggtacccgcatattgtttgaggtaatccagtgtgttacttgtatgtttcacatggttgaggaagccatgcattcctagatacacggaggcattgcagattccggcaaccagtttgttttctgcgattgctttcttcactaatgatgcgatggggttcgcctcgggcaaaaaccagttcataccgccgatgagtataagtcctgcatagtcattcggcaggtcattaatatcgtaatccggcaataccctgaacccgcctatcgagctgatgggatctttggatagagataacgttttcaccttgtatttaatcggacatcccggtttgacccccatatttagacaggtggagatataagcaccttcccagtctgcaaaattgtttagcagtacaaaaatcacttcttttttatccattcttttaatatttggtttattctatttgccagatcgaaatctaatatcatctgtattctttctacaaatatagggaaaaacaagagtagttcgttatttggatgcagattggggcatggcaaaaaagaaccctctataacattttatgttttagagggttgtgtagtaaagtggtgatccccacgggactcgaacccatatcaaaggaaccggaatccttcattctatccattgaactaggggaccatattatccgattgcaaagctaatcaaatttttaaaaaaagggagcaatttgctcccttttttaatgtataatagataaactattttacttttttacgagtagcgtagcttatacgtaaagaatttgctttacgcaattcttgttttacgtcggttacgatacccattttcgtaaactgatcaacttttaagttattcgtgatcatattccgttcttcctctttacgagtttcttgttcagcagcaacgaaactactgatttcatttacgtttgccagcttatcattcaactgaatacgaggttcacttccgtaagtagccacgtactggtctttcggttttccgataaagatgttacttactaaagattttttctctagtttgctaatctcttttgcttcgggcataccgttatcaaccatcacgagaacttctcgcatcgtggtactaaccatgaagaagaataatagcatgaacacgatgtccggtagagacgctgttgaaatagcaggagtctcttttccgccttcttttctaaatttagccattacttctttcctcctttcccgatgtttttaggttcggcctcggatattgcggtcggaacaagttttctcacggcgtccatttgttcttccgtaagttcactatatttcttaccccatttttccatggcttttatatccctaatttcattatatgctgctgtcaattcatcttgaacggcaatatacattttgtatgaggtcccccggtcactttgtagagagataattcctcttgaaacttcagcttgaccaaagaaaggaatttccttaacaactttactcggtaaatcttctctattttgcgggttcaaaatgaactctttagccttttccttcaggttctcaatttgcatcagttccccgttcacggccaacaaatcgttcttatttaccaaaacttgtaagatattacgtttggcaacaggaggtgcgataacttgatctggtggcggcatgggcggtaaccgtctgaataatcccgaatccacatccattgttgttgtcatcaagaagaatgtcaacagcaaaaaggcgatatccgcagtggaagaggcattaatctctggtgttttttttcttgccataatctcttttttattcttcaggaaaattatctaacgcgtctaataatttctgttacaacaatagcaccgatagctcctatacctaagaaataggttgtgattaggatggtatccgtgaattttaaagttcccggaacgttatctgaaccgctgtatcccggaatgttcatgattgttccgtcagacatagagtaagcgattaacacaagaacgatgattcctgcgagagcaataaagctcttcattgcttctttaggtctggtgaataatctggcaatcgggaatactaacgccgcaacaatagcaacgccaaacagtagatatgaccaccatagtagttgttccgtgtataccggggtaacatattgtgaatttggaagttcacctccaaaatagaataaccccagcaacacgaccgtaatgacgaacattacgatggtcacaatatttaatattttgtttattttctgcatggtttagtgtttttgattgtatttgacaagaatgtctaataaagttacggaagcgtcttccatgtcattaacaatactttcaatcttagcaatacagtagttgtagaatacttgaagaatcatggctacgatcaaaccacccacggtcgtgatcaatgcaaccttgatacctccggccaccaaagacggttggatatcacctgctgcttgaatcttatcgaaggcgtcgatcataccgattacagttcccaagaatcctaacatcggggctaatccaataaacaaactaatccaagacattcctttttccaaaagtcccatttgaacagaaccgtatgatacaactgatttttcaaccatgtcaatcccttgatcatagcggcataatccttgatagaaaatacttgcaatggggcctcttgtgttacggcaaacttcttttgcagcttcaactccaccgttgtttaatgcatcttcaacacttacaattaatttctttgtgttggtagaagccaagttcaagtaaataactctttcgatagcgatagccaaaccgaagatcaaacacaagataacgaaactcatgaaggcagcacctccctcgatgaatttttgtttcaaggcagcgtggaaagaagtactttcgatttgtgactcgtcttctaacacggtaggatctgtagtttcctcttcttcttgataagtttcagtggtctctgtttgagtcgtttcattctcttgagccattagcatagatgatgctccaatagtaagcattcctaaaactgctattagtgcaaataattttctcatgatcaatttaactgatttttagtttattaataattaaaatttaactctataatgtctatttaagctgtttcgttctcgttttacaccgtgtgccggttaaaatcgggcaccaaggtataaaaaaaatgttaaaatccaatatatttgggggatatttctcctttcaagccgttatttaaatatttttttatttcgttagtgtctttatatttgcccagtacatacatcattttacacacagcggcttccgtggtaatgtcgtgaccactgatgactcccgcattaagtagctctctacttgtttcatacttgcccatctcgacgcttccgccttgacattgggtgacgttatacacgaaaattccctttgatagtacttctttaaccttgttaagaaaaactttattcgtgggagcgttgcctgaaccgtatgtttccaggatgattccttttaacccgggaattcctgttaccgcatcaatcacttccggcctcatgcccgggaatattttcaatatagcgatattcgtgtccacgtcgcagaatgcacttacgagttcggttcgcggggtgtaatcgattgcactataatcgtaatgaatatgtatcccgatgtttgccaatgccggataattgaatgactggaaagcatcgaaactttctgcgtttatttttgtcgtccggtttccacggaatagtttatctccgaacaggatgcagacttccgggacaatggccttttcttgatcgtaagcggctgctatttcaatggctgcgatcaggttttctttcccgtccgtcctgattttcccgataggaagttgtgaaccggtaaagatcacgggtttggtcaagttatttaacatgaaactcaaggctgcggccgagtaggccatggtatccgttccatgcaggacaacaaatccccggtaatcgtcgtaattcttcaagatgattgaacagagatctttccacaattgtggttgcagatccgaagaatctataatttccggtaaagtgtaactgtctatcgtgaatccaaattctttgatttccgggacctcgcaagcgatctggtcgaaattgaaagggcataacgctcccgtttcagggtcgtttaccatcccgatcgtacctccggtatatataattaacacgggttttgtcatacgcactaagttaaaaactaaaacattacaagctttaagctccctctgtacttttcgtcagtgaattacctgtctgtatcttttttatgaacagttcggactaccgacgtgcaaattaaataaattcattgcattattcgttgttatttcctcgacttttttcgagtctatccctagaatttcagcaattttagcggctatacacggaatataactactttcattgcgtttaccccgatagggaacgggggcaagatagggggcatccgtttctaatacaaggtggtctaccccggttttctccacgacttctgccatggatgattttttgaaggtaactacacctccaatccctagtagaaaacctaaatctattgctcggcgagcatcttcttccgtgccggggaaacagtggagtatgcctttcatgttatagtgttgttttttcaacacagtaaatatttctgttagcgagtctcttgaatggacgataacgggtagattcatttcccgggcgatatttaactgccgctcgaagacgataacttgttctttgtaaaatgttttatcccagtaaagatcgattccacattccccgatgccgtatattgtagtttgtccgagtaatttctcgaaaagttgtatttccgttttataggattcgtttacggaagttgggtgaactcccagtgtgggatacatcatgtctgggcaggcttctgcaagtgataacatggattgtcgggtagtactgtcaatatccggcagtatgatttgtcgaacgtcagcggctaatgctcgttgaatggtctcttccctgtcttggtcgaactcttcggcatagatatgtgagtgagtatctataaacataagtgtaatataaattttgttgttttttcttacctgcaaaagtagtgaattatattcttaaagtttgccttgggcttgttttgggcttacatctgtttgttattataaaaatatgtgttcgttatctcttcgtttctagaaacgaagagataacgatactataacgaaagggtaacgaatggatgtgagacaatgtattgattatcaattgatgttgagtgtggatggtattcttgagaaatggagttgaaagaatgaggtatgcataagtcaaagtggtgtgttgaatttacggttgatttattaccgtgagaaaagtttgttcgttatcatatttttcagtaggtttgcctttagtaatgaaggtttttgtatgggtatagtggacaatgaaaagttgaaaattgacgaactgacatttaaaacgttgtttgatgaattttatcaagccttgtgtgtttttgcgtctacttatttgaaggatgattccttgtcagccgatattgtccaggaagggtttgtgaaattttggaacaaacgggaagggtttgataattattataaggtaaagtcttttctttatactactgtccggaatgattgtttgaattatatacgcgatcataagttaagacgggaagatctttccgtgctggaatccgttgaattttatacagagacattggtagaagaagaggcctatcgaatgttttataatgctgtggaatccttacctcaccaaactcgtcaagtgattttgttgtctctggatggcttgaaaaatagcgagattgccgggcaactgggaatagctgaaagttccgtacatactctaaagaagattgcgtataaaaaattgcgggagatattgcgggaatattattatttggtttttattttcctgttgagcaaatagttgatttttagtgttgtttgttttttctttcaaaaaagtgaattcttcgttccccataaattctgtttttagtgttgtaatgataaagaaataaataggtcgtagaaacttagaatgcgatggtttaaatcttgataatacacgaaaatagaattacgtggaggataaattgatatggaacgaatggatataaataataagaaattggtagatgacccatttttgctagcttcttggattgcgaaatcgatggccggagaattgtctgatgaggaattgcaattgctagatgaatggcgaatgacttcagcacgaaaccatcagttgtatgaccgaattgttagtcgggaaagaagagaagcgaaacgaagacatttcacggcttttgataaagtttccggttggcaggggtattcgaaaaaattaaaggaaacggagaagaaggtgaaccgttggcgtgtttttttgcgttatgcggcaattttgttgatccccttgagtgctactgtttatggcgttcttcgttcgggagaagagaccgtctctttggcggatttaaatgcaatcactcccgggggcactcgggcggagttggtgttaccttcgggagaggtggttgatttagttgcgaaatccggggttatatcgcgtggggaaaatacggtcattaataacgaaggaaaaactctttcctataaaagtataggaaatcaagctccgatggactctttaagatataacgaggtgatcgtgccgaaaggaggtgagtatcaattggtgttgagtgatggaacgcttgtttatctgaattcaatgacgaagattcgtttcccggaacgtttttctgaaaaatgtcgtgaggtagaagtgtgtggagaggcttttttcgaggtggcggaaaataagcgtgttccttttgtcgtgaagacggatgcctacgagattaccgtgctgggaacgaaatttaatgtcacggcatatgctgacgaacaagtggccacgacaacattggttgagggggcggtttccatctctggcaaatgtatcggggaagcaaaagcattacggcctaatgaacagttcgtgctggatcgggtgtccgggagcgtggagatcaagaacgtggatgtaaattattataccgcttggaaggatggtatgttccggttccgggatgttcgtctggaagagatcatgcatgtcgtggaacgatggtatgatatgacagtcgtgtacgaggacgagagtgtcagggatttgcatttcggttttaacatgagtcgtctcgaaacgatagagcccttgttgaatatctttgaattgaacggtaaaataaaaataacgaaagaaggaaaagtactgaaaataaaacgaggtagataaaagcaggaaatgctggaaccatttcctgcgggaattatttcgttaacattgagataattattaactaataattgggagaacaaatttatggaaaattttctaatgtttctcaggtgcaaacgtgagaaattacaaaaattatggcttatgtcgaaatggacttttttatttgtttttctagggataataaacacgcacggaacagtttattcccagaacgagcaacaggttacaatctctatgaagaatgcctatttaaaggatattttgtgggagattcaacgacagaccacgtttgttttcatgtatcacgaggaagatttggataaggtgggaaaagtgaatgtagaggccaaatccttaacggtagaaaagattctgcgtgattgcttgaaaggaacaggtttgacgtatgttttccagaatgaggtgatcgtgctgaaacctttgaatgatgaaaagaagaaagaaatcaggattgtcggtaaggtaatggataagggaaagatgccgttgccgggggtaacggtggtggtgaaagggacaaatttgggaacggcaactgatagcgagggaaaatacaggatggttttacccgccatgcgtgatactaatttcgtgttggtgttttcatttgtcgggatgcggacacaggagattaaatatgtagggcaggattcgataaatgttgtaatggaggaagatcacaagaaaatggacgaggtggttgtgacagggtactccaatattcgtaaagagagttttaccggtaaagctacgactgtaactaaagagcagttaatgaaagtgaattcaaaaaacgtgattgcggcgttacaaacgttcgatccttcattccggatcaaagataataaattgtggggatcggatccaaatgctttaccggagtttaatatccggggagagacttctatcgggcagacgaaaggattggatgtagaacaacagaaaagaacacagcgtacgactttggaaaataatcctaatttgcccgtgtttattttggatggattcgaggtggatgttcagaaaatttatgatttggatgtaaatcgcatcgagtcaattaccattttgaaggatgccgcagcaacagctatgtatggttctcaagctgctaatggggtggttgtcgttactacagttgctcctaaaccaggagagatgcagatttattataacttttccggtaatgtggatttcccggacctgtctgattataatctttgtgatgcggctgaaaaattggaggttgaacgtttaagtggtttatattcatctgatgatccggagaaacaaattgaacttacggctcaatattataagaaacaaaatgctattttgcgcggggtggataccgattggatgtcgcaacctttgcggaatgcctttggtcatatgcatagtttgaatgtatctggtggggaggagagcatcaggtatggtatagatttgaattataatgcgagtaaaaacggtgtgatgaaaggttctttccgtcatatttatgggggaggattaacgttggattatcgtgcgggaagttggttgcaattattgaataatatttcttatacggttacagagtctgaggattctccttacggacagtatgctcaatatgctgaagcgcagccttatgctgagatatatgatgagaatggacgcttgttgaaagaagtgcaagggactactgtttctatgataaatcccttgtggaaagtggccaatttgtcaactttctacggcaagatgaaaaaccgggatttaaccaataatttccagttgaacgttcatattatggaaggattgatgcttaaaggccaattaggtcttcgcagaacggatggtcgtacggataattttaaggatcctgcagatcctgtatatgatgtaactcctgccgatcagaaaggagagttgagccggcaagaaaatgataattggagttggaatggaaaaatgatgttttactataatcatgttttcggcaatcattttattaatgcaacagccggaggggagatttctgaaagcaaaacggagtcgttatcgtatgtgttaaatggtttccaattggggaacatgcatgaacctcaatttgcagccactcaggccagaccggtaaatgtgtcggaatctaaaactcgtaagataggttttttagcttccgtgaattacgcctataatgatatttatttgttcgacggctctttccgtttggatggaagttccgatttcggttcggataagcaatttgctccgttttggtcagtaggagccggattgaatattcataattatgatttcttaaaagggcactggttgatcagtcgtttaaaattgagggcttcttacggttctacaggaaatgtgggattcgctccttattcggccataacaaccttccaaacagcaacagatgcatggtttttcacggggcctgcagcttctttgatggctttggggaattcgaggctgacttggcaaacgacatacaagttggatgcaggtttcaatataggtttactgaatgataaaattactttggagggatcgtattatcggaatgaaacagaagatttgatcgatgacgtgaaaattccggcttattccggttttacttcttacaaggagaattccggagcaacgttgaatgaagggtttgaagttgcgttgacttccactcttttccagaataaagattggatggtgacgtttatggcaaatttatcttctaacaggagtaaaattactgaattgagtgaggagatgaatgcttataatgaaacgattcttgccgaatatgagaaagaaaattccatgtacaaagatgtgttaagcaggccgttgatattgtattatgaaggaaagtccttgtctgcgatctatgcggttcgttccgagggaatagatccggctaatgggcgtgaacgttttgtaaagaaaaacgggatgtcgacttacacgtgggatgctaatgatcaagttgttgtcggggatacggaaccggatgccaaaggttctttcggtatcaatgtggcatggaaaggaatcacattgaatgcttatttcaattatcagtggggaggacagagttataattcaacattagcggagaaagtcgagaatgctcagattagcacgcagaatgtggataaacgggtgctgtctgcaagatggaaaaatgcgggagacgtggttccttattatgatttgagtaaaaatccgacacagaatccgacttccagattcgtgcaagatgataatcgtttggattttacaagtctttcaataggttatgattttagccgtcagttgatttctaagtggaaactcaaaagtttgagcgtgcagtttagcgcgaatgatttgtgtaaatggagaagtgtgaaagaggaaagagctataaattatccatttgcgagaagttttaatttttcattaaatgttggattctaaatggtatatggcatggaaaattatattaaaatattagcagttgccattgttttggtttttgcgggatgtaaggattggttggatgttacaccagcagggcaagcaactgaaagtgatttgtttagtacgggtgacggttatcggtctgttctgaatggtttgtataagtcaatgggtaagccggaactttatggtcggaattggtcttatggaatgttggattgtatggcccagttatataatttggagtccggctcattcaatgacgagatgtgtaaagctgcagccaaatatgaatacacaaacacgcaagtatcttcaagtatagagagtgcgtggggaattgcctataatattattgctaatgcaaatgacttattgcagaatatcgaaaatgcttctaatgatatttttgcggaaggagaaatggaaaggaagatgatcacgggagaggcgtatgcttgtcgggccttgattcattttgaattgttacgtttgtttgctccggctcccgtaaatgatgatggacgtgcgtatatcccttatatcgaatcttatccggtgttgtcagccacaaaacttggagtgaaacctgtgttagaaaaagtgattgcagatttggaaaaggctagagggttagttgctgtttacgatacaacaataaatggacagggaattaatttatccggcacgggacgttttaataatgattttacttataattatcagactatatctgggcaacagatcgaggattttgatgctgcattgatagatgatttctttaaaggacgggggtatagaatgagttataatgccgttactgctttattggcgagggtttgccagtatgcgggacgggagcaggaagcctttaattatgctgatgaagtggtaaaagcccatgtggtatttagagatggttcgaagaatttgatgtataaggatgattatagcggtttgacacaaggttggggtaataatgaagcagattttaataatcgaaaagattataaaacgatgtctaatttaatatttgctgcctataacagtttgtcttatcaaggaacaggtagttggttgagtgcggattggaaaggtggagtttctccgaattggtttcaaatttcggaaagttattttttacatggaggtgttgatgagaaaagtttggatcatcgatggaatcatatgatttttttgggtagtggcgcctatcctgtttctgctaaatattttattcctactaatttggatacgagagataaaacagtgaatttgtttcctgtaattcgtcttaccgagatgaaatatattatggccgagtattatgcacgtaacgggaatgtaggtgatgcctatcgaattttgaatgaaatccgggagaataggggaatttatggaagttcacttggaggatcgacttggaatgaatttgagcaggaattactccatgatgcgcgtcgcgagtggatttctgaaggacaattgtttttcttgtataaacgtttgaatgcggcgattgtgaatgataaaggaacattgcgtcctatgactcttcaagaaagtatgttccctgtgccagcagatattaaataatgacataaactttgaatcatgatgaaaagatatttatattttatgataatgttgatgtttttgtccttcttttcttgtaatgaagatgatataaaagtttttgatgggcaggctcagctttattttgataaattctatatgaatgcccttcaaccgggaacggagggggcagactcgactgtgatgtcgttcttcttttatcccgatgatacgaaaacaatagaagcagaggtggttgtgaactattccggattaccgttaacggcagatattccttttactttaaaagtgataggagagggaacaacggctaatgaagatgagtatgatttggatgaccagtatgtgtttcatgcaagacctctgttggaagggcaattggatattcaagatacgataaagattcggttgaatctgtccgagcggttaaaaaaaatggagaagggggtacggttgtttgttgagttagtaccaggcgaagggattggcttgggacagtatgaacgtcgtcgtgccgtgataatttcttcttatgtggcagaaagaccggattggtggaaagagaatggtgaagttgaacttacgcttttagggaagttttccaatacaaaatataagcttttcgttgaacatgctgatcccggtatgacaatggatgaaaagatgatagaggaacgtccggatttggctatcggattggttttaaaatttaaagagtggctgattgccaatcccggacaaaaagatgagtatggtaacgatataacagttgtgatttaatgattaaaagttgctattatgagaaagattcatatattattttgtttgtcgtttttcttgatatttggatgtttagaggatgaaggaaattatgattatgacgatattaaggagcctaaatggcatacagatcagccgataagcgtgtatgcgacagagcataacgtgatgaaactgcgcggacatgatgcttttagatgggatacggattctgtttcgagggagcgggaagtacgctatgagtggaagttgaatgatgtggttatagctacagaagcggatattgatattccggtggatagcgtgattaaatggacaaagatggaagaactttgtgctactgacaaatgggtaagaggttcatttacggttatcgataaggagtttgaaactcatttcatgaaagtggtttctttttttataacaccgtatcgtagtaatggagactggttcgttttaacggaaaaagaaggtgaaggagaatgttattttgtaaaaagaacatataatcgggaggaatcgaaggatgaatttgaattgcaggattcttttagtgaaataaatgcattgtcaatttccggcaaacctgttttcttgggatatactagaacggctaagaatgtgggaccgatggggtcgattacgattatgactgacgaggttgcttatgaagtggatgccgctacgttcgaattacattccgaactgaaagatttgttcggcggaggagtcccgtccgggttttctccggttgcgagggttgatgcgtgggaagctgataggggaacagggttatgtacttttttagccaataaagacggtaagctttacagacggcaattgtcaaaaaataatttgggagggatgtttatcaatactccttacgaattggatgaaaaagggtataaaattacggaattcggtacccgtttgtatggatttacctcgatcccttgttgggatgaaaaaaataatcgggtgattatgattgctttcgcttcgaaacaggctggaagtggctggggagatccctcctatttggcgactagtttgatccctttaaaaaatgatggttccttaactaattgtcctccggtttggggatttgaaagtggaactaaagtattgaatatgggatatatgaagagtgcaatgttgaattttacgacaagtcttaatgtatattctgtaatttataatgatgcatcaggaaagacttggtgtggggagtttataatgaatccgtctgacggttctataaagcagtctgttgctccgatgcctcctttttatcctgagggtgcggattctcgtgtaatagaatgccctgccaggatttctgatgatgctttgatattagttacttgttcgtcatctaatgcaaaagctaagaatcaagtggtatatacggatggcaatcatgtgaattatttacttgttgctagcgagtatgcgagtaagccgatgattacggattttccggaaaaggtgacctatatcggatatggaacctctgatgttggtgcgataggtaagtatgacttgttagttgtcggaggtgaaaacggtacgttgaagttttatgacatctcggatagagatcggccgaagtgtgtggagacaatgacgtttgacggaaagataactatggcgaaagagatggccacgggagtgacgggtgtagatgaatattaacagaagtttgtataaaatcatattgtatggaagaatcaattgtaaaggtggagcatttgtcccatcgctatagtgttcagtgggcgattcgggatattaattttgaaattacaaaaaatggtatttatggattactcggctctaatggagccgggaaatccactaccatgaatattatgtgtggggtgttaaaacagaccgaaggggatgtttacataaaagggattagtattagtaaaaatcctgtggaggcgaaacggcatattggctttttgccacaggttccgcccttgcatccggatttgaccgtggaggagtatttggagtattgtgcggaattgaggcatatcccggatcgggaggtaaagaaggcgatagaagcggttatgattcgatgtggtatttcgcattttgcgaaacgagtcatacataatttatccggaggttatcagcaacgggtgggaatagctcaggctattattcataatccggaattggtaatttttgatgaaccgacgaatggtttggatccgaatcagattgtagagattcgtcatttgattaaagagattgcggaagaacgaaccgtaattctttcaacccatattttaccggaggtgcaagcaacctgtgattatatccggatgatcgaacagggaaatatggttttttccggaactgtggaggaatttgataactatatacaaccgaatactctggttgtttcattgggggcagcccctttagtcgcggatattcaagagctgccgggagttgttcgtgtagaggaattaggaggtccgagatttcgtattcaattttcggatgtcaaagaagcgatgaatagtattgtggaagctagttatacgcgggattggcaattaatggaattgcagcaggaaaagagttctttggataccatttttgccgaattgtccaaaaaatagtattaaattttatttgcagtagaaatgaaaacgatatttaagatagcgaaaacggaattacgggatttgttttattccccgattgcttggttaattttgattatattcacgttccagactggaatgttgtttaccgggatgatctcggatatcgtgcgttcccaaagtatgggagggcatggtgcgaatcttacgctaggtatttttggcggccaaaggggattactggttgcggtacaatcttatttgtatttatatattccgttattgacaatgggattaatgagcagggagttgggaagtggttctattaagttactttactcttcgccgattacgaatactcagattattttgggtaaatattgtgccatgttggcatatggattggttttaatcggggtgttgttggtttatgcaatttatggaatgtgtacgattgagaacgtggatattccggttattttaacagggcttttgggtgtttacttgttattatgtgcttatgtggctattggtctgttcatgtctagtttgacttcttatcagatcgtggcggccgtggggacgttagctgtacttgcggtattgacctatgtgaaaggaatgtggcagtccgtaccgtttgtgcgggaaattacttattggttcggtatgacggggcgttctgacaattttatgaacgggatgatttgtagtgaggatgtgctctattttattgttgtagtgatgttgttcctgttgatgaccattgtacgtttacagggaaggagacagaaggtaagttggttaatgtcttttgtgaaatatgcaggcgtgtggggggtagctatagtattggcttttgtgtcttcccgtcctgttttcaagtgttattatgatgctacgcatacgaaaataaatacattgacgcctaatagtcaggaaattattaatcagttggaaggaggattgaagattacgacttatgtcaatattttggataagtataattggttggggttcccgaaaaactataatgatgatgttcgtcgttttgagcagtatactcgttttaaaccggagatagatatggagtatgtgctttattatgatacggttaaaaatgattatttggaacgggcattcccaggaatgagttatgaggagaaagctaaaaaggtgatcgagatggagaaattgaatccccaaaagatattgaccccggaacaaatccgtgcgaaagttgatttaacgactacggagggaaatcggacggtacgcttgttggaacgagaatccggagaaaaaacttttttgagattatatgatgattaccagatatttcctttcgaatcagagattacggctgctttgaagcggatggtaatgacattgcctacaattggttttttgtccggtcatggagagcgggagacagatcgaccgggagatcgtaattattgtatgtttactcatttgccgatgatgagacaggcgttagtaaatcagggttttgattataaagatgtcacgttggaaaaggaagttccggcagagattaacattttggtcatagctgagatgcgtgaaccgatgacggagatcgagaaagtaaactttgataaatatgtcgctaggggaggtaatttggttatcatcggggaacctggacgtcaaggagtgatggggccggttttggaaccattcggggtaaaattagtagatggatttttgatacaaccggaaaaaccaaaagatcctgaacaagaaaaacaggataatgttaatcttggtccgtttgccggttttgtagctccaaagaatccgatagatttaattgtgactcagcccacgaaagaagcagaggagatgtcttatgtttttggaatgatgcgtcctaattatgtagcggtcatgcctacggctgctggattggaatatacgacagataagggatttgatgttgtaccgttgtttatgtcggattcaacttgctggaatgagttggagaatactgagattgtggatcaggaagttgtatttaatccggatgcgggtgaagtgcaaaaatcttacccgttagctttggcattatctcgtaagatgggagaacgagaacaaaagattattattttgggagatgcggattgtttgagtgacggagaacttactcgtaatagaaatcctttatgggcagccaattatgtaattattcaaggtagtttcttttggttgtcggatggggaggtgcctattgatgtaagacgtccgtatgcaattgaccggaaattatttgtgggagagacgggggcggagattcttaattatgctttgcttggtgttttccctggcttattacttttcttggctttgtttatttggttaagaagaaggggacgataggaaatatgttgtatagtgggatccgaccggaagttatttttcggtcggatttttttatttattcctgaaatcttatctttgtcaaaaatcctatgggagtgagaatgaatggtacagagcaagattttgttcatcgtataaatgtaaaggatgaggccgcttttcatgatttgttcacgagattccggaattatctcgtgttatttgccatgcggagggttgagcagttggatgtggcggaggatattgtgcaggagacttttatcaccgtttgggagaataaaaaaacgttcaattcttatcagggattaaaagcttatttgtatgaactggtgcagaataagtgtaccaattatttgaaacataggcaggttgaagataaatacgcctcttacgtgaagacgacaggtgaggaggcagagggggattatagcttgatgcaggaagaaatctatcgggaattatatatggcagtccgggagttgccggaaaagtgtcagagggtttttgagttgcacttggaaggaaaaaagaatgatgagatagctgaaatactgggaatctccgtgttgaccgtgaaatctcacaagcaaaatgcgattcatatcctaaaagaaaaaatgggaaatctcttccttttatacgcctacatctacgagacgtaattttttttgaaaaataattggtttttatttgctactttttgatccctttcttgtatatggtgtaaaataaaaagacatcatggatctgtacgatgaaaatattgcccggttaatacgacattccttgacaggagaactctccgaacaggaatggggagaactggaggcatggttacatgattcggaagagcatcgggtactttttgagaaaattaaaaaagaaattcgtatctcttctgaaagctctcttttctgctcgttgaatgacgaggtggcttggctgaaatttaaaaccaccgcacgagaaaggaaaagacgtgtctatgtcaggagaatgttgacatacgcggcggtaatcgtgttacctctggcagttgttgtgggcttttggttcttgagtcaagaaaaggacacgtttccgatggcttctgaacgtgtggtcaaaattactcccgggagaccgcgggctgtattgatcacggccgaccaaaccgttcatgagttgaatggtgtacaggagcagcgagaaatagaagtggagaaaggagtgatgatcaaacaaggaggagctaatctggaatatgattctttggtagccccggagcaagaagtggcgttagccatgaacacgttgaaagttcctcgtgggggagaattccggttaaaattatcggatgggacaaatgtctacttgaattcagcttcggaacttaaatatccggtgcgctttgatgaaaaggagcggaaagtttatttgtcgggtgaggcctattttgaggtgacgaaggatttgaatcggcctttttacgtggtgatggaagaggtccaggttcgcgtgtacgggaccgaatttaacgtgaacacgcatcaaccggggaaagttcacaccgtgttggttgacggtaaggtcgggatcaaaaaaagagggatgaccgaggaggtcacgatgaaaccgggacaattagccagttttgaccgggaagcgggaacgttcgaggtgaaagaagtggatgtgcggcagtacgtggtttggaaggacgggtattttacctttgagaacgagagtttggaacagattctaaacacgctttcgctttggtatgatgttgacgtgttttttcagtcagaatctgctaaacaactggtgtttaccgggtatatgaaacggtataatgatatatctgaaattttgaatgcgattacggatgttgtaggagtaaactttacgataaacggaaaaactataatagtatctaaataaaaaacggaaagggttggagccttcccgttgaactttaatgagatcaataggtcgctgttggagagtgacgtattgaaagtttaactgttctaatttacaaatgtatggaaaaaaaacaattatgccatcgattttatcgaaggtatgttaaaaaacttttgatgcttatgaaattgtgtctcttgtttatttgtgttttcacgttgacactttcagctagctcgtttgctcaacaagagcgggttagtcttgacctgaagaatgtgtcggtgaaagttttgttggatgagattcaaaaacagacgagttggtgtttcctctttaatccggagcaaacgaaacaattgggtaagttgtcgttacgggtggagaatgaaaccgtggaagaggtgttgaatcgtattttgaaggatacggatttaacgtttaaatttaaaaatgatcttatcatgatcgtgcctaagaatgaggtggaagatgataagagtaagaaagatatccggattgtcggtcaggtaacagataacaagaaacttccgttaccgggtgtaaccgtgatcgttaaaggtttgactattggtacggcgactgatgggaatgggcgatatgccttgactcttcccaagacggagaagttgtcgttgcttttctcctttatcgggatgaaaacccgagaggtggcatataccggaaaggatacgattaacgtggttatgcaagaagattcagagactttggaagatgtgattgttaccggttatgccacgattgatcgcggtagttatgtcggggccgtgacacaaatacgagcagaggacatacaggtggccggagaggctaccatcgaccagatgttgcagggatgggttccgggtatgtccgttataaacaaaacgggaaaagtgggaggttctcccaagatccgtattcgtggaacttcaaccttgttgggaaatcaggagccgctttgggtggtggatggtgtgattcaatccgatcctctcccgatccccgatgatgcaagtcctctttcttccgaaatggatggattgcgggaaacggccagcaatgcgatttcatggcttaatcctgcagatatagaaacgattaccgtgttgaaggatgcgtcagccacggcgatttacgggacgaaagcaaccaacggggttatcgtaatcacgaccaagaaggcgaaaggggacggtttgaacatatcgtacagtgggaattttagcgtgggaatgaaacctaactacggaatgtatgatatgatgaattctcaggaacacatgagattttctcaacaattgtgggaagatcgggatagttataatcagaatattttgcccatcggttacgccggtttaatccagaaactgcaaaagaaggagattacccggcagcaatttgaacaagagtaccggaaaatggagaggatgaatacggattggtttgatattttattccggaatagttttagccatgcccataatgtcagtatctccgctcaaggggaaaaagtttcaagtcgtttctccgtgggaattaacagtactcggggcgaggcgaaagggaatgatatgaccacattgacggctagttccaataccactttccgtttggataagcggttgatcattgatttgcaattgaacggcagttatcgggaaacggaggattttgcgtttggggtaagtccttacgagtacgcgatgaatacggctcgggatattcctgcttatcatgaaaatggaaccctgtattatcacgaaaaagccggggcaacgagtttttctatcccgaataagttttcatataactataacatattgaatgaacgagataattccggtacggaaacggatggtacgaacttgcaggctgctttgaatttgcggttgaatttgttgaaagatttggaatttcaggcaactgcatcttatgctcttgcaacgaataaaattaagtcctgggcaacggaaaacacgcattacataacccaaattcgcggttacgaggtgggagaagttttgcctagttcggcggaacaatatgccagtgtcttgccgttcgggggattattgcaatcggagtatgcccagacgaaaaactattcttttagaagtagtttagtgtataataaaatgtttaatgaggatcatcgtcttacgttgaatttgggatttcaagtcaattccgtagctcaggaggggaatgcgagcttgcggtacggttatctttactatcggggagagaagtttgccacggttccaacagaaataactgccgcaaacgggttgcataaaaattctagagatcttcatgacgaaatgcgggctggaaccacgattacgacgacgaaaaataacacggtcagtgagtattttacagccgtgtatggttataaagaacgttatattatgaacttcaatgcccgtatggatgcttccaaccgctttgggcaggatgaaaataaaaaatttaatcccagtttatcaatcggggtgaaatggcggattggtaatgaaccgtttatggcttgggcatcctcgtggtatgatatgtttgatatttcgttctcttatgggtggcgaggaaatgcagtggaggccgtttctccttatctgattgcgaaagatggcggtttgaataagtattttcaacagtacacgctgaagatggtttcgttaccttatcctgatctcggttgggagaagacagaagattggaatttgggagtcgatttttctttcttccaaggaagaatgagtgccgggcttagctggtataataagatcagtcacgtgttggcttcccgggaagtgcccattgaaaatggtgttgccaatgcttatgttgatgggacgacgatgaaaaacagcggttatgaactggctgtcagtgttactccggttagaacgaaagatttcacttggtctctttctttcaatacgagtaaggtaagaaatacagttcggaataatcaacgggaaaatacccgggatgattatcttaacgggactgcgattgttagtggagaaaagtacggaactttttacgggtttgcatttaacgggctggatccggctaatggaagaccgaccttcaagaatatggatatagatgttacggagaatgatttggattatttggtgaaaattggttgcatggagccggacatttccggtggtctcaatacttctttacggtataagagattggtattgcgtgctagttttgccatgtcattcggggctcaggcccttcttccggatttctttgccacggcgggagctccgagaccggaacaaaatgcaccccgttatttgtttaaacgttggcgtaaaccgggagacgagaaaatcacgaatattccctcgatccctgccggaaatccgaatgaaataaacattcagctgcctgttgaagggtatgttgcaatgagtccttacacgatgtataaccaatcagacttgagagtggctgacaccgattttatccggtgcaggcagatttccttgcaatacgatttacctgatgcttgggtaaataagattggggttagacgggcatccgtgaacgccagtcttgctaatcctttctttgttgcttttgacaaagcatgggaaggacgtgatcctgaaacagcgaattggcctgcacgtcggacagtttcttgctcgttgactcttaatttttagttgaacggataattgttagaatgatgaaaaacaagatatttattttaggagctatcatgggatcgtttgtgttgggttcttgtggagattttttagaagaagaatcccagagtgaggtaatcccgaagacgacatctgacttctcggaactattgctgggtacggggtatcccgatgagtcgactccgaacttttctttcttatccttgatggatgatgattgtgcgcattttttgacttatgcaagtccgtggaacccggagggaaccgtggaaactgcaaatgctatcacccagttcccgatctattcatggcaaccgactcttgccgattatgatggttacgatagtgagatcaatgaaacggcaagttctaccacgtacgcccagttctattcaaaaatattgggatgtaacgccgtgctggattatattgatgaggccatagggacacaggacgatcgggatcgggtgaaggctgaagcacttgctgtaagagcgttactgtatttccagttggttaatatttatggggaaccctataaccataataaggacgctttaggggttccggttcggttgatttccaatttgacggaaaagaacattgaacgttccaccgtggggtatatttatgaagaggtgattctgaaagatttgctggaggcagcccgtttgctggaccctcttccgattatgcgtaagaatttccggatcaatcagccggccattcatatcctgctttcccgggtttatctgtacatggagaattataaagagtgtattgccgaggtggagaaagcagaaaagcaaggaatcgggttattgaatatggtaaataatttggatgttattctggcggataacggttatgccccgatatcttataataaccccgaggttgaatggcttttcgggccgagtgcggttgcgaatcattgggaatatcaaccgggaacagcacccgctttccgggttttatgggatcaggtgaatgaccaacgttttttggcttatgcgctcaaaactgcgagtgatgacaattcggtgtatctgaaaaaaccaatgagtagttcggagttaggacaatctgtccgttcggcagaagcgtttttgaaccggatggaagcttacgctctttccggagaggaagggttggcgttggccgaattgaatgcattccggaagacccgcgtgatcggttacacggatgtaaatctgagtggtcaggcgcttctggatgcgatccggttggaacgtcgaaaagaactttgttttgaaggccatcgttggtttgatttacgtcgtcaaggaatgccggaaatcaaacacacgtataaggctgaaaaaggaggagcggtgtatgaatatgtactgcaacagggtgatcccatgtatacaataccatttcctaacagtgtcgtattgcaaaacagggctcttgttcagaatccgtcacgggagatgggtgcgagacaaggtgagattcaataaacgtaaaatagaaggtcatgaaaaagatattattagctatagcttgcctgtgggctgcatgcatttcttgtagcgaagacacgaaaatcggtgcaccggacgaaatattgccggattacgtgctaccgcagggagacgcttcgaaggaagcaaacgatcggattcagcagatattcgatacctatacgtcttacgtgctttataattacacggagaaagatgctttttggacacagacggcagcaggcggaggagtccaaatctatcgggctatcatgggtgaatcccgctatgtggatgctatgcttgattatattcaggatatttggcttcagttttttccggaagaatttttgaaaaaaggaggaatgccctaccgggtctttctggctgattcaatttatttggatcgcggttggggtaaaactctttataattatcgcgtaaatggtaatgcgctcattattggagggatgaataaagatctgaccgctatggatgccgtgactaaaaagacgaggaaaaacgaactattgggagcgatgtgggattattatattgctcaggggttgttgaatgctccggatgagttttataaagatacggattacgagaatgcacctgctctcccgttagctggtgagaatttggaggcttatcgaaagagaggatttttaccgacatttaatagttattccggagcgcaggaagagtggtattggggggattacccgtggactcaagcgaaagaaaacgatttgaaatcttttatgttgcatttacggaaccaaacggatgaggaagtagcttggttcctgaataacccggaatacgagttgatccagaaaaaatggaatattttaattgattactacaagaaagaatttggtattgaccttcggaaaatgggaaatacgacctttgaatagatcactgtaaagataattgtttgtagagtatgaaaaagaaatttgtttatgttctttttgcttgcctagccatggttaacatggctttgggccagcaaaacgagtcccgcttggccttaaatccggaagtacccgtggccggtcagagtttggaattgacctataatccgaaaggaggaccgttagaaggtagatccgatttggttgggattgtctatatgtataatttttaccactgggagatgggtgatgtgcagttgaaacaggaaggagatctttggaaaggaactttcgagatgccggaaaattgtgcttttatcgcttttaaattccagtccacgtttaccttgcaaccggactcaacggataataataacgataacggatttatgtttatcccaaaaaacagtgcgggtgattatttgccgggtagataccttgcttggggagtattccggatgccttcgctgggatcggaaaccgggaactatttctccgggaactaccaagagatttctgacgaggcagcgatgatgtggacggatcaggagaccaaacattatcctcaatatggtcgccacttttttggaaccatgaaatcagttttgaaaaaaatgtatggtgataacagccgtcccggaatagcgcacttgttgaaagtcatggaaagccaaccggatctgaccgagaatgaatacgaggaaatcagtaatacttatcggatcgagttgaaaaacaaggtgaaagcggatagtattgatcaagtgatcctcaaattattcccgcacgggggcttggctcgttttaaccgttcgtttgagttgaataggttatctgaggaggaatattttacagctgcggatcaatttagaaaggatttcccgattgaggcatggagaaagaatccgaatccccggggattcgtgtataataatttttatcgagaactagctacgaggtactataaatcgggaaattacaagaaattggaagaaatattgcccgagatggatatggtaatgatcaatgatgtattccgaaagggtgtcgagttcgccattcggaaaacacctacgccaccagagacttatgtcgagattgccagaaaattcatcgaccagatgattgctaaagtgggagatggttcctatagccaaacgatagcggcttctccccgtcaagcggaagaactcgctcgtcagtggttgaattattatatttgcgtgtatgcccaagtggccgagaagtgtggtcgttatcaggaagtagtagatgtgatgaatttgatagacgaggatcagcggtatgtctcttatccggcggggaacgaggcgtatatcgtgagtctggaaaagttgggacgtgatgatgaggctttcgatgcgatgaaaggtattgccagtgcaggacagatgaccccgacggtttatgataaattgcgagaacggtatgccgtgttaaaagataagccggccacttttgaagcatggattgcttccctaaaacctaaacatgtaattgaaaaaataaaaaaacagctccgggctgaaatggtcgatgtgccttttgaaccttttgttttggaatcacattcgggaggtaaggtaaaatctgctagtttcaagaaagatgaaatcgtggtcattgatttttgggctttgtggtgtgcaccttgtattgcagcattggacgggatgcaaatggccgtggatctctatgcgaatgatccgaccgtgaaattctattttgtaatcacgcaagatgaaccgaagaaagaaaaaattgatgcgttatggaaaaagaatgattttcggaatatggaggtactgtatgatgcgaatcctaaaggaaagaattcccggaatgtcgtgtataaatctatgttcccgggaacatcgggtattcctcaaaaagccatccttaaaaatgggcgtatccgttatcgtgcggaaggatacggtggaagtcccagtggtctgatggatgagatttcttatgttatcgagattcttaaggaggagggaaattatgccaagaaataatctgatcgtcctgttgcttgcagcagcaggacttttctcttcctgcgggaacgggaatcactattcgcttaccgggaatctaccggctcgttatgatggatgtctggttaagctcacgcctgccacgttctatttctccgaggaaaaaaacagtccggaggatagcgtcaaaatcaagaatggtaaatttcagtttaatggagcagtgcagaaaccgacggtctatatgctgacaattgatggcgtggattataagattccggatatggcctcaatagccgtggtgattgaacccggtgacattacgatggaatatgatacactgggaatcatggtatccggaacccctgtaaacgaacgttacatggcaacgataggagaggcaaaacgagaaaccgtgcgtcaacgtcagcttttatggcatgaacgggatagtgtgaagcgtttaccggggagcgtggaaaatgaggtggataactattataatctgaaaagtagtacgattttcaaagaaaatatcattccggcatcagaaaactttattcgagaatatgcaggtaccgaaattggggagttcttcttctttcattgttgtgggaaagatgtgtatagcaaggcttttgtagacgaggtctacccgactattcgaccggaaatacgggagcaatacgaggctttaatccggactcgtcaggaaaaacaggattattttatgcattcgcagaaagccacggaggtaggaatgccctatcgggagattgtggcccgaacaatagacgggaaagagattcgtttatcggattatgttggtaagaagcaacttattttattggatttctgggcatcttggtgtatcccttgtattcaggaggtccctctgctaaagaaattacaggagaagtataaaaatcaaggattacaaatcgtgggcgtgtccgttgattctgatcgggaaaaatggcagggagctttggacaagcaccagccggcaggcatccagatttccgagttgaaaggctgggaaagtactgcccgtgttgattacggggtacaagcaataccgtttacggttttaatcgacgcttctggtaaaatccttgctcgcaacccgcatggtccgcttttggaagagattatcgagaagtatttttcccaaaaatagaaatcattttttaacgatttagggtatacctcgaaaaacttttcaaacaaagatagtttttaggggtataactctaaatgtttatcttattaggcaaaaattggcatttctttgggccggaataactttttttgtaccacgtagtatgcaaccagaacggcggtaccggtcacgatccacgaaataggataaatgaccatcaatgcatcaaaaccgggcaataagggacagacaaggtatatccacagtaatcgtaaaacgcaggttccgaacacggtgaggatagccggtagcatggaatagccaagtccccgaagtgcggctccggcaatctcgtaagagcaggcaaggcattgtgtcagtaagactatattcatacggagtgcggcataatggaatacttccgggctggacgtgaagaaactgatcgcgaagtgtttctgccagacgaataacacgttcagcaagccgcaacaagcgacacttaataacatcgtcagtcgaaaaattcttttacacctctcgatctgcccggccccgtaattctggctgataaaagttaccgcggcctggctgaaagcactgaccacgaaatagcaataatattcgtacgtgagggcggtggcagaaccggcaatggcagcggaaccgaatcggttgacggctgcctgtatgaaaatgttggcaatcgaaaacaccatcccctgtattcccgcgggaactccgatctgaagaactttccgcaattcgggacgggtgatttgaagatgcttgatgtctaacttgaagggacctttttcgtgccgaagaatgtatatgatcacgccagcgctgaacatgttggcgacgaccgtaccaatagcgactcctgctacactcatcttgaagacaatgaccagcaacaggtttagtaccgtgttgatcatcccggctgcgacaaggcaatagagagggcgtttcgtgtcacccatactacggagaatgcttgccccgaaattgtataccatgaaaaagggcatcccgaggaagtaaatgcggagatacaggattgccagatctatgacatcatccggggtatccatggcttccagaatcggtcgggcgatgagtaagcctaccacgagtagcaagaatccgcttgccagggcgatgacagaaacggtgtgtatggcatttttgatacctcgttcatctttttgcccgatatagttggcgatcacgacattcgcaccgacggatattcccacgaacaagttaatcatcaaactgatcaccgaactgttacttcccacggcggccaaggcttgatcgctggcaaatcttcccacgacggcaacatctaccgagttgaataattgttgcagaatactgcttgccgctaacggtagggaaaacaacagaatcttgttcagtaaactaccgtgcagcatatccatccggaccgcactttgtgatgagttattatgagtacgcatatgttgacattttcatgacgcgaaaatacaggaaacgatctgacaatggcatatacggattactttttgttttttatatgcgagcgttacaggttaaataagtgaataacatttaccggggagttgcgtgacaatcccctccaattccagttttaggagtagaacggacaggtcgtgtaccggtattcgtgtgagttggtgaagttggtcgatgttctgttctcccgcatttgttaatgtttgtttgataaggtcttcatcgtttgatgctgaaaagaaatcaatggaggtttggtgtggtctcgtcgggatgggttcccagtttacggcttccagaatgtctgaaacattttccacaagtgccgctatgttttgttttatcagcatattacaccccgtgtaattcgagtcttccgggcgaccggggatggcaagtacgttccggctgtaagataaagcctggcgtgcagttgacattgcaccgccttttacgggcgattctgccacgagtaccgcctcgctcatgcctgctacgattcgattgcgttgaaggaagtttgtgggatgaatgggggcacaagttgggaattctgagagtagcgtacctccttgtgccagtattttctccgctatatttttatgagatgccgggtagaccatgtgcaacccgtgtccgactacggcttgtgcccgcagcccaagccggagacaggtagagtgggcggcaatgtcaatcccgtaggcaagcccgctgatgatattaggacggtatcccatgtctgccagttgctgaagaatgtttcccacgcgggttttgcctagttcggtcgctttacgtgtccccacgatggctatattcttgctttcgtcggctttcagtgttcccttgtagaatagaacaagaggggcatccgcacaatgttttagtaggtggggatagttcgggtcttcaatcccgcagatttggatatggtgtttttccatgtttttcagctcctcttctgcttgctgcaaccatagggaacgctccggttgtatattcgtcaggttattctctttgaaaagaagtttgatatttgcatcactttcttgaaagaatccggttatgcccccgcattgttggaataacggggagtacaaagcattatttagcctgggagttatagtgatagccactcgtgtcaagatggagttgttattgttcatgtgccaatcatttaatgaataagttcaaagttatttttttataacgagaaaacctattaatttaaaatttaataatattcataagttgcttagtaagggtatttttgattaatgcataaaataatgtaattttgtgaagaaatacgggataaatggaacaaattatatttacaacggattcgagcatggttcttgccgaattgttacgaggtgtcaggcatgaacaattgtttatcgtggcggataagcacacggtaggtttttgcgataagctgctggaaaaggtggattggataccgttgaacgtggcggtggttgattgcggcgaggaaaacaaatcgctgaatagtgtagcccgcatctggtctgtcctgagtaaacgaggagctcgtcgttcttccattctgttgtgcgtggggggaggtatggtgacggacatgggaggatttgccgcttcgactttcaaacggggaatgcgttgtatttatgtacctactaccctattggcgcaggtggatgcatccttgggtggaaaaaccgggataaattttgacgggttaaagaacgagatcggtactttcaaggaaccggaacgggtgattattgatgttatgttcttgaaaactttacccgtgcgggaacggatggcaggttttgccgagatgctaaaacatgggttgttgtccgacgtggagtatctggatcgattactgacttgtgatacggacgagccagaccgggaggaatttcttgatttgctcaagcgctctattgccgttaaaaatgaaatcgtgattttggacccgttggagaagggtgtgcggaaagccttgaatttcgggcacacgataggacatgctattgaaagttgttccgtcatgcgtcatgaaaatctgttgcacggggaatcggtggcgttagggatgatcgcagaattgtatctttccgtgcgggagaaaggtttcccggaagagatattccatcgggtgcgtgattttataagaaggtattaccccatttatccggtcatggggtatgccgatacattgtgcgaattaatgtcgcatgacaagaaaaatgatcgtgaagggctgaattttacacttctcgagagtgttggacagttctctgttgataattattgttcgagggaactggtcatggaggctttaaggcaaatataagattgtaaggatggataaagttatcgcttggacacagaagaaaatagagggtacggttattttgccggcatccaagagcgaatctaaccgggctctcgttttgagtgcgttggcgggtggcgggatgccggagaatctgtcagatagcgatgatacccgagtgttggcggaggcattgaaacaggcgggggggctcgtggatgttgggcatgccggcacttccatgcgtttcctggcagcttattttgccttgcgggaaggggtgtgggaattaaccggatcggaacggatgaagcaacgcccgataaaagtgctggtggaggctttatgggaattgggggcgaagatcgaatacctgggtaaggagggcttccctcccttgtggattggtaattctgtattgaagggagagcggacgatcagcttggatgctgccgtgagtagccagtatatttcggctttgatgatgattgcacctttgttgaagggagggcttgtgatcgatttgaagggaaaggttatttctgcggattatattcgcatgacggcagagatgatgcgttgtttcggggtgaatacccgttttgaagggaaacgggtgctaattccggagggcgtgtacgcgcctgtctctttccgtgtaagtgccgattggagtgcagcttcttttttttacgagttgttggctattaccgaggaaggggaaattttccttccggggttgtatatcgatagtttacaaggtgatgctcgtcaagttgatttgtggcgacagttgggtgtaaccacggaaaaagtagttggaggtgttcgtttgtcggctaatagcgatcgtgttgcccgttttgaggcagatctgtcggggatgccggacgtggctcttcctgtgattgtagcttgttgtttgtcggataccccctttcatttgacagggttggatacgttatatataaaggagtgtgaccgggtgatggctgttacgcgggaggctggtaaattgggatacggtttacaaattcccgcacgtggcgagttgtgttgggatcgtgtgcggaatgcatgtacgacgttggagatcgatacctaccaggatcaccggatggcaatggcctttgcgcccgcaggggtgaggtattgcgggttgatcgtgcgggatgctgatgtggtttctaagtcgtttcccggtttttgggaacaatatgatcatttagtgatgtgatgatttatagtgtttggttactatctatttgttttttattttgataaaaacttttttgctaaaatatttgtttgaaccggaaaaaagcagtaatgttgcatcgttgattgcggttgagaaatttaaccgttttgtagatgcgtaattttattttaaaatattttattatgaatgtagcaaaagtgatggctaacctggaagccaaacacccaggtgaaaaagaattccttcaagcggtgcacgaagtgttggaatcaatcgaagagatttacaaccaacaccctgaattcgagaatgcaaaaatcgttgaacgtatggtagaaccggatcgtatctttactttccgcgtggcatgggtagacgataagggtgaagttcagactaacttgggttaccgcgtacaattcaacagtgctattggaccgtacaaaggtggacttcgtttccacaaggcagttaacctttctatgttgaaattcctcggtttcgagcagactttcaaaaacgcattgactactcttccgatgggtggtggtaaaggtggttctgacttcgatccggttggaaaatcagatgctgaaatcatgcgtttctgtcaagctttcatgtatgaattgtggcaaaatataggtcctgatactgatgtccctgctggtgacgttggtgttggcggtcgtgaaatcggttatatgtacggaatgtacaaaaaacttgctcgcgaatacaatactggagtattgaccggtaagggtgcaacttggggaggttctatcctccgtccggaagctactggtttcggtgctctttacttcacgcaacacgttttgcatactgcaggtaaagacatcaagggtaagactgtagctctttccggtttcggtaacgtggcttggggagctgcaaccaaagctgtcgaacttggtgctaaagttgtcgctatttccggtcctgatggagtttgcgaaatcgctaacggtatcaccaaagagatgattgactatatgctcgttatgcgtgcttctaaccagaaccgcgttgagatgatggctgagaagttcccgggacaggctaaatttactgccggcaagaaagcttggtctgtaaaatgtgatatcgcattgccttgcgctttccagaacgagttgaacggtgacgatgctaaggaattgattgctaacggaacatggtgctgctgcgaggtttccaacatgggttgtaccccggaagctatccacacattccaatctaacggtatcctctttgcaccgggtaaggcagttaacgctggtggtgttgctacctctggtcttgaaatgactcaaaacgctgctcaccttggttggtcaggtgaagaagtagatgctaaacttcacttcatcatgacttctattcacgaggcttgcgttaaatatggtaagcaagctgacggtcatatcgactacgtgaagggtgctaacatcgcaggattcatgaaagtggcgactgctatgcttgaacaaggtatcatctaatcctatttcttgtaaatagtttcgatagagatattaaaaacttggctgcaacaaatttcggtttgttgcagcttttttgtgttgatatgcttgtcaaaagttgtttgacaacttttctaattatccgtattcaactattaagtatgttaatttgaatataaattacgaggaatactttttataagtggaaaataaaaaatatttttgtatcgttatgattcaaaataaatgcaaaattggatgaatcaatattgatagagagattgcgacagaatgatcgaaaagcctatgcagatttgtttgacgggtatttcgataagttgttcgtgtttgccctgaatatggttttccgggaagacgtggccaacgatattgtgcaggaggtttttatcgcaatctatgaaaaatcggttttgaaaaattatcagggttccctgaaagcctatctttacacgagtgtgtgcaaccgttgctacaattacttgcgggatgcgaaagtcgaggatcgtaacatggcattatatgccgaggcagcagtctattcggacaacgtggatatgattgatcgagaggaaattttagagaaaattcgggaggtgctggatgaattaccggaaaaatgtcgggaggtgtgccttctgcgtttcgtacatggatacaaatatagcgagatttccgagcaattgggaatgaatgagaataccgtgaaagtgcagttacatcgcgggatggagaagttgaaacgttgtttctcggattatgattttacgctggtgcttttcgtgttggcggcaggttttgaatatatgtagatggattctgggtaaatgaattcacgggcggaatggtgtgtcttagggggtacatttttactcttgatgtttataacgaatcgatgattagtggtcgactattgccgtaatataagttttttcatttttcttgtaaacattttccaaagtttcgtgttttaggtgtgaaattaaggaaaatactatgaaaatggattggaggttgataaaacggagctttacttctttactggatgaggaggataggtgggttttggaggcttggttgggtgaatctgaaaggcatcggcagctctacgaggagatgaaacgtttcgtggtgaggcgggaaaattttcagttaagcatggaaatgaaaaaacaatttaaacaggaattcgatttaaaaattgacgaggcttaccggagacggggacggcgggtgtggttgaaggtggtgagttacgcggcaatgctggcattaccccttattgcgggaatattgctttggacaaggcaacccgtggaggaagtcgtggattacggtatcgggcctatcgaacatggtgtgagaaaagcgacgttggtattgaatgacgggaaagtcctagcccttgatacttctcggatgacgctgaaagagagcgatggggtgatgattcacacgaatgatcaagcgttagtttacgtggattctttggataataagggtgttgatttacagaatcggttgattactcctaaagggggtgagtacacgatcatgctggtcgatgggacgaaggtgtgggtgaatgcggcgacggagatttactaccctgtgaaattcgtggggaaggaacgacgggtatggttggaaggagaggcttatttcgaggtgacgaaggatgctgccaagccgtttatcgtggaggtgaacgggatggagataaaggtgtacggaacgcagtttaacgtgaatactcgtcgggatgatcagatgcaaacgacattggtagaaggttccgtatcagtgaaaccgaaaggattggcggaagttaggttgaaaccgaatcaacaagcggtgtttaacaagctcgtgggacgggttacggttcgggaggtggacgtgttatcttacgtggcgtggcagcgtggaaattattattttgagaacaagagtatcggcgagatactggatgaactttcgttgtggtatgatatacaggtgttttttatgaataatgaggtaagtaacgaacggtttagcgggtatttgccccgttacgaggaaattgatgaattgctgtctttgattgaaaagacatctcacgtgcgttttgaaataaaaggtagagtgattgtagtacgaaaataaaattccggttaagcagcaacttatccggaatctagcttgatccgagcaaacaaatgcgacaatgcttgctcgagtagttttaattcaaaaatcaaatgtatgaaaaaaaaacaaagtttttactatttctatggtaaaaagagtttattgaaaatcatgaggttattgtttattttgatggcaatgaccagcatgacaatctctgccaatagcttctcgcaacaacagcgggtaacgttggacgtgaagaatgttggtgcaatggaactatttaaagagattcagaaagagacaaatctgtattttgtttataatgatgcggatttgatttcttataacaagatttctgtttctgcgaaggatgagaatgtagatgttttgttgaaacgcgtgttccctaatctggaatttttgtttgagggaaacgtgattattatgaagccgaccattgcaaaggatgacgaaaaagaggtaaagaagtatgttataaaagggaaagtggtagatgaaaagaatcaacctctaccgggagtgactgttcgtttggatagcacgaccgtgggatgtgccacggatgcgaggggaatgtttactttggcactgcctgtagcatccggtaaattgattttctcgtttgtcggttttagaatggaaacaaaagctttcaaggctggcgatgagttgatcgtgaagatgaaggaagaaacttcggatttggacgaggtgacagtgattgcttatggtgaaaggaataaaaaagaattgattagttctatatcttccgtgaaatcgaaagatttggaagaggttccttctgcgagtttggaaaatcttttgcaagggcatatggcaggagttgaggtaaataatgtttccggcgctcctggtggtggcggatcccgtattgcgattcgcggttacaatacgttgatgcaggaaggaataaacgatggaacacccttgtacgtggtggatggagtaccgattagttcatttacttctcctataaccggaacaaacacgttggcagaaattgacccgatgacgatcgagtcggttgaagtgttgaaagatgcagcatcggcagctatttatggttcacgagcaagtaacggtgtgattttgattaccacgaaacaagggaagtccggtcaggcaacttttcaggcaaacgcttcctattcttggagttggttcccggaaactccagtgcaaatacaaggcaaaggtgagcgggattggtggttgtgggctgccaagaatattagaagcgggtataccaaatatactcccggagctggtcgggatctaccttcaatgcctaattcctattatgatgcatacgttggcggtggttcggctatctatgactttttttggggaaacggtaaggtaagtacatttttgaatcgaactgtttaccgtcagatacaggatagtttgaatcctttttataataattcgagtaattggtggaagtatgcttttcggacagggaaaattttgaatgctaatttgcaggcatccggaggaacggaacgcgtgaaatacatggttggtgcgggatggtacaacgagaaaggaattaatgtggggtcggacttttctcgaatgaacttgatctcaaatttgaatatgatccctcgaaaagatctgaccatggatgttcgtatggcattgtcatatacggatatgagtatgggtggcggcggattggagaataagaaaattgcttacatgaccgtgaaccctaaggggacgtctacgttacttccaagttccggggaaacttatgatttgatatttaaaaatatcaatatggtttcggagaaaaagtatgattttaatattcgctccagtttgcgtcttcagtataaaattatcgaggggctggatctttctacttcagtaagtgttgattactcgcaatcggaaggaaataattttaccccgagtacattggacggagtaaatgggttgagtataacaatgggagccaagcaatccaacatgatgttgcaaaatgagaatttacttcattataaatttagtttaagagaacggcataattttgattggctatttggattttcttatacccgtgattctcagaatagaatgaatggtcgggctaaaggagcacctagcgattacattcattatgcggtagacggaatgccttcgattaaagatctaggaggtacgctaaccgccatgcaatcttttgtttctgattattatgaaaaaattatggtcagttattttgggcgtgttgcatataattttgatcagaaatatttaatggaattcactttgcgtcgggatggttcatctgttttcggaaaagacgtacgttgggcgacctttccatctgtcgctttggggtggaatttctcggacgaggcattcatgaaaaatttctggtggttgaatcacggtaaacttcgcggttcgtggggtacttccgggcaagttttccaaaaggcgtatcttgcacagggggtaattgatgtcgggaatgagtttttgggcgtgacagggatggtgccagcccaattagcaaacacgaatttgacctgggaaaagtcggaacaatatgatctcgggttggatgtggatttatttgattatcgattgaaattgaaggctgattactattataagtacacgaagtcaatgttgtggcaagtgtcattgccgggtacggtttatatgcatcaaagacagtggcaaaatgcgatagagtgttctaatcaaggggtggaattggaagctcaaatagatattttacgggatacggagatcaaatggcgggctcgtttcaatatttctcacaatgataatcgattggagaagacttattcaggacaagatgttgatgaaaaatacgtgattggtaagtctgtttacgaactacgtgcgttcaaaactgatggatatgttcaaaatatagatgaggttccggtttattgggatcaaaatggtaataaggtccttttaggtgatggaggggttgtcaattctattcgtcccggaatgaaaaagatcgtggacttgaatggtgacggtcggattactgatgatgatctttattttgccggttcaaccctgccggttgtttatggcggtattagtagtgaaataaaatggaaacaatttgatttgagtgtattgtttaattattctttagggcggcatatcatcaatgcattcaataagggttcgttgaattttagtgaaacaagtttgggagcgatttttgaggattatcgtaacgtgacgttttgggagaaggaaggtgatacgccggattatccgattatcgatgttgcgtacaagtattataacggacaatacgatgctcgtacggatgataatatcgagaccgtgaattttttgcgattgaaacaattaacgatagggtataatttaccgagtgatattgcaaaaaggattcatctgcaaggtgttcgagtgtttttcacgggggaaaatttattcttgtggcacaattattcagggcttgatccggagaatgtcgacttgttgcaagggtacgataattcattgacttatccgtccgcacgaaaagtaactataggattaactgtaaaattttagttatgaaaaagattctctatatatttttgttatcgggactactctcgtcttgtgacgatcttttggatgtagaaccggaaaccttgcttagttttgataattatttcaaaacagaattggatctggaatcgacgttgtattctatacagggatttattaatgacaagttgttggctcatgccacgcaggaagaggctggggaatttagagattatgaagcttacgaatccgtgagtagcatccgattatggaacacggaagcgattacgaagagtatcggttcggattggtcgaatatttatggtattgtctatatggctaacgtgatgttggataatatcagtaaggcagaggttcaagtatctcccgatcggattcagttttataaagcacaggcctattttgccaaagggttgagttattatattcttggaatgaaatggggtgaggtgcctataacgcgcaatagtacttctgccgagccttacggtaagaaaccggtgttggaagtgttggatacggctatcagtaatgccacgagggcttacaaggtattgcctgttcaatcggaggtgaaagatcgactgggtaatgtgattaaatccaagcagtttggaagtaagggatctgcttgtgcgttacttgctaacctgtatgcgtggaaagggagtataattgacctacaggggcttgaaggggatgcgaaagattgctacatgaaggcaattcaatattgttcagaattgattgagggtaacgaggtcggaagttatcgtctagttcgtgatccggaaagattatgcgagctcttttcggatattaatcaagagaatccggaggctatttttgagtttactttagatatgcaaagtaaatatgtgagttcaccctatctttttgcttcagcatatttgaatattgacgggaagggtacagatgcgaaagtagcccaaacaacaatagataaattgtatgaatcacaggacaagcgggttagttcgtttgtaactccgggggttaatatgtggggcgagcctgatggttatgccacgttgaataaatggagaacgggagtgtgggcacagtctgatcccaataacccgtattccaaaaccatgactgccgtaagtacaaatttcgcttactggagattgtcgggtatttatttgttaagggcggaatgtaatgctaaattggatgctcaaagtagtgaggcgattggcgatttgaatgaaatccgaggaattgcgggcgcgacgctttacccgaacggtccgggagatgatatgggattacaatatgctgtttttaaagagcgacaaagggaattatatatagaagggcatcgttggtacgatattgtgcggaatggaatgtggtatattaataacgaactgtaccaaggtgacgatggaaagtttaaaaccatgacgctggaagatgttaggaaaggtgcgatatttttacccatttttgactcggcttttacgatgaatagtttgttagtgcagaaccagtattggttggaggccttgaatcaataaaataagaaatgatgaaacaagttatatttttaggaatagtattatcgatgtttgttggttgcacgaagtacaaccaaatagataccggaatttgtaaggctgagtttcccggcaacatgtacgagtattttcaatccgattcttataattgggattctcttttggtgatgattgattataccggattggaaaaatatttcacgggagaagaacccggttacgaggaaattacttttttcggtccgaccaatcattctatacggcgttggttgtacagtttacgtacaaatatgaatgacatgggtttaccggattccacgaaggtaaaaattatgttacaagataaggaaacctgtcgggatttgatattaagtcatatcataaaagggaaacgattagccgctgattttaaagagggaacagctaatgatgagacttcaggagagatggtaactggtgcaaatgggaagcaatttagggtatttgctttcagagaaacgtttcaaaatgttccgggagccggggctcttgttttgtatgcgataggacataatcaatggggtacaactcagtatgtacttcctatcgcatcttcggatatacagccgacaaatggtgtcgtgcattctatggcatatagcttcacgttaggagagttgaaatagtaagaatttgtaaattaagaatgatatgaaacagttgatgatattatttctcgcaatctttgcattagctgcctgtgagaagcccacggttggtttcttggacgtaaaaaatgccgcatttacaccggatacgttggaaataagaaccgtgttggatcctaaaaaagatgccaatagggaaaagaatcaagctccttgggtgagtggcgccattcaaagtgtgttgggaacggatcctaaggtttacgaatttgtccgtgttacttcgactgcgggagaagaagcggcaagtttgtttgccagtgaacttaaagtttatggaaacagtagaatggaagttccgttacaacctgcggctcctaaaggaagctataggataaccttaaaggttcgtaatgaaggttattctgctcttctaccggatatttttactttcataatcaagtaaatatgacaaagaaatattttatgatgatatgcttcaccctgttcatggggtggagcgtatcaagctacggtcagggaatccagttctttaaaggaacttttgatgaagctttggcgaaagcaaaacaagagaacaaattagtattcgtggatttttatgccgtgtggtgcggtccttgtaaacagatgactgaaaaagtgtttgttgatgaagaagtcggaaagtttatgaatgacaagtttatctgtatgcaagtcgacgtggagaaagcgggatggcaaaaagagacggcagaaaaatttaacgtgacggtattgccaaccttaatatttttcaaaccggatgccacggttgcatcacggttggtcggggctcgtgaaaaggctgatttcttgaactcggctaaagtggtttgcggggaacggttaagcttcgataaattgtatgatcgtgctaaatctaaaaaggatttggctgatatgcaactagttttgaaacaagcaccggaagaagtgggaggaatgcaagggatggaggcccagaagtggatcgtgcggattgacaagttgtatgccgagtatgctaaaatgaaaatggggcctgactttatcaacaaggaggatttgcaaatcgtgcaggcgtttaacaagaaaaacgtgaaagatgatgccgttatggaattcatcgccaagaatttggagacttacatgaataagttaggcgaggcccccggtattctgatggtggaatataataatgctgtcgtcggacaattggcgaaggctgggaaggacgaatacaagaaatacttggagagaattaacggtgatctggaaacagcctacgctatcatgcccacgggtaccttaactccttacgagaagttcaagtattattatgacgggatgtatttgttatcttacaaaaaagatgtagactcttatgtccaattgatgaacaaatatatcgctgctttggggaatcaagtcagcgcgaatgattacggggagatcgctcagaatatgtatgtcatgagcaaggggaagttgaataatgaacagttggggcaggtgaaagattggttggtaaaagccatgcaatacgaggggacggggttgattgacaggattaattttgtaaccatgttgggagatacttataaagctctaaaacaacttgataaagcgaaagaggcttataatcaagggtacatggaggctttacaaatcgagaacaagatgcgttctgcccagattcagatgataatgaagcgtaaactggaggctttagaactagcaaagtaatagtatgaggggattaatttttacatgtatcatttttgttttcacggtattcacccctttgtttgcgcgggaaggtatggagggattgcgttacggaaagctggagaacggcttgacctattacgtgaagcattccgagggagccttgggacgggtgagtttttacctggtacagaacgtgggcgctatcctggaggaggatcatgagaatggtttggctcatttcctggagcatatggcgtttaacgggacgactcgtttcccggacggggtaatgccctacttgaggggaaaaggcgttttttcctttaacgctcacacgggagtgaaccagaccgtgtataatattaatgatgtgccgacggcggatcaaggattggtggatacctgcctgtttatcgtgaaagactggtgtagtgagatattattgaaggataaagatattgacgacgagcggggagtgattatcgaggagtggagaagtcgttacgatgtgaaccgacgtttgcaggagggagcggctcccgtggtgtataatcacacgaaatatgcccggcgtaacgtgatcggtacggtggaattgctgaagagtttcccgtacgatgcgttgcgggagttttactataaatggtatcgtcctgatttgcagtgcgtgatcgtggtgggagatattgacgaagtggagtacgagaaacgggtgaacgagttgttcggggccattccggcacgggagaacccgctggaacgttacgaggtggagattcccgctcgtgcggacttggattacatgttaatcctagacccggagaaccgttcgaagatgatctctttccatcagcgggcacgccgggtggaggacttgaacgaggtggaacgcaaggcctactcgtttaaggctcgtatctttaataccatttgggggcaacggctttcccgtatcgtgaacgataatcgggagaagttcgtgagtgcatcggcagatttcggtactttcgtgcgaaactataacgggttttcgctagacgtggttccttacaaaaatcaggatgccgaggctttcgagcaggtgtggacggaatgggaacggattcgtcgtttcgggttcacggatgccgagatggaacgggtgcaggaggctcttttccaggagttgcagaagatggagagtaccgtggagaaagagagtaacctgtattacgtgaatgtgttccaggctcatttcctgggcgggatgcctttcctcgaacagaaagaggagcttgagttgttgaaagaggctttgctggagatcacgaccggggatatgaacaagtggatacactcgtgggccacggattcgagccagatcgtggtggtgtccggtaatgacaaggattacaagtatctgacgaaagagcagatcctgaatatcatggcaggggtgagtaaaaaagacttgaagccggaagtcgtggagcgtaaagccccggaggcgttcgacttgaagttgcaaggggggacgatcaagaaagtgaaaaagttggatcgtttcaaggcggaagagtggacgctggcgaatggagcccgggtgttctacaagcacgtggaggagggacacggttttttctcgatagcttgtagtagtcatggtggtcgttctgtagtggctgccgaggatctgccgacgctggatgcgatgcaggccttgacgttaaaatccgggatatacaagtatgaccttaacacgttgaaagaactcgtgcaagggaaacaggtgcggttgaacatgatgttgagcgattacacggagggattcggcggtagcacgagagcggataacgccgagttgctgttccagttgttctacttgatgtttgaagaacctcgtttcgagaagccgcagtttgataagtacgtggaacgggctaaatacatgtacgagaatcgtcgtctgacaccccaggatctggtgcaggattcgatccgaaaactgacgacccgcacggacgaacgtaaccgggatttgggtgctgcttatttcgacaagatgaatttcgatcggttggaaccgctttaccgggaatgtttctcgaatgcgaaagagttcacgttctgtatcgtgggtgacattgaccgggaggaggccgttcgcctgacaaacgagtatatcggttctttaccttcccgtaagggaaagaaagaggagtacatcattcgtaactacgatgttggcacggacacgatttcccatgtgttcacggtggctatgcccggtgacaagggtatggtgaacctgatgttggagaataatgctaaattttcagacaaagaacagttggcgttgaatatctggggacagatgttacgcaaccgtttgttcgctatcgtccgggaacaggagagtgcgacgtatggcgttaatgttgaagcgaatagcattacgttcccttatcgtaaggcgacgatgatgatcggcttcgagacgcaacgcgacaaggtggaacgcatgaaagagatgatttacaaagaactggatagaagtcagcacgaactctttacacaagaggagttgaccccgattctagtttccatcaagctttcccgctcgcaagcggacgagaatatcggcatcgactattggatgaacgtgttgaacacgtatgcagagtacggagaggatgttactgaccatagtgacaagctactggagggcatgactgtcgaggatgtgcgtgacgtggtgtggaagttcttgaagaaagtgaaagtaagagattgggtaataaaatcagaagaggcggacccgctttctgattgggaaaaatagtgaaacttaccctaaaagttgcactccaaaagtcagacacaaagcttttggagtgtagcttcaaattgaactctccctatttttttaggtattaacccgaacctttatatatagctcccgtatatatcacagaatttgaaacagaaaaagagatgatgaggaattgtacttttgtagtgacattgttggccttgtttttcacgggatgcgaggaggcaacgataaaagtagggaaggattttttatcccacaagaccagcgagtttgatattacgatagcctatccggtgtttacctcccaaaaagctgaggtggaacgaggatgtaaggtggtgaacgaggaaatttcccggttgattgacagtttgcaaaatgatttgaaagcacaattgaaccaatacctgcaaaaggcacgagagatgaaggaagaaccgatgattccgtttgaactggaggttaaggatagcgtgttcatggcggatcgtcattatatcagtgttcgtcttgcggtttacacgttgacgggaggagctaacggattgacggaatattacgcggtcaattatagtctgaaggacaagaagtttttgaactcggagggtattctgaattatgacaggagtgccgagattgacaaacagattcaacggaatttcaagaatccggagaattgtttttcggaagttcccacgctggcaaatgtaaccacggtaaacttttcgggaagtgatatttgctttacttatgccccgttggttttaggggctcattattgcggagcggcggaaatagctgtacctcgtatgttattgaaaggtgattttttgttgaaatagatagggagaatagtagggaaggcgagggcgattcgaaaggatcgctctttttttgcattgatatttttgaaaaaagtcatatcttgcaggcttgaatagatggagttatatgttattgtaccaatttaacaagggtgacgagcgagcctttaaaaagttgtttgacgatttttttaaatcgtcatgtgcttttgttaagcgttatattccggatcatggggcggtggaagatgtagtgcaagagacctttataaatctttgggagaagcggggaatttacacggatatggtgtattttaaagcatatctttataaatcattgtataataatgctcttttttatttgcggcagcataaaataagtgaagacgtggatcccggaattgaagataatacggagacagctttggcggcgattatagaagaagaagtccatcgtgaaattatagcggcaattgatagattaccctcggaacgaagacgaattgtggaattgagtatggcaggccacactcaagaagagattgctgaaaaattgaagatttcagtgaatacggtcaaaacacaaaaaaggaaggcgtttgcctttttacgggcagaattgcagcatttatttgtttttttcttagttctgttgcatctttaatgttgttgattgatagagacttgttgttagaaggaggttaaagctaaaaaataattgcttttcgaatcacccctaaattcgttttttgcatattagagatgtaaaagatgatgaattgatggaaaaatataaaaagtcaataaaattagcggaacgaattactcgatacttgaaaggagatctttcggaagcggagatgttagtgttgaaaaagagcttgaaggaatcttcggacggggaacaacttttgacaaaaatcagagatcaaaagaacatagcggctaaacaagtcctttacgactcgtttgatgcgaaaaaaaattgggagcaaattcgaaaggcaaccggaagaaaagtccacaggcgaatttaccgtatgtcttggtatgcggcaatactgatattgcctttgatggtggctattcctgtttggtatgttgatcgagtgaaggagatggagcgtccgcaatatatcgtggatgcttattttgaacgtcacaaaacgatattggaattacctggaggtcagatcgtagatttggatactgttaaaaatattgcaaaagaattgaatgaatttggggtgatattggaagagggaaaggggttaaattattccggaatagacagtatcgttgataataaagtagagtatcaccggatcgttgttccgaggggtggagagtataatctgaaattagcagatggaactgatgtttggatgtttgctgattctgaaattcgtttcccgacacgctttaaaggaaataagcgggaagtatatttggagggagaggcttattttgacgtgcatcatgacccggtccatcctttttatgtgaaaacaaaatctcttgacgtgaaggtgttgggtacgagctttaacgtgaaagcgtatcggaatgcgagtatcgtagagacctcgttggttgagggagtggtgagcgtgaaagataacgtactgcgtcccgatatgcaggctacttatcatgaagaatcgggagatttttcttatcgtaagattaaaggagagaattatcgtttgaggaaagaacagatgttcgtgttcgaggaagagcgtctggatgatattttacaggagatggcccgttggtatgatttcgaggtgttctaccggaatccggagatggctgaaaaacgatttggttttaaattggagaagtacgagcatgttgattctctattgaagatattggagttgacgggagaggtgaaattcgagatgaatggaaaaacgttgattgtgaaaggtgttggttgatagtgtgttactataaataaaaatgggggtcagagattttgtggtgattatttctgacaacccatttcattaaattcaatatcaatttaatttctcaaagttatgaaaaaaaacttttggacgtggctcctgcacgataaaaaaaggagaaaaagttctatatgcatgaaggtttgcttgtgtatagcagtttttctagcttgtggagcatttcgaagtgtgtatgcacaaacggaaaaattgacgctgaaaagggaaaatgcttcgatgctagacatcatttttgctgtggagaaacaaagcaaaatgacattcgtgtatagtatggatgccgtgaacaaaattggtaagatcacgattgacgtaaaggacgtgttgattgatagcgtgatgaatatttgtttacggaagacggattacacgtacactttcgaaaagaatgtggtggtcattaagaaaaaagccgcagaggaagtaaaaggttctacggctgtgactccgaaaaagagagtgatcacgggaacgatcacggataagcaaaagggaaagcttcccggggtgtcggtttacgtgaagggaactactgtcggtgtcgtgaccgacgtgaatggcgtgtataaattggagcttcctgcaacagccaaagcgttgttgttttctttcgtggggatgaaaacgaaagaggttgaattgaaggatcagacgacgatcaatgtcgttctggaagaggaaatctccgatttggatgaggtgaccgtggtggcttacggggaacgaaaaaaaagagaattgattggggctgtttcatccgtgaaagctaaggatctggaagaggtcccttctgccagtcttgagaatttgttacaaggacacatggctggagtcgaggtatcaaatatttccggttctcccggtggtggtggaacccgtatcaatattcgcggttataattccttgttgtcagaatcgcagacggatggaactcctttgtacgtgattgacggtgtacccgttcattcatttacttctccggtgacaggaacgaacacgttggccgagatcgatccctctaccattgaatctgttgaggtgctgaaagatgcagcatcggcagcgttgtatggctcaagggcaagtaatggagtaatcctaatcaccacgaaacaagggaaaaccggtcgaggtaaattctctgcgaatgtttcttattcgtattctattttacctaaaactccgactcagacgggaggacatttggaaaggattgcaaatcttaataaatttaggaatttgcgtgcagcttacggaagttggcaaacgggaatatataagatgcctgaatcttaccgtgatgcctatcaccaaaatggagcgtatgattatttttggaataacggttatcctttaacggaatatcatattgctactgcgaaacctttgcaggatagtttgaatccattttacaacaactcgacgaattggtggaaatattgtttcgatgcggggaagatcttgaatgcgaatcttcaggcttccgggggaacggaaacgataaagtatatggtaggggcaggatggtatgacgaaacaggaatcatgttgggaagtaattttaagagagccaatatcttgacgaacctgaatgttgttcctcgtgcaaatttgaatattgatgcccgtttgtatctagcttatacggatcgaagccggggggctgcaaatacttcttttacaaatgcaagtaagatagaggggttgactgtcgatccgaaatcaaatttatctattttgccgggttccggggaaattgagaaggagaccttgaaacagttgaatgagtcttccgagaaaaatattacttaccggatccgggcgagtctggccgttgcgtacgagttcgtgaaaggattgaaattgtcttctagtttatccatggatttctctgaagggaaacgaaactcatttattcccagttatctagatgcggtgaataatttgagtatatcaacgggaagcattagtagtggaacgctattctccaatgagaacctacttgtttataataagtcgattcggaataatcataacatggaaattctgttgggtttgtcttatctgcgagaggcaaaagaccagtttagtggaagtggaaagggatctccgagtgataagattcattatgtgttggatggattcccgacgacgtatgaggaatatggaagtgttaaatccttacaggcctatcgttccaattttgaagagaagatcatgttaagctattttggacgtgctgtttataactataaaaagaagtacttgttcgagttcacgttgagaagagacgggtcgtccgtgttcggggaagatgtgcgttgggccacgtttccatcggtcgctgtcggttgggctttctctgaggaaccgtttttcagaaaatggtggttaagctatgcaaaaatacgggcatcatggggaacttccggacaacaatttcgggatgcttatttggcacatggaaccttggaatttgcaaatacctttttgggaaatgcaggggtattaccttcccagatcgttaataaaaatttgacttgggaagaatcagaccagtatgatattggtttagatgttgatctttttgattatcgtttgaaattcaagttggattactattataaatactcgaagtctctgttattcgatatttccttgccgggtaattattattatcataaaactgcatggcagaacgctatggagatttctaatgaaggaatcgaattggaattgaattatgatattttacgcgatacgaaagtaaaatggcgggggaaatttaatatttcaaggaactggaaccgttttgagaagtcgtacacggatatggatatggtgaacggaaacggacagttggttcttgggcgtcctatctacgggctttatatttataaagatttgggaataattgagtctgaaaaggatatcccggcttattatgaccagcaaggaaataagaatacgttacattctatgaataagagttatccttattccgtgggaacccggatgattcaggatatgaatcaagatggaaaaatcgatgatgaggattgctattatgcaggatctaccttgccggttgcttacgggggatgggcaaacgagattatgtggaacggtttcgatttgaatgtattgtttacctattctctcggtcggaaaattatcaatttgtacaagatttcttccttgcaaggtaattcaagaacaagtacgatttttgtagattatgcaaacacgacattttgggaaaagccgggagataaggcggattatccagttatcacttccagtgaacaaggctacattggacagtttggcggagatgtctcttccaatatagagaaggtgcattatttacgtttgaaacaattgactcttgggtataatttcccgaaagagtggatgaagagaattaatcttgaaggatgtcgtttgttttttacggcagagaatttgttcttgttgacgaattattccggtgtggacccggaagttgtggacccctttactgggtatgataatttcctaaattatcctcttgcccggaaattaacgttaggattaactgtaagattttagccatgaggaaaataatatatatactacttttcccattgttatggggatgcgatagcattttagatgtggagccggagaatgccattactttcacgaatttctttaaaacagaggaggattttaatgcgatggtttttcagatggagggctttttccgatataagcaatttgaaaatgaagtgatggcttaccggggttttttggctgaccaagtgaatagttcttattatgaggatcaacggatgttgaatcaaacatcgttattgaattcattttctaatagctggaaaaatcattacgacttgatttacgtggcaaacgtgattctggataatttatatcgggcagagggtgttccgcaagataagttggatttttatgcgggacaggcttatttcgtgaaaggattcgtttattttgatctggcgagaaagtggggggatgccgttatcacgaaaaatagtactgatatgggagtgtatgataagagttcaatgctggatgtgttggatgaagctataaaaaacacctcggaaggatataaattgttgccgaagtacgaggatatgcctcttttaggtgtgaatacgtgggtgtcgaaacagtatggttgtaagggtagttgtgcggctctcttggctcatttgtacgcttggaaggggagtatgatcgagttgtgcggtatggaaggagatgcgaaaaaatgttacgaagagtcgatagaatggtctacacttttgatagaaaagaaagtgggattttatgaactggaacgtactagcgaggatgtgtgtaccaaagctatgaagggaatgggagctagtctggagaatattctagagtttgagttagatcgtttcaatgattacccgatggcgtacttcccgggaaagtcatatatgacttggccagtgaggggtacggaaactccgggatctgtggtgacaaaaacttttgtaatcaaggccgagacggttaaaaatctttacgagaacagggatgaccgaagagatgaatatttctataagctggattcaatgtcgcatgatacgatgtataaagtgaatcaaggatatgcttatgtatataaatggcgagaggtggtttacgaaaatgtgtcgtggagtcctactccacaggttgcatacgttgatgcgaattatagctattggcgattagcagatatttatttgttgagagctgaatgttatgcgaaattgaatgatgatttggcaaaagcggatttgaataagattcgtgatcgggctaacgcaacaccttatcctgccccgggagagagtgatattcaactggcaatctttaaagaacgagagcgagaactgctgtttgaagggcatcgatatttcgatattatacggaacgggttggaatatatccatacttatatggatggtaattacaagacattggatcagcaggatgtgaaagagggagcattgtttttaccgctctataccgatgcctttactttaaatgatttaatacgtcagaatatttattggtcaagattcgagtaaattaaaaatgaagacaatgaaaaacataggaataatcttggttttgctctcgcttttttcttgcgagactaaatacaattacatcgattcgggtttagctaacggtcgttttgacggaacaatgtatgactatctgcattccaattcttacgattgggatagtacgttactcttggtggaacgtgccggtctggaagatttgtttcaagggaaacaggccgggtacgagaaaataacctttttcggaccgacaaatttgtcgattcttcgatggatgatcgagcagggatataatgctgtccgggaaattccggaggcaacgtgtcgggagttgatattacggcatatcgttgccggaattcattggcgtgatgatatcccccggggggaacaggtattgggagagacacaagggaaaggtggggaggttttcaccagtgctttcgggacaaaattctgggtatattcgtttcaagatacttatcatgatattccggacgtgggacccgtgtatttgtatgtcacttcgtttgacacgagaacgcagattgacgtcgcttcaactgatatagaaacggataatggggtcgttcattctttgaattattcttatacttttggacaattataaaaacgaaatgctatgatgaaaaaagtatatttatttcttgtactgattatttcctgttggggatgccaggatatgaaggtcgggtatttgaaggcggagaatgccggttatttaccgaatgaattagaagtgaggaaaacattggatccggaggaagatgctgttaggatggcgaatgaggctccttgggtgactcagaaaatacagggagtactgggaacttcccccctgttgtttgaatttgtaagtgtgaaggcttcggagggaggagatgcggaaatattcaaaaaagaaattacagtccgcgggggaggagttatggagttaccgttatacacggaattaccggagggacgttatgtcgttactttgaaagtttcgaatgatggttactctgagttattatcagatgtctatacgtttgttgtaaaataagttaattcagctagagttcgatgtcttgaattggactctagctaaaacaatagtaaaaatgaaaacaattctggttattgtattaatatttataggaggaattcaggctttcggtcaaggaattgaattctttaaaggagattataatgcggctttagaaaaagccaagcaagagggaaagatgctgtttgtagatttctatgtggattggtgcgggccttgcaaacggctggctaaagatgttttcacacttgaggctgttggaaattattttaatgaaaagtttgtttccatacagattgatgcggagaatcccgctaatcgtcaggttgtggaacagaataaagtaagatcgtatcctacactggctttttttgatgcggatggaaaattactgtctcgcttggaaggagctcttgatggtgccgctcttataaaatcggccaaggttgtcacgggggaagagatgagctttgaggagatttacacgaagttcaaatcttctaaaaatgatttggtactaatgcaacagttgttgctaggtgcccccacttacgtgagtacattggaaaatatggaacaggcaaaatggattgcccgaatcgaaaagatttttaaggactatattgatttgaaaatgggaccggaactgataaatgtagatgattatcgtattatcaatacttttcatcatgcggataagccgggggacaagttgatggagtttatgaataaaaacatggaggcttatttgaaacttggggaagggcctgcttattttgtgatggagtacaataataaaatcatggagaatatggctcgtgccggcaaggaggaatataaaaaatacttggaacgcattgatggggatatgaaattgacatatagcgtggttccacagaaaacgatgtctgcccggcagcgtttcacctatttgtatgatgccgagtacttacttttttataagaaagatggggagggatacgtgacgtcaatggatgcttattttaaagaattgggagaggatgcccgtgccgttgattatggaatggcagcccagcaagtttataccgcaacaggaggaaaggtgcctgaaagtgttattttgaaaacgaaagaatggacggtgaaagcattgcaatatacagatatttcgttgatggataaaattaactttttggctatgttaggggataccaataaggttttgaaagaatatgtggaggcgaagaagtgttataatcaggcttttatggaatccatgcaaatggaacaggaaatgacaaaagcgatgattcaaatgaggatcaagcagaaattagccgctttagatttgataaaataaaagtgatgtaatctgataacagtatgttttaatttcataattttgtaatatacacacaaaaacaaaacacacaatgaagagtacactaattatggctgttattatggcatttgcttttatgggatgccagccgaagattcaggatttaagcgtgaaaagtgaaaaggttacggcgaattcagagaattgggacatcacggtaaatcgttccatgttctcgtctgctgatgcgaatgtgaacaagagctgcgaggttttgaacaagaaaattgagaagttcgtaaatgacttgcaggatagtttgaagagtgatgcgaacgagtttttccagtcatggcaagggaccggggaagaacgtcctgcatggatatacgaattgcaagtgggagatagcgtatttatggcaaatgaccagtacgtgagtgtacgtttgatggtttacactttcactggaggtgcgcatggaataacgaatttctacacgttcaactatgatgtacaaaatcagaagttcttgaccaatcaggagattttgaattatactaacgagacacagataaatgctcagttgaaggcgaatttcaagaatccggaaggttgttttacaacagaaccaacgttgaaagatgtgacggttgttaactttaataaaacctcagtttgtttcacctatggtcaatatattctgggtgcttacgcttgtggggtggctgaagtgaacgttccccggacggcgttgaaaaacgatttattgattaaataaagtgatattgctttatagaaattggccggaagactttccggccattattcattttagtaaggcggcactttcaaccagtcggataaactctttcctatacccttccggatcgtaattcgtggcttgtttggcgaggtcgataacgtcgtcgaatgtaaaattattcttgtagtccgaattttgtaataacattccgaatccggcaacggcggcagagaatcggaaattctcggaactcttttttatcggggtattattgtcaataacagttacttccattttagaacttttatgcgaatccggttgtttgtagcgaagtttcacggtcagtagttccgggctgtctgttaacattttcttttcattcttctcggttttctggtattttagggggtcgatgtttggagcaaaattacttttaacaccaaccggaatgatctcgtacaaggcggtaacactatgtccggctcccatttctccggcatctttcgtgtcatcattgaaatcttttgcttctagcaggcggctttcatagccgatcaagcgataggcttgaaccttggcgggattgaattccacttgaatcttcacgtctttagcaaccgtgaaaagggttccaccgaattcattcactaatactttcttcgcctctgtcaagttgtcaatgtaagcgtgattcccgtttcctttctcggcgagaacctgcattcggttatctttataatttcccatcccgaaacctaaaactgtcaggtatataccggaggttcgttttgtttcaatcatcttttccagttctctgggtgaagaaatcccgatattgaaatccccgtcggtagctagaatgatacgattattacctccttttgtgaaattgctctcggcaacccggtaggctcgttgtattccatctccaccggcagtgccaccactagcatataatccgtcgattgcatctagaattttagctttgtcacttcccggggtagaggcaagtacctctttcgtgtggttcgcataagtgacaatcgctacccggtcttgaggacgaagttgtttcacgagtaatttcaaggaggatttcaacaacgggagtttatttgcgtcactcatggaaccggacacgtcaatcaagaatacaagattggaagcgggaagattatccgtggaaacttcttttgctttgattccgatgtgtaccaacttgtgttgcgtgttccacggggcgttggaaacctcggtggtaatacttaccgggtctttctcctgtggagcgggatagttataggtgaaataattcaagaactcttccgtgcgtatggcatcaaccggaggaaaagtcccttgattaataaagcgtcgtacattagaataagctgcattgtccacatcgatcgagaacgtggaaagaggttcgtttaatgccggcaggaaacgatttgcggcaaatttattatactcttccgtgttttgtgtgtaagctaatggcatggctcctccacgaatacgcattccggaatggagtttaaatttggcactttcatgatgagtgactccgtatccggtaacaatggttgcttcttccatgaccatttcgtcctcttttagatagacatttaattttctctcttttaccgggatattttgaatttctaacccgataaaactgaaatgtagggtatctccgatatttgcctgtatcgtgtaatttccctgtgaattggagactacacctatattcgtgttcttaatgcgaatggtgaccccgggtaatgccgaactgtctgcggcaagcattaccttaccgtttacttggattttttgggctgagacagcattggataatccaataaatataactaatccccatgcaattttttttagaaagctacttgttttcataagtcgttatttttgaattaattttatcctaagatgacagactaaaagaaattccataaatctttcgagagatttttttaattcttatatttgtaaaaatcaatgtataaatagtgacgcgaggtcaggagaacataacggatgaagaactgctgaaaagatattgtgacagtggtgacttggtgtatttcgtggaagcttataaaagatacatgcctttgatgtacggggtagccttaaagtatctgaagcgaccggaagatgcacaagatgccgttatgcaattattcgaagaattgattgtaaaggtaaaagcggtagagatacaatcatttaaagcttggctatatacctgtattcgcaataattgcttgatggaaattcggaaaaagagtaaaaatttatctatttctttagacgattcttttatggaattttgcgacgattttcatcttacatttgtaaatgagaaggaaaatcgggagaaatcgttacgggaatgtgttgagggattacctgaaaggcaacgtgtcagcgtgaaatatttcttcttagatgaactttcgtacaaggaagtggaagaacgcacgggtttttcttcgaaaatggtaaagagttttatacagaatggtaaacggaatttgaaattgtgtttgcaacgtaaaggaataacatcaaatgaaacggattgacgacataaaagaatacctgcatggcaaccggaagggaaaggctgctaaccatatggagcgggaggcgttgtccgatccgttcttgtacgaggcgttggaagggttgacttcaactcccggagacccgattgatggcttgattcgtttggaacgccagttaaacgaacgagcccgttcttctcgtaaacagaagcgggtatggatgtatgttgcggcctcgttagcagttttattggcttgtgggacatggtggtttacccggcaggagaaaacttttgatgtacccatgatgacggttgcccaattatcagattcggtgaagactaaagagaaagagagactgacacttgaaagtgaaaaagcgatagatttgtccgatgaaacggattctttaacggtacgttcaaacgataaaagacagttgccacactcggctgacgaagtggtaagaagaaaggattctgtacgggagatggtgatggaagagcttgctgatcaggaaatttctttggcaagtgttcaaatggaagatacttcccgactgacaacccagaaaatgaaagtaatcaacaatcacgtgtcgggtacgataacggatggaaagggcaatcctttaccgggagtgactgtaattctttccggttccacgatagggggtgtttcagatggtaacgggcactttagtttggaacttcctgcatcagagggggtacttgctttttcttttgtcgggatgaaatctcggaatgttttggttaaggcgggggataaattgcaagtgaagatggaagaagatacggaaggtatggatgaggttgttgttaccggttatggtgttgccaaaaaacgggaggtcgaaatgtctaatgtgaaaatacgggggacttctactgtttccggtcaacccaatgtcctgcttgatacactggtatctaaagatgatatttcccatttcaatcaatatatgaaaaaagctttgcgttatccgaaggcagacttggattcaaataaaatggggacggttacactctcgtttgaattgaatcggaaaaaagtccctagccggatccgaatagaagatgggttttcgaaggagagcaataaagaagttatccgattgctggccgagggacctaaatgggaaaacacgccatccggtaggcgaatacaagtccatatccattttacgatcggaaagaatggcgaatctcataaagccatcttgatcgtgttgccttccggggttaaacgaaaaccctaaaagagaaggtgaatatcttcttctatcttgcgaatggcaggataagccccgaaatgtaaattcttttttagttgatcgtcaatactatttcgataaccgaaaaggttgatatggggcggttgttgtgaaccggaatacgaatctttcgcgatccgtagtacttttttacaaacttcccggttcaacatataaaccatatcgtaaatattatgcccccggataaaaagatacgtggtgtctggggttagtcccattttttggtacttttcttctagtatagaaaggttcgctttaggataattcttccggagttgggcaagtttttgttcgatccgtcctttcaacttgtttaactcgtggcgtccgttttggcggatgtccggtcgacgttgccattgaaatgaaatcagttcgttgaaatcagcgatcgagaaccgtttgggatctgccaccaagaaataaagatgccacaggaataatttgtacacgatattcgaatactctttcagaaattgatggaagtcgaacacgttgttaggcagggctgtgatccggtagcatagttcgttcaaacctttgtcatagcaatgatggttttcgaaagagtaggtataggtctggaaaatgtaatgcttgacatcgatcccttgttcttgcagcaaatagcgatagtcactgtcaatacagataaaaaacttcggatttagatatttgacatatttcagacattgcgtcacgcctctggtttcatggccccgttcgtttcgggaacccgcgataaaatgaaaccgatcattcgggcgaaaatgtttgaaaatattactccagaaaacaatatcgtctttatcttccacgtgaatagctgcccgacaacgtaagagctgggcgtccatcataaaacgtttggctgcatggtaataatatttttctttggatacgggaggatgatacatagaaagataagagctaaaaactaaataaatttctaaaacctaaaatcataaatctaaaattaatgaggtttattaaattaataagtcttcgataaataccaatttatcgccccagccatcaccgaataagctcggggagtgagttgaggtgatgatttgacaatgtgggttcagtttttgaatttcttcaaaaagacggtattgccattcgatgtgcaacgagatttccggctcatccataagcaggatgtacggttgctcatccatgaggaatacgcgtaataagatgatgagcagctgcttttctccggaagaaagtttatataggtgaatgatttcgttaccatctcggaatactaactgatttgtcatcgggtcgatttcaatggtttttcctgtcccggcaaataagtgatttacggtatcgtagaatttgcgtattcggcgattgatcttttccgcttggtccgggaaatttgtggcccggaggcgataatcggaaaacgagttgttgttctcccccacgctatacacaatttctttcagttcactgagcaatgggctgtcctctttacccatttttcgtcgatcacggattggtacatcaaaggtgcttatctttaggtaatttaccccgttaagtttttgttttacggaagctagggtactgtctttccgaaaactgatcatggtttcatcaatggtaacttctgcttcgatattgtacaatttcagacgtttgatgtctgcagaaagcaaggcatcaataatgttgaagaacgtggttttcccgctaccgttaataccggtcagaatattcacgtcgggattgagattctcccaccggaaattatattttccccatatattgcggatctctattttctgaatcttgttcgctttcataatgctacactttgatggtaaagtttatccgttatttgacaaagataatgtttgcaggctgaaatctcttcaaattcttatttttttatatagaggatttgctaaagctaaatatgggaagttctttagaagtgtgtatgtataatgatttcagagaccggaagctgtctctgaaatcatttgtaattctatcttaatttatttatgggtcgggaatctataccaattaggattttctacacccttactttttgcccatttgctgaactccgggtagaacttgtcaatttttacactttcgtccggtatttggtaatccgtgataggaagatctattgcgaagggataattatcttcggcgacatagtaattggggccgataggatttcctcctttatccaatgagcttttatcattattacgtccgaagaatgataaattggcaaacggggtcgggggatagttcgtgagatggatttcccgacgagcctctttgcttgttgcgttaaaacctttggtgttgacacagatgaatgggttgtagagttttttccttgagatttcatgtatcgttttgttccccttcaattcgaggacaacagttatcggaccatttttaacggcttgctggatatcatcgaacaacatgaatgtcggtagctcctggttaacttccataccactattctgaatggctgttgatgatgcgttatcgatcttgacattgctgatattatttttgtccatatctagctggtagccaaaagcactttttaaaacccctccggaatggatcggagtaaatatgtctttgatccccgtgattttattatctttatcggtagtgaaaaccgtatggtacgtaaggacaacgtcattcatgtcataatctccttggctgggccataaatcttcaaataccaatgtaccttctagcgggtcgctttcaaggggagggtattcttcatccgggtcggttgttggtttgttcgggtcataaatggcttcttccggtgtggagttcaggtaaaatagaacatccctgtagtcattgtcaccaccatcttcgaagccgtttaccgtggttttgcttttttcgtcatacaggcttatgcaaacgcttttgccatcataattgaattcattattggagtacctgattccgtgcctaggactcatgagattgactttgttgccgccggatgatccgacttcaaatgcgtcgggtaacataaaccatccgatggtggttcctgccgggaatatatcgctctcttttccgtttttgtcaaaatatttaagttgtatctggtagccgggatataacgggggcatataattgtctgtgattcctgcatcccatccccaggtagaacaatttgggaaagcgacatatttaggttggaattctaattcttccccgcttggaggattttttgtattgtaataatagtagccgataacattccggtaagcggcagcttctcctagaaatgtcagtttgattcttgcatctttcacgatatttgtgttgatgacttttgttgatacggccaggtgtgaattatcctgagctactaaaatgttgtttaggcgatttactagcccttcagggatgacagcaggcatcgggtacagttctccattgtgtatttcacctagaatataatctggtaatccattagtattatatcccccgagaaattggatattgtacgggttgtttgccgagttcactctggacaaacttttgtttgcggctatggattgagaggtggattgtgatgtggacgaacgaaggtgatctttataatcctctaaattgaatttaatatccgagttgtcaacttctatttccacgctggtcggtaaaatataattttccgagtaaagatagattttagtgcaggctgtcgggagatttacaataccggaatatttgcaagcattgtccgtgtaagcttttaaaatggactttacattttcttttttcttagcttttccattttctatgacaatgggatcttcggtaaacacctcgaatacggctttgttacctttcatgccgtaatcaatgtccagttttttatcaaccgtggtagcaaaatcaaaaacatcttctgccggttcatttttgtttggagcgtaaacatcctttttgcaggctgaaaacaatacaatgcacattatccatcctagtagcaacgtgcatacatacttgtaattattcattgttcttcatatttttcacaaaaatacggaaattttatttgtaaatatttcgatatagtgtgctattagtttccttatggaatgaatgatggaagaattgtcgagcaatataatatttgtgctccatcccatgaatttcttttggaatttgtatttttgtggcgttttctgaaaggttataaatagataaataaatacagtatgcaaggactttatgcgatattattattgatcgtttcaaacgtgttcatgacttttgcctggtatggccatttgaaattacaagaaatgaaatggattgacaactggcctctcttcggggtaatcctgttttcgtggagtatcgctttattcgaatattgtgcccaggttccggctaatcgcttgggattcattggaaacgggggacctttttccctgatgcagttaaaggtggttcaggaagtgattacgttaaccatcttcattattttctccatgcttttcttcaaaggcgtaacttttcaatggaatcacttggctgcttgtgtttgtttggtgctggctgtttactttgtatttatgaaataattgtggtggagtctgtttttgtaggcttggtacctagcggggtaaataattattgacaatttgtgtaacctgaaatcatcacttaacgttatttattaaaaaagttggtgttatgttttcagtggaacttcgttatcgggcgagaaaaatttataggtctgtaaaacagattgtcgagctggtaagtaatgtgttgttatttctggcctcttttcttgcgattattttagtcatttatcgcttcggctttgatatgccggctgattattctcatgagatatattatacctatcgggctatcatacgccttttcgtggttcttggtttgttgcggtttttgtttaatttcaggctactacgagcggaaaaaggattctggatagaagtgttggtattactttttctgtttgccttgaccttgttttccaaacattttgaccgaccggatttcgaggcaaccaatccctttcttttcaaagtcgaacggattctgacgtatggcgtggtattactattgagtatcatacaactttcgaaacagctatttgttgtcctacgaagtcgggtaaaagcggaagttctttttgccgcgagttttttgttcatcatcttgttcggggcagtcttactgagattacctaatgccacgtacgaggggattagcttcacggatgccttatttacctcgacaagtgccgtgtgtgtgaccgggttgaccgtcgttgatactggaaccaccttcacgttgaccgggcaggtcgtgctactcatgttgattcaggtcgggggaatcggagtgatgacttttaccagcttttttgccatgtcatttttgagcgggacttcttttcatgatcagttcatgatgaaaaatctgttgaatgaggcctctttgagcgatattttccggacggtcgtgtacatcatcctaactacgtttatcattgaggggataggtgtttaccttgtctatgtgcaagtacaagatgtggtgggaattgacaataaactcttttttgccctgtttcatggcgtttcggctttctgtaatgcgggattctccacgttgccgggtaatctctatgatcctttgatcaggcatttgtatggcttgcaggttattctggcttttttgattatatttggtggtatcggattcccgatcttgttcaattacgggcggctcctgcattacggtattcggaataagatcaaatgcttgttgggaatgaattacaaggtggtttacgaaccccgtatcgtgagtacgacaacgcgtatcgtgctaccgaccactttaatcttacttgttgtgggtacggccttgttctggatatttgaaaatcataacgtgttggatggaatgtcatttacgggaaaatttgccacttcttttatggcagccgtcacccctcgtacagcaggttttaacaacgtgaatatgcccatgctgcacgttccgacaatccttctcacgattgccttaatgtggattggtgcggctccgatgtccacgggaggtggtatcaaggtgactaccttcgtgattgccttaaaaaatatatgggcgaatctcctggggaacgatcgggttgtcatcgcgcatcgtcaattaactcgggagaacgtgaaccgggcacattcaatcatcatgctttctatcctgtggatcattctggctgtttttgttatcgtggttttagaaccgaaggcaaccttgactcaggctgtttttgagattgtttcagctttgggaacggtgggtttgactttggatttgacgccccatttatgtgtggcaagtaaaatgatcgtagccctcaccatgtttgtcgggcgtgtaggcttaatctcccttttggcttgttttatccgccatcaggaagtaaaactttacacgtacccggatgaaactgtaatcgtttaatcaattttcaattattatgaagtgtatcgtatttggattaggtaatttcggacttgcactatcgcaacgtctgacaaaacggggtaacgaggtgttgggggtggattccgacatcagtaagattaatttatacaaggattccatcacgaataccgtggcattggatgtgaaaaatgaacaggcattacaaacattgcctttgacagaagtggacgtggtgtttgtggtgttcgggaaagatttcggaacctctctgttcgtgattgcgctattaaaacagtttggcgtgaaacgtatcgtggcacgggccatttcgccggtgcataaggtgattctgaagtctatgggagtcacggagactatcaatccggaatgggaatatgccgatttctttgcgacaaaagtggagttggggacaaccatagattcttatgttgttgatgacgatcatctaattatcgagtgggagattccaccccgttttatcgggcgaaaattaggtgatgcgaaattcgaggaagaattcgggttaaaattgatagcgttaaaacgctatgatgctaaaatcgataaatcattggtaatgaataacccgtctgatgataccgtttttatcgaaaaggatgtgtttgtacttttcggtcacccgaagaacttccggaaacttgggatccagattgcttgattcaggagagtc

SEQ ID NO: 10701 - DNA, 31082 bp, Unknown
  gut microbiota DNA sequence
aacagagggtaaatttaattctgacattggtttactaagtttactgtaaacttttttcaggacaatacactaccctttctctaccctttcgctatatcatgaatatagcataaacatagcaactacataacatgaacactgacgcatgtatatgctccgttcgtgttatgtaggaatttggttgatgcccacgagcaggggtagaggagggattaacagggaccagccttcccctgtataagggaaagtttataagaagaaccggcaaagaaaactttcaccaattcccactgttaggagtaagaaagggaacttatatatcatttggagacttcactcttataattactgtaaacttgtatataaattctttttcaattatttagtccgtcatgtattgtttcgagcgattttcttccactcgtttgggaggcatgatcaagattagtagggaacctaggatgataatgcaggctaggatataatctctcgtgtccagatccggacgtaagtcgatggagtagactgcaatccatgcctccagaccgaaggttaacatgggctggaaggcccggaaggtcatgaaggtttcggcagttgccgtttgcagagtggcgtagtacaggtacgtggagagtgaggtgagtaggaaacctgtcacgcaggcggcgataatcgtcatcgggtggaatatctccgtgagcttaggcaggtagagcattgaaaacggaacggccatgagttctttggcaaaatagtgttccacgagggcgattaaggtcaagaaaagtatgactgacgtgccgccccaaaacatggtgaacccggagatcccgcatttttggcgtacggaggtattgggactggcgacagtggttttctcgaccacgatggctcgtgtacaacttgccagaactgccagggagacgagaatggagacccgtagctgtatggtttccgggagggtacggataaacaggataatgcctaccgtgatcactagcatccccacgatgtcgctgctgtggggttttctcttgaaaaagatgtaggccagtattgctgttactacaacttctatattgattaacaagctggtttcagtactggtgatgtacaggtaaactgcggctagaaagaaattccggaatatttgcagtagcgtgtacagccatgaataaccgacgcctgctttccagccttccgcagttacgggttttcggataagtaatagtgcgactcccccggcgaaaatttgcatggaggcgaacacgagaatgttggcctcgtagtttaacaggcaaaaacgggtgatgacactgatgatcgaccatgttatgactgatagtaaggcatataaagcacctattttcatattttgttttttgtttctcttcggatataacgattcgattaggaaaaggttttttgtcaaaataaaatatacctttgttttagtatttataacagcatgatacaggaatgattgagatatggtagaatcggaaattagaaaagaggagtacacgattcctttacgggagtttttttacaagggaacgacaagggatgttgattgtaggataggacgtttgaaggcgttgaggcgggctattaccggacagatggaagagataaatgcggcgttgtggcgtgatttgagaaagtcggggggagagtcttacctgacggagatcggtatggtgttgggagagattgactatcacgtgaaacatctgagacagtgggtgaaaccccgacgattggcaaccccgctggctttttggccctcgaaaagccggatcatgtacgagccgtatggcgttgtgttgatcattgccccttggaattacccgtttcaattattgttggaacctttaattggtgccatctctgctgggaattgtgccgtgttgaaaccatctccttttgccccggcaacggcagaggttataaagaagattattgcggcggtttttgaacccggttatgtctctgtgtttgatggagaaggggatgtggtggagcagttgttgagagagcgttttgattatatttttttcacgggaggttcccgtttcggacagtatgttatggaaatggcagcgaaacatttaaccccagtaactttggagttgggaggaaaaagtccttgtatcgtggggcgtggtgcgaacgtgaagatagcagctcgtcgtacggcttggggaaagtttatcaatgccgggcagacgtgtgttgcccccgattacgtgtttgtgtatgaagatcaaagggcagagtttgttgaggccgtaagactggccgtgaaacgattttatggggattacccgtatgaaagtcctgattatccgcggattgttcaccgggaggggacagaaaggttagcgcgcttgatgcactcttctggacaggtggttgtcgggggtgaggtgaacgtggaggaaaagtatattgctcctacggtactgattgacgtggaggctgatagtccgatcatgcgggaagaaatattcggtcccattctgcccgtgctgacttatcgggagatagatgacgtgattcgtttcgtgaataagcgggagaaacccttggccctatattatttcggccccgaacaagaggctcgtgaagttttaaaccgaacctcttcgggtggggcttgtgtgaacgacacgatcgtgcatctggcaaatccccgtttgccttttgggggagtggggatgagtggagtcggaaagtatcacgggaaagcgagttttgaactttttagtaatttacgttccgtggtaaaatcttttacattttttgataaccattttcgctatgccccgtataaacacttgaatttattgaaaaaattcatgtaatgtctggtgagtttattatatttgttgaaaactttaaataatgaagactatgaaaaagtacatttgcacagtatgtagctatatttatgatcctgcagtaggtgatccagatggtggaatcgcacctggaaccgcatttgaagatattccggaagattgggtttgcccgctttgtggcgttggtaaagaagatttcgaaccggtggaggagtaaatgaagttaaaagataaaagttgaaagctgtaaaaagttccatttttatcttttagtttttaacttttatcttaataaaaatagaggcgaatcgtgagattcgcctttatttttattagtgtgcccattcggcaaagaagtcatttcccttgtcatccacgatgatgaatgccgggaagttttccacccgtattttacggatagcttccattcccaattcttcaaaggctacgatttctactgatttaatgctttccttggccaagatagctgctggtccaccgattgatcctaagtagaaaccaccgtgttttttacaagcatctgtaacagcttgtgaacggtttcctttggcaaccatgatcatagagccgccatgatcttggaataggtcaacatagggatccatacgtcctgccgtggtaggtccgaaacttccggaggccattcctttcggggttttagccggtcctgcatagtaaatcggatgattcttaaagtattccggcatgggcttgccttcatccagcatggctttgatgcgggcgtgtgcgatatcacgggcaacgataagtgttccggacaagttcagacgggttttaaccggatattttcttagttcttttaatacctcttccatcggttggtcgaggtcgatgttcacggcgggtgctaatgccgggttctctgccggtaagaaacgagccgggttcttttccagttgttccaggaagataccgtcttccgtgattttggctttgatgttccgatcggcactacaacttacaccgatacccacggggcaagatgccgcatgacgaggcatacggatgacacgcacgtcgtgtacccagtatttacccccaaattgggccccgatacccatgtcttgacagattttctgaattttggtttcccattccaaatcccggaatgcctgaccgccatcattcccttcggttggaagattatcataatatcccgcagatgctttctttacggttgtcagacaggcctcggcagaggttcccccgataactactgccaggtggtagggaggacaggctgatgttcctaggtctttcactttgtccttgatgaacttggtcagtgcttcctcggtcaacagagctttggtctgttgatacaagaacgttttgtttgcagagccaccgcctttggtgatgaacagaaactcgtatttattcccttgagtggcatataggtcaatttgagccggtaggtttgtaccactgtttttctcatcgaacatcgtgtagggtactacttgagaataacgcaggttgcgatcccgataggtttcgaaaactcccttactgatggcttctgcgtcattgccgtcagtccatacgttttctcctttcttaccgatagcgatagcagtacccgtgtcttgacaagtgggtagttcaccttcagcggaaaccacttggttcatcaacatggtatgagccacgaatttatcattgtcgctggcttctggatctttcagtatgttggctaatttctgcaagtgagaggcacgcaggtaaaaagaaacatctgcataggcttcacgggcgagtaattcaagcccttctttttgaattttcaatattttacgtccttcaacttcgatggttttcacgtagtcttttgtcagtaaacgatattccgtactgtctttttgaatcggaaatggttcttgatacttgaattctgccataattctttattgttttagtgttgttaatatttttattcctataacggaaaaatttctttaatatgtcgcaacgaaattagaattaataaatgagaagtccaataaaaaagccggacaaatttggtccggcttttatggatattaggctaatgactagtctttgaataacttgtcaatagttatgatttggtaatcgtagaatgcgcgggttgcagcatttccggtaccccgtttttctttgtaaagagcttgtacttttttcaacaatgataacatggcaggacgtcctactgatgcaggaagtgttgcagcattcattgtcatgcggaagtagtcatattctcccagattacatgcagcatggctacaaagtttatgttggctatttacgctgttttctaaagttgccaatgcctcggtcggatcgatagaagtaagtctttttggtgctgaggccgcaggagtagcttgaagaccactcatttggctggcaatggttactaaagcagcttgtaagttcatttcttcgtgagaaagtgaacgggatgcaagggtcggagccataagtaatttataagcgtcatttacataggcatcaagcttataagcgtctttttggccggaacgttctccctcgtatatactaccaagagtagctgcgttgaagattttacctaccacagcgtattgtaattgatcgtacatattcgggtttaattccaatttctctctcagatcattcgtgatcaaccatttcgggcatgtagttacttcgtttactaaccatttgatagcttcttgctgtttggttctcgggatgtattttttagctacaccgcctttaccgtcttgtactaggtccgtgaattcaacaccaccggggtaagccaacacgtggctaagcattctttggtactggctcaggattccattgtagtacatttttatgtctttatacgaggctcccggtttgctgcaccattgttccaagttgttcatgatgatcttgaggttcttgatacaaagtgaattggctttcacgtgatcatctcctaaatcttctgtctggtcagtcgggtcaagtgtctgcgggaattgctgcgccccgaaacgatacatcggatcgtcagatttttcttcgatccagctatttaatgttgcgacttcggcttccggagtattagcgttcggtataatccggtacccccagttgatagcgtaaatatcgtatactcctaatacgggcggaacgaggtttacaccgcgttcgtagtctccgggttgagccacgtagttgttacgagcgtagtccatgatacttggggtagttccgtattttttcgtgaatgacgggctgcgcaaagagtctacggggaaagagtaacttgcccccatgttgtgcatcagacctaacgtgtgtccgatttcgtgtgatgccacgtaacgtaaagattcattcatcacgtcgtcactgaatacttccgtacgaacgcgaggatcaacggctcccgtctgaacaaaacgccaatcgtgtacaagagaaatcacgttgtgataccagatcacgtcagccacgagaatttcaccgctacgagggtccacgtaactcggtcccatagcattagcagtaggtgttacggcataacgcacgcagttgtaacgaatatcgtccgggtcaaagttcggatcgtcggtcgggtaatctttggcgataactacatttttgaaacctgctttttcgaaagcgatgttccagtcctcgataccttgtttaacggcacctctccatttttcagggaaagcattatccacgtagaatataatcggttttaccggttccacgagttctccgcacaagtaagcagccatatctttcggctcgattctccaacggtggatgaattcgaaatcttccacgcggtctttatcgctcgtgtagaagttccggggagtactgaaataaccaacacgtctgtctttgtaacgtatgggcatgggatctttatccagttcaacaatggaacgacgaacaacaagggtaagaggaccgttttggccgttatagttcatttgagaggagatttccatgtttcgagggaagttctttacctctttcacgcgagatgcggatgggtcgaacatggcgctcggttttttacccgtcatcgggctggagcccatcggggtaatacatttttcatcccgtccgaagaatgcggtcatgtcgatcaacagcgtgtcgcccttggtggctttcacctcgaaggtcttcatgatcgggtcattgaagttccgtttgaaagatggggcgataggatcaccttctcttaacacgtcctcgcaaagcactgagtgcatgtatacgttcgtggaatccgttgagaaacgaaccatgaacggatcgtcgatcatctggcctgccacgaaatcggtaggggcgctggtttcagaaagacgattggcaatcaagtagatcttgtccaaattacgggcctgaattgcccacattaaggttccttttggggtgtagtaagcatcaataactcccggtaagtgcttagctcctttcacttgcttgtcgaaagcagattctttaggagcgggaggtgttgcggtctgttcggtttttgcttttttcttctttttcttgaaagggaaagcttgtgccgtggaccctgcaagtagtgacagggtgacaaccgcgagtaaaattttcctcatagttctcttcgtttaatcaattaattatatctcatttattagatttgtgtacatatgtgtaatgtttttaacagcgagcgaaggtatgtaaaaaagaatcgaatttatcttaccgttttgttaaagtttcatccgaaagacgattattattgtacctttgcaggcaatgaatcttaaaaacagataaaatgagttcggaaaccatattttttatcattgttgttttcctgtgcttggatttcgtgttggagagagtattggagtctttgaattctaaacatatgtctcccgtgttacctgatagtctgaagggaatttatgaagagaaggaatacagtcggtttcaatcctacaaacgggaaaacgggaggttggatagttggagttcgggggttggctttgtcgtgatgatcgtgtttcttgtggcaggaggtttcgggtggtataatagttgggtggtttctttgacggatagtgtggtctggcagactatccttttcgtggtggggctttccgtggtatcttccgtgttggatataccttttgattattatgcgactttccggatagaggagaagtatggttttaacaagactacgaggcgggtctattggttggatacggtgaaagagttgttcctttcgttggtgttgggaggggttttgttggcacttgtggtgtggttctacacgtgggcggggacttatttttggttgtacgcttggggagccgttaccctgttttccgtgtttatggctatgttttactcgcaactgatcgtacctttgtttaataagcagactcctttacaggaaggttcgttgaggaataagatacaggcttttgcgggaaaagtcgggttcaaattggataatatatacgtgattgacgggtcgaaacgctccacgaaagcaaatgcttatttcacggggctgggacctaaaaagcgggttgtcttgtatgacacgttgattgacgagttaacggaagaggaaattgtggccgtgctggctcatgaggttgggcattacaagaaacggcacacgttgcgttcaatggtggtttccgtgatacagatgggagtgcttttctggttgttttccttgtgcgtgaataacgtggctttgtcagaggcgttgggcggggaccgggcatatttccagatgggattaatcgcttttgccattttgtattctcccgtgaatttgattttgggggtcggtatgaacgtgtggtcccggaataacgaatacgaggcagatgctttcgcagctcggtattacgagggtgattatctggtgtccggcttgaagaaaatatcggtgaagtcgttaagtaacttgactccccatcccttgtacgagtatatctattattctcatccgtcgttattgaaacggatagatgctataaaacgtattcacgaataaaaatataaatgaatgaaagctattattattactatcggggacgagattctgttaggacagattctggacacgaattcacaatatatttcgaggcagttgacccgcttgggggccgaagtggcggatattttgtctattgctgatcaaagggaggaaatatggcagtgggtggattacgccatgaaacaggcggaactgatcatcgtgaccgggggattgggaccgacaaaggatgacgtgactaaaaaggtgctggcagaatatttcgatactcgcttggtgatgaatgaagacgtgttgagatggatcgggaagttgctggagaacgggggaatgaggatgaacgagggaaatcgtagtcaggctatcttaccggaatcggccaaaattctttacaatcgcaaaggaacggcttccgggatgtggtttgaacgggacggaaagatattggtgtctctgccgggtgttcctttcgagatggaggatttgatgatccagagcgtgatcccggaattgcagcgcttgtatccacacttacatctggattacaggatgttgaaagtgtatgacatcccggaatcggagttggctcttttgttggagaaatgggaagaacatttgccggaagggttcagtctggcttacctgccgtcgccgggatttgtgaagttgcgtctgacggctaagggggatcaggtttttaacttggatgcccgttacgatagcttgaaagaggctcttgaaggacagcgttacacggaaggagagaatggcgggacagaacgggaacttggggaattactgatgttgaagggaaaaacgattgccacggcagagagttgcacgggtggaaatatcgcggttcagctcacgtcgatagccggttcttctgcctactttagagggagcatagtggcgtatgccaatgacgtgaaggaacgagtgctgggagttcgtcctgaaagtttggaacaattcggagcagtcagtgaacccgtggtacggcagatggcagaaggagcccgccgtttggtcgggacggattatgccgtttctacttccggaattgccgggccgacaggcggtacggccgagaagccgataggaaccgtgtggatcggggttgccggaccggaaagaacgattgcccgcaagttcgtgttctcgtttacccgtgaaagaaatattggtaaggccacgatgaaggcgattgaaatggttatcgaagaagtgcgtaacggggcagtaaataaatgaattgtttataaagtgaatccgtcgtgaatcatagtaaaaaggcgggtctcggtaaacttttttgtatttcatgttcctatttcgaaaatataaattacatttgcacatctcactcagaaaataatacaacgtgtagcgacgctgaaggtattataaagcctccggtgcgtggctatgcgtagtgttaaattttgggtgagatcttaatttacagtccggaggcttttatgttttgtatgtaatgtaaataatacatatagatattgttcgtagggtaacaattttaaaattctaatttcactaaaatagcggggccgtgacggttacccgcttttcttttgtgcttggcaggaattttgttatatttgagaaataaatctttgctatgagaaagtttacattgttactatttttcgttgttctttggtcgttttcttacgctcagatgggtggagaacaatattttgttgatatacatggtgatttgcgttatgaatctcgggatagatttcaagcatcactttccacgaatatcttcggggataaggtttacaaggataatcggggaaacgaggtgaagtattcgaagacgatgtgggagaaggtgccggggaaggatagaccttattttgaagatttcttgttctctgaactgatacataaatatcgggatcggagaaacgtgcatgaggtgtatgaaatcgatatttttggagatgcacgataccggaataatcagggacaatccatgacattaaggcggaatatcatgggggagttggaatattccagtaacgagtttcgagccacgttaggaaaagatatttttgaaaatgtaatatataaggataaccggggaaataaggttacctattcaaaagagtttcttggtaagctccgaaaaggaaggcatagaggagacaggaatattgaagagtttttgttgttaggattggccaaagatgtcggaaaaaagagaaattacacggaagagtacaccgtggatatattcggaaatgttgaatataagaatagcgagggacgtcgggtttcgataaaaaaagatatgtttgacagtttcgagtataaggataaccagggggtaagtctttctatccggaaggatatttttgaccatgtgcaggtaaatgatggcaggggaaataaagtggatgtcggaagagatattttcggagatctccaggtgaaagataataagggaaataaatggagcgtggaacgggatatattcggggatttgaagtttcgtcataattataaagagtgtgcaaccttgaagaagaatatttttgatgagagagaatattccgataataaggggaataaagtcaagtattcgaaggaatcgtgggataagatgataaagaggttcggggatgacgagaaggttttttcgatgttgttaaaaaagttttttgggtcattctaggtgtagacgaggttggagatgaaaaggcgggattgtcttgttgatatcccatagacttgtcctcggagtgtctttacgcctttttggcatatggtttggattttgtcatgtaagtgacgataatgatagcgtgacatgacaataaagcaggtacgtgtgtagaggttttggtgtataatttttttttttgtattcttagttttggctttgtagttatgtttttgttaattttttgtctttagttaatagaaaaatactattgttggcataatatttgttaatgattttcttatttgaattggtataaagttaattaaaatttttaatgtgatttttttctatgggagtgtaacatttttaaacgagaccccgtatttcgaatgttatttaggattagcttagatatataacaagcaaacaatagttaacaaacagatgatgaatatgaaaaagacgtttattttgttatttgtagcgattctgccgttattggctagcgcacaaaaagaagaagttaaggtgactgtggtagaagaggaatcaacagctccttggcgtggttttgttaccaatggattttgggataactggtttatttcaataggtgctggcggacaagtttattttggcgagtatgatagtaaggatgatttcgggcgtcggattaccccgacatttgatttttccgtgggaaaatggttgatgccgacattaggagttcgggctcaagttggtggtttcacgttaaaaggtttgacgactgatcctgctaatatttacgctaagggtccttctcgtgtagacggatattataaacaaaaatggcaacagtttaacgtgcatgttgatgggttattgaatctttctaactggattggcggttaccgtacggatcgtttctacgaggcagttccgtttgccggttttggtatgattcatggttgttcttccgtggacaacacgaagttcatgttcgtggcaggtttgatcaataagatgcgtttatctaacgcttttgactttaacattgaaatcaagggtagtttggttcctcaggcatttgacggtgataccggcggcagcaagggagaaggtattttgggtgtaacagccggatttacttataaattcaatcagcgtaattttagaagagagaaaccgacggaaatcatttctaccggagtttcaccagaaatgttgagtgctgccgaggctaaattggcggagcaaattcgccgggcagatcgtttgcaggatgagttgaatcaagctcgtaaggctcaaccgcaagttgttaaagaggtaaaagcagccccgttggctattttcttcaatatcaacaaagcaaacattaccgccaaggaaatgattaacttgaaatactacgcagagattatcaagaataatccgaatcaagtttatcgagttaccggatatgcagacaaagcaacaggtactcctgcttacaatcagaagttaagcgagaaacgtgctcagaacgtggcagacgctttagtgaagaaatttggtgttaaggccagtcaattgcaagtcgttggcaagggtggggttgacaatctttacgagggtggagttcaattgagccgcgtggttatcgttgaatgatattaagactacataactactaaccatttatacattttagaggccggggtaaagggtgatacttttatcccggtcctattttatagctcttgcggttttatataacttttagcttttcgctttcagcttttcgcttaattagttgtatctttgcccgtgaataattaaaaaacagagaaatgataacaaagaataagtttgtaaccgtgagttacgagttgagaacggcagcggatgcagaacccattgagatagctgacgagaaaacccccttggagtttatttgtggtcaagggcaaacgctggaatatttcgaaatgaacctgttgaatttgaacacgggaaattctttcgattttcatattccgtcagctaacgcttacggtgaggtgaacgaggacatgattgtagagttacctaaagatatatttgcggaagttgaggcggaagaattgatccccggaaacgtgctgccaatgcaggatagtttgggacgtcacctgaacgggacaatcgttaccgtgggcgacgatacggtgaccatggattttaatcaccctatggccggtaaagatttgtttttcaaaggtaaggtgttggcagtaagagacgctactgatgaagaactggaaagcttacattctcacaaatgtggcggttgccacggttgtgggtctgatggcggttgtgggtcagaacactcttgtggtgacggttgctgccactaatcaattgaaaatggaaagttgaaaatggaaaattgggataatcaagtcttgattttccattttttatgcagtcccaaagttcaatccatattgatttttgaatattagaagtgttgttctccttcattttcatttgttatgaacacgattggtaagttatatacgttaacctcttttggcgaatcacatggggaggcgcttggaggagtgattgatgggtgtccggcaggaattcccttgtcaaaggaagagattcagcatgagttggaccggaggagaccgggacaatcttccgtgacaacatcgagaatagaggaagactgtgtggaaatactttcggggatattcgagggagtgacgacaggtacgcctatcggttttatcgtacggaacaaggatcagcggagccgggattatgatggaataaaggatttgtaccgtccgtctcatgccgattatacaatgcaggcaaaatatggtgtccgggactaccggggtggaggacgttcatcagcccgggaacacgtggttcgtgttgtgggtggagcggtggctcgtcaagttttaaagaggttggggatttccattcatggttacacgtctcaggtggggccgatcgtgttgaataaaacttatcacgagctaaatttggaggaaacagatgccaatgtggtacgttgtcccgattcggtgatagcgagggaaatggaattgtttattcggaaagtacaggaggaacacgatagtgtgggaggagtggtgagctgtgttattcgaggtgttcctgtcggggtgggagaacctgtgtttgaacgttttcaggcccgattgggatattacatgatgggaattaatgcggcgaaaggttttgagtatggagaaggattccatgctgcaagtatgcgggggagcgagcataatgatgctttcgtgatgagaaacgggcaagtgaggaccttgacaaatcatgccgggggaattctgggaggaatcactagtggggaagatatttattttcgggttgcttttaagcctgtggcaacgatcgggcaggaacaacaaaccgtgaatcgtttagggaaagaagtgactttcattgctcggggacgtcatgacccatgcgtggtgcctcgtgcggttcctgtggtggaggcgatggctggtatgctggtattggatatgatgctggaggctgggaaaataccctatcgagtatgaaagaagtaaatatttttttgacaataagcttgtttaggatgatattctttattaattttgttggaaattaaatatcagtgttatggcaagtattagaagattgaagaaagatgttgattatttgactttcgcggtaatcgccgattgtatgaattacaattctagcgtggggaagagtgagccggaagttgttaacatcgtgaaaaagatggttgaatatagaaatgaaacgagaagtaaaatttctgctcgtaaatcatttaacgataagaaagaagctagatcttattataaaggaatatctatcgatctattgaaaacagtagacggagaatttacccgtttgagcgagttggtaaaacagaacgcttaaatgatgattgcccccaaatgtttgagctaccacgttctgtggtagctctttttgatgatgaacgacgaaattgtattaccgggaatcggtaagataaaggtgagacggggaaagaatatccgtttcctctcggtgcgaattgcaccgggtagaggcgtgtgggtaaacgtacccttcggggtaagcggacggcaggtagaggaattcgtgcatacacaacgagattggatagagcagaatttggcgaagatcaaagtttacgagaaagacacgggggtggggttaggtatggattccgaggtaaagacgaagtttcatgtactgaaagtgcttgcctgtgatgagcagcatccatactataagatcgaggggaaggaaatccgtctatatattcctcgtggtacggcatactcgaaaattgctccctacgtggagaatttcttggtagagatttatcgtatggagagcaagcgttacttgccgggacgagtaagggaactggcagtgcagttcggttttcgttaccgggcattgtcttttcggaataatatatcgaactgggggagttgttcggtggacgataatattagcctgaatgtgaaattgatgaaattgccggatgagattattgattacgtgattctgcacgagttatgtcatacggttgaaaagaatcattccagtaatttttgggcgttgatggaaaaagtgtgtcccgggtgtatgcaattacgtcgtaggttgcgtcagtataataccagagtttgaacggtattttttcttcacggcttgctagccagaacgtgagaatgaacacgattcccaacataaataataacatttcgactcttttcatgatacaagttttaatatacgttttatgctgaaatgtggccaaatgttacgtttttgggcgttttttattggtatatttgtaaatgttggaaaaagaggaatccagcttgaggtttattcgttatatttggtcgttatttcttaaataagtgaagacaatggaaggacaatattgttatcaataccctcgtccggcggtgaccacggattgcgtgattttcggatttgatggggaggtgttgaaggtgttattggtggaacggggtggagaaccttataaaggttgctgggcatttccgggagggttcctgaatatggatgagacgacggatgaatgtgccgtgcgggaattggaagaagaaacgggattgaaagatgtgtttgtagagcaattacaggctttttccgatatagatcgggatccccggggacgaacaattacggtggcttattatgctttggtgaatcccgtggggatgaacgtggccggatatgacgatgcggcagatgctcaatggttcgctttgtcagatatgccttctctggcttttgatcatgaacacgtgttgcaggtcgcattacatcgtttggcattgaaagtttatttacaattgaacgggatcgagaaactagatgaacatttcaagggatttgacttgaaacgtttgcaaaatttgattcctaataagttataggatatatggatagattggaaatcgttgaggcagatattaccacgttggatgtggatgcaatcgtgaacgcagcgaatacttccttgctgggaggtggaggagttgacggggctattcacagggcagccgggaaagagttgttggcggaatgtcggacgttgaacggatgccgaaccggggaggcgaaaattacaaaaggatataatctgaaggctcgtcacgtgattcacacggtaggaccggtttattctgacgggcgacagggggaaccggagttgctggcggcatgttaccggaatagtcttgccttggccgtggagaacggtttgaaaaccatcgcttttcctctgatcagtacgggtgtgtacggttatccgttggaggaggcgaccccgattgctttgcgtgagatcaaggccttcttggagacacatccggatttcgagcgggtgattgttgcttgttttagtcgtaaggcttatgatttgtatatgcaattgacaatggaataatgacaataatttgtaacctttaagcctgttgaccttaacaaaacgaatgtttgttgggaaattaatttataaacagtaattttgtctgaaagatttataaaaaacagatattatgcaagagatagtaaaagagatacgtgacgttttgtcggaagtgaaatatcccggcacttcgaagagtatcgttgcgctggatatggtgcagaatataaaggctgaggacggtaaggtggatttccgcttggtattccaaaagtccaatgacccgttcgtgggaacggtgagaaagaaatgtgaatctctgttgaaagagaaattaggatatacaaccgtggagattgagaccgtgttcgtacatgacttggagaaacctttggccttggagaaggtgaaacatattgttgccgtgtcttcaggtaaagggggagtcggtaaatcaacggtagcttcaaacttggcggttgccttggctaaattggggtataaagtcgggttggtggatgctgatatttatggaccttccatgccgaaaatgttcgggtgtgaggatgccagtccttatatggtagaagtaggaggtaaggagttgatcgagccggttgtgaagtatggagtgaagttgttgtcgattggtttcttcgtggaccccgattctgcaaccgtgtggagaggaccgatggcttccaatgctttaaaacagatggtagaaggcggtttctgggatgaactggactttatgctgattgaccttcctccgggaacaagtgatattcacttgactttggtacaaaccgtagctttgagtggtgcaattgtggttagtacaccacaacaggtggctttggctgacgccgtgaagggaattaatatgtttgaatctccgggaatacaagttcccgtgttgggattggttgagaatatgtcttggtttactcctgctgagttaccggataataaatactatatcttcggtaaagagggagccaagaaacttgctgacgagaaggggttgcgtcttttgggacaaattccaatcgtgcagagtattatggaaggaggtgagaatggtagcccggttgccttggatgaagatagtgtcaccggacaggcgtttatagaattggctcgtaatgtagctcacgctgtggatgaaacaggagagaccgcaaaacgagttcgggtaacgaaataatggagaaaggggcttgaaaaagcccctttcaaattcttttacacgttgcatttatacaaatcacggcaaacgtgataaattctgccacggctactgctagccagatccctttgactcctaaccataatggcaggaggaagaaacagattacgggtaatatgattcctcttaaaacggtaaatatcgttgatagtcgtgacttttcgatactcatgtaatacccgatagtggtgatgttgattccgaagaaaacatagcatatcgagaaaaagggaattccatatacggcatacttccaggcatagtttgtgtggtccgcaatgaacagggatgcgatttgttcccgtagtaaaatcgtgaggaccaagaaaaacaagcctgttgcaattgttgcaatcaatgccagccggagtgcttgttgcgcacgtccgtgtgctgcatacccgtggttgaaactgataatgggttgtgccgattggataatggcattgaaaaccataaatatgatcgggaaaaagtagcacatgatactgaatgctgccactccgttcgtaccgaggtaactcacgaacacatagttcccggtcagcatcatcacaccgatggctgcctctcccaggaatgccgagaatcccagacgaatgatatatccgctattacgtgccgtgagttgtatactcttccagctgaactttaatttgccgagacgaacacgaggtgaataacgtaataaataggcaaccatgagaatacatcccacgatttcaccgataccggtagccacggcggctcccgtcaatccccatttatacacgaatataaatagatagtcgagtatgatattaattaccgtggagattgtcatacaccacatggctattttaggtccgtcaatacgggtgaagaaagtaagcacgcagagtgccgtttggaacatggcaaaagcggcataagcaatcaggtattcccgtgccagctcgataatatcttcgggtgctccgaggattcgagcgacagatgtcgggaaagccatgacaaggatagatactaacgtcatgccgataaaagaaacaagcgttgcttgcgtggcattgatgttggccacacgttctttcccccgggccaggttgattgatgccacgattgccccgcccataccaaacattaatcccattccggcagcgaacacgaataacggggcagcaatatttaccgcggctaaagcgtcgctaccaattccacgaccgacgaaaaccccgtcggtgatcacgaataaagccgagaaaaccatacccagcaaggtcgggaatagttgtttacagaacaactgtccgactttcattgaaccaaaatctatactgtctcgttgcatgtatatataatttttttagctcggcaaaggtaggtcgaataaaacggagaaaaattaacatatgataattacggattatttttgtgtacttttgtcgtaaaataatgaataaagggagattttagaatgttgaaaagtgcaaatggagtgcagatgtttggagacgtggcacggcgtaaacgctatttttatgctctgttgatgattttgctgatgattggagctgctgaattgttgatggaaagagagattattttcccggagatggcagctttgacaatagggatgtggatcgtggataagcgagtgtggagagtgagccggatcggtgtggtcgtactcatgaccctgggtgccattgcgggggtatgtattgtgcgttattctcctttcccgttacttgctaacctgatgtttgcgtttgcttttgctgcaatctgcctcacgttatcccgtgcgactctggtaccgcagatttcagcttgtatgttacccgtgttattggaaacggagagttgggtctatccggtagccgtgtttattatgtcggttattgttgttggaggacaatggggtatggagagaatggggttacgggagaagattacttacacgtctgtgagtgtaaattggagggaggctttggtacggtgggcgtttttattgatgacggtggcagcggttgtattactagctgtttacacggagaatttgtattttattcttcccccgttaatcgtgacttacgtggagtttgccaattcaaaagccggatttcgtaatcgtcccgtgcaagttttattggtattgtttacggcagccgtagtcggagtgttctttcaggtcgtgggacatgggtacctgcatttacctgaagttgtggtcgtgtttccgatttttatttgtatgttctttttgtttgaattcctggaaaagttttttgccccggcgggagctgttgccttgattccgatgattgttcccgaagagggtttattttggctgcctttgcaggtgcttgtgggtgctacgttgtttatcggcttggcaatgatctgttttcagcgttgtctgtactggcctcgggcgcagctaatcgtgtgtctggttccaccttttataagggatttgaggaagaggagtttgtaagatttataaggttcataaaggttataaagtactccactagggagtcacaactttacaaaccttatgaaccttataaactttatgaactaaaagggcttttcgccctttatttaatgtcttgctctcgctttgatgatttcgaagaaatctgctgctttcagggatgcaccaccgataagtccaccatccacgtccggattagagaaaatagcatcggcatttccagcgttacagcttcctccgtaaaggattgaagtttcgtcagctacggcttgtccgtatttctctgctacaacagaacggatgaaggcgtgcatttcttgtgcctgatcgggagtagcggttttaccagtaccgatagcccaaaccggttcgtaagcgattaccacgtgagcgaattgttccggggcaagattgaagagtccgtcggtcaactgttgtttcacgacttcgaaatgtttctcggtttctctttcttccaacacttcacccacgcagaagatgatttccaatttgctttctagggcttgtgcaaccttcttcacgagaatagggcttgtttcgccatagtaacttcttctttcggagtgtcctaagatcacgcattttgctccggtggatgcgatcatttcggctgagatttcacccgtgtaggctccggctttttccgttgcacagttttgtgcagcaaccataatggaagattccgtaatgttatgagccacttttgccaagtggataaagggagtaccgagaacaacgagaacgccttccccgccttctttatatctcacgtaatcattcacttctctagccaattcaactccttcagcgaaggttttgttcattttccagttacctgctacaatcttttttctcatatctttatgttttgaattgtttgtgcttaattgtttcttttcccttttctacgtggaatcagtaaatatgctacaaagaaaagaaggataatggagtaaaccaaataaattcgttgcatttgttcccttgaataaacgcaataagctgtcaagtcggtatcctgtaattctttcacgtcgggaacatcttttccggcccatttgtcgagaattgtgccttcccggaggatgatcacgccgggattggagcgaatcatggtttttaactgaatctcgtcagctgtacaaaattcgtagggaacgtgataccgctttttatatgtttcaatgtctcgttcagaggatgaggttaacccatagaaacgaattcctttctcttgggcatactctgccagtcggttgatagcgggttggtattgcacgtcactctgggtaaggttgtatgctacggcgaggatcgtgtgattatcatcttctaggatttcttctgtgatgttaccaagcgtggggtgttcgattacaagatcatgaatcggtgtgatataccctttctttaccagtcgctccgagctactttcgtattcccagttcagcgtgtcttgccacgggtagttttcttccgtgaaagactggacttctccggtttgcttgtttttgtactttaacgtgacttcgtattgatccggttcggttccttcgggaagtctcatgccttctgtgatgtttttgccgacagcgtaaggacggaaatccagtacgggtaggtgacgatagcaataaacggaaagacataacattccggctcctgccaaggctagaaacgagaattgtcccaccaagggaagcgatgatttgtattctttgcgatacacgaagatcatgatggccaataggagcaaaatgatattcttccaaaaggtttgccagttcgttaggagcgtggcatccccgaaacaaccgcagtcactcacaggattcgtcagtgccgacacgagggtcaacggggtgaaaaaaaacataaataatagggaaccccatgccatacgggatacccataaattgaacaacagggcgattccgatcagaaattctgccagcgagagggcgaaagagaaaaacaacgtggttgcgttcatccagcccataccgaaagcgttgaagtagtcagtgaatttgtaatcagatcctaacgggtcaattcctttcacgaatccggaatagatgaatactatcccgacaataatcctgcacaggtttttgacgagtctcatgtttgtttattttccggttagaccttactcttgttccacgacaaggcgaatcaacccgaaaacggcgtaatttaccatgtcgaagtaatttgcatcgataccttccgatatgatcgtggtaccttggtgatcttctatctgttttgtacggttgatcttcattagaatcaagtcggtgtacgagctgacccgcatttcccgccaggcttcatcgtaatcgtgattcttggcaagcatcagttcctttgctttgtgaaaataattctgatacaggcgaaggacttcatcttggggggtgtcgttacccggtccgagttggagttggatcaatcccataatggaatagttgatgattccgataaattcgggaacaatgccttccccgactttggtgatccccttttcttcaatactgcgtatacggtttgctttgatatatatctggtccgtgatggaggtgggacggagtattctccaagctgtcccgtaatcctgcattttcttcacgaagatatcctgacatatatctatcactttatcatattcttgtgctgtatttggcatactctatttatttttgataatgaaatctgaaaaataaattgttaatttgtcctgtaaaagtactcaaataattgaatattgaaaatcgaaagttgaaaattatgacacatataacgatcggagcggaaaaggttagcctggagaaacccgtggtgatgggaatcttgaacgtgacaccggattctttttatgacgggggaaagtacacgagtgaattgaagatcatggaacgggtggatgaaatcgtggaacaaggtgccgggattattgatgtcggggcatattcaacccgcccgggggctgcgttcgtggatgctcaggaggagttatcccggttgagttttgccgtggaattgattcgcaagtaccacccgcatctcccggtgtcgatcgacacgttccgtgccgatgtggccaaggagatcagtcattgtctcggaccgataatcattaatgatatttccgggggaacgatggatgataagatgttcgagactgtggcagaattaggacttccttatatcatgatgcatattcagggaacacctcaggatatgcaggtaaaccctcattatgatgacgtcgtgcgtgaggtccgggagttttttacggaacggattgctcgtttaaatgctctgggatttaataatataatattggatcaaggatttggttttggaaagaccgtggcccataattatgagttgatggataaaatggattccttcctagatttggggtaccctttgttggtgggaatatctcggaaatcaatgatctggcggttattggagattacaccccaagaagcattaaatggaacaaccgtactgaatacgatctccctgttgaagggagcgcatattctccgggttcatgatgtgcgagaagccgtggaaaccgtgaaaatcgtggagacaatgaaaatgagtttataaaattggtatagtctgaaggttcgtaaggtccataacgttcataaggtccattgctctttgtggggcgctttgtcaacaattgcacacgctaccttttaaccctccccctgtgtaagggggagttggagggggtagtttgtctgtataaaacaagactttacaaaccttataaactttacgaactatttcagttgtttgtagaatagcgggtggatgacctgccatagtacaattccggcggtgacggatatgttgaatgaatgtttggttccgaactgggggatctcgatacagtcatccgaaagatcaactacttcctgttgcacgccttttacctcgtttccgaagatgaaagcatattttcgtccgctttcgatggcgaattgttccagagaaatactgttttccacttgttccacggatagaatcgtgtacccttcgtttttcaatgcctgaaccgcatcggtggtttcttcgaaatactcccagtccacgctttcttctgctccgagggccgttttgtgtatttcccgatggggtggtgttgccgtgataccacaaagatatatcttggaaagccggaaagcgtcggatgtgcggaacacggaaccgatgttattcaagctgcgcacgttgtccagtacaaccacgatcgggagtttttcagcgtctttatactcttccgtggtgagtcggttcagttcttcattgaggagtttacgagacatgataatgactgattttcaatttttaattgcttcaccgatgagagttgcaggggtacattccgtgacacgaacctgaacgagttcaccaactttagccccgttatccgggaagacgatcaccttgttttggctgctgcgaccgaaaagttcatccgattttttcttagaaacaccttccacgagtacctcgaatactttacccacgtctttcaagttgctttggtgagaaatctccacctgcatatcaattagttcctgtaaacggcgtccttttacttcctcgtccacgttatccggcaagttacgagaggccatggtacccggacgttccgagtatttgaacatgaaggcagagtcgaacataacctctttcatcaagtcaagggtttgttggtaatcttcctcgctttcgttgtggaacccgacgaacacgtccgtggaaatcccgcaatcggggacgatctcacggatggcacgaatccggtcaaggtaccattcacgggtatattttcggttcatgtccttcagaacggaattactcccggattggaagggcagatggatatgtttgcaaatgttggaatgggtggcaatcgcacgtagaatgtcgtcattcatgtctttcgggtgtgaggtggcaaaacggatacgcatattgggtaccgtttgcgctaccatggcaagcagagctgggaaattcacttcctgattatctccccgccagagatatgaatttacattctgaccgagtagtgtcacttccttgtaacctttggattgaaggtctagaacttcattgacaatacttctgggacttcggctacgctcgcggccccgggtgtacggaacgatgcaataggtacagaaattattacatcccctcatgatggaaacgaatcctgaaatggctgtttcgtcaattcgggaagggcagatgtccttgtaggtttccgtggtggagagttcgatgttgatggctttctcgcctttttcggctttctcgattaaagaagggaggtccatgtatgcgtcgggaccaaccacgatattcacgtttttctcctgttcaaaaagagcctctcccaaacgttctgccatacatcccatgatggcgaccagcacgtgtggattctttttctttacctcggaaaatccttgtacccgtccgcgaacccgttgttccgcgttttcacgcacggaacaggtgttcaccagtatcacgtctgcttcacttttttcttgcgtccgttgatatcctttgtcttccaagatggctgcaaccacttcactgtcggccacgttcatctggcaaccgtaagtttctatataaaatttctttaccttcattcctgattttatttgcaaggggcaaaggtaatgaattttaatctacggactttctattttcttttaaaaatgcaaaaccgtactatcgtttgtcttggggctatatctgtcgtgtcatgttgtcgttatttcttcgttattctttcgttctatagagcgagtgtttatcgatagtatatcgaggagataacgaataggtgtaagagttggtgaaactcaggtgtttattaagttttgaggaaaaatgtatttgaaaatttgcattgaaaatctttatgaactacatttgccccgttcatttgtctaatatggtcctctctgtttaagaggcggacgtttaggaaaagggcgtcttatttaattcttcgggcaaagatcactccgtggatgatcaggaggcgcagctttgtcgtagagtgaatgaataaaaattatgtgatgcttaaattatccgataacgagctacattggtatgttgcaaatacttgtcgtcaggagaaaaagataaaacagcgtttggatagcatggggattgagaatttcattccgttccaacaaattgcacgaaaaattcatggtgttgataaattaatagaagtaccggttattcctaatctggtatttattcatacaaccttaaaaacttgcatgtcattgattcaagaatatgcttttgatatgcgttatttgagggatcgggaaacgggaaacttcttgattgttcccgataaacagatgaatgattttatgttcttgcttgacttctccaaggaaatggtggaggtggtgaacgagaatctgaaaaaaggcgataaagtacgtgtcataaaaggagattttgccgggatcgaaggagaattgatccgggtgaaaggtcataaaagagtggtcgtaaggctggaaggggtcgtgtctttagctacagcgtatattcctggtagttttctggaaaagatagaatagaagaatgaaaaatgatttttttcatgacttgtacataaccattcgggatgtgcgagtaagggattgttctgcaatgtcattatctcatttgctacatggttatttgtccgtgtatgcgatggtacgggtttctcccattttggaacgggagtatggaacactgcaggaaattcatgggcggttgcgtgaaatagcaaaggaattgtctaaggcaatgaaagatacctctatcgagctggacgaacggatagggtatgtggctgatttgatggatgcttatcagacatattcagatatggatcttttgaatgaggcgttggatgtggcttatcggatattgaccgtggatgagaaaggggagatcgtgataccgggtagaactcctaacgtgtgtcgattgctttgtagttggtactattttacgggggaggagtggtgtttggagatggcgaaagggattgtaggagattacgataatctagaaaaaaagcaagcgtggcaatggttgcgagctgtgagttgttttaagaatttgtcagaagacatgatattttgggagagatggaagcaagaagagaaggaggtattgggtaatatcattgtttctatagaaaatatcggaatcgcaggtaaagaaactttttgtttcgagctattggggatgtgggaattgaagggcaaagggtttgaattataattgaaatagttaaatatatcatgaagaattttgctttgatcggggtggccggttacatcgctccccgtcatttacgtgccataaaagacacgggtaatcgtttggtcgcggcttacgacaagtttgacagcgtgggaatcatggatagtttctttcccgaagcgtcctttttcacggagatggaattgttcgatcgttattgttcccggataaagggtgatgataaccgggtagacatggtttccgtctgtacacctaactacttgcatgacgctcatatccgttacgggttacgcttgggtgctgacgtgatctgcgagaaaccgctggtgttgaacccgtggaatatcgatgctttggccgaggtggaacgggaaaccgggcacaaggtgaacaacatccttcaacttcgcttgcatgactcgatcaaggccttgaaaaaacgaatagacgagggtccgaaagataaagtttacgacgtggatttgacttatatcacttctcgcggtaactggtattacacgagctggaaaggtgacgagcgcaagagtggaggcgtggcaacgaatatcggtgttcatttttacgacatgttgacatgggttttcggaggggtaaaggagaacatcgttcacgtgaagagccatgaccgtgtagccgggtatttggagctagaacgtgctcgtgttcgttatttcttgagcataaatgccgataacctaccggagaatgccgtggagggagagaaacgcacctatcgttccatccgtatcgagggtgaggagttcgagtttagtaacggtttcacggagttacacacggagagttacaagcacgttctttctggtgaaggtttcggtttggatgaggttcgtaattgtataaatatcgttcatcatatccgtaacgctgaaccgataggtttgaaaggtgattatcacccgctggctaaactacctctcgtgaaacatcctttcggttggacgagataatattctctcgttttcaattttcaactttccatttttaattgtcatgtataataaactagtgaataaagaagccaggctggcgcttgtcggtttaggctacgtgggtttgcccatcgcgttagagttcgccaagagaatttctgttatcggttttgatatcaacgaggatcgtcttgccaagatgcggcagggggtagatccttgtaaagagctggatcatgccgcctttgaagaggcagatataaaatttacctcctctattgacgagttacgggaggcttcattctttatcgtggccgtaccgacccctatagatcgccataatcaaccggacttgacaccgttgttaagcgcgactcgttccgtggctcacgccttgaaaagaggggattacgtggtttacgagtcaacggtttaccccggttgtacagaggaggattgcttgccgatcctggaagagatttccggcttgaaagcgggagttgattttaaaattggttactcaccggaacgtatcaaccccggagagaaggttcacacgttacctaacacgatcaagatcgtatcgggctgtgacggggaggccttggatgtcatcgctaaagtttacgagctcgtggttaaaccgggagttcatcgagccccgaatatcaaggtggcggaagcggcaaagattatcgagaacacgcaacgggacgtgaacatcgccttgatgaacgagttgtcgattatttttagccgaatcggaatcaacacgtatgatgtgttggaagctgccggaacgaaatggaattttttgaagttctacccgggattggtggggggacattgtataggtgttgacccttattacctggtgtacaaggcaagcgagttaaaatatcacacgcagattatcagtgcgggtcgctttattaatgacacgatgggagggtacatcgctaaaaaattggtgaagaagttgattggcatgggcaagggggttctcggggctcgagtactcgtgatgggaatgaccttcaaggagaacgtggctgatattcgtaactcgaaggtggttgatattatcaacgagttaaaggattttggcgttgatgttgatgtggttgacgctcatgcagattcggaagaggtgaaacaggtgtacggtttcgggttgatcgagaagccgaggaataattatgatgcggtgatcgtggctgtttctcatgatgcttacaaggatttggacgagaagtatttcaagtcgttgacttatgataacgcggtattggtggatgtgaaggggatgtatagaggaaaaattaatgaat

SEQ ID NO: 10702 - DNA, 1725 bp, Unknown
  gut microbiota DNA sequence
cttatctccggtcaaatcaagttgagccgttgagtttacagctataccctcataaagaatttcatctgaaggctctccaaagaaattagttttatagacctgcatctggttctgcgtcagtgtacctgtcttgtctgtgcaaattatggttgtagcacccattgtttcacaagcgtgcatcttgcggacaagattgttggttttaagcatacggctcatgctatatgcaagtgaaagggttacagccataggtaatccttccggtacggcaaccacaattaaggttacagccaccatgagggttttaagtgtatgagcaaggagcaacgaccaagtggtactatctgcgccagcgtgtatcattgagaacgctccaattaccatagcgaagaacagtacgaaaaatccgatgatagtaaatatgcacttagcctttgaccaatcttcaaattttttgatgacaagccaaaagaataaagcaacaggaacaataagcgtccatgcttgccagttactccatccgaggaaatgaatcaactgaccaacaattatcaatccagcaaaaccatagctgacattcgtaatccaatctgcgagtccgtcaagttgttcattgagcggtgtctttacagaatcgtcaatttgcgcttcctcaaatactttacccatctctgttgcatcaccgactttcagcacacgcatcacgccgtgaccttccattacttttgtaccacgcatgacatgattggacggataggttgcttctttgtcgaaatgcgctgggtcgatggttttggcgcaaagaggctcacctgtaagcgttgactcatctacactgagagtaacagaatcaagaagttcaccatcggcaggtatttcatcacctgtgttaatgatgacaatatcacctacaactacatcttttcgaggaattgtagtagtcgtaccgtttctcataacttcaaccaattcatcatcgttgacctgattgagtatttggaaagccttgtttgccctttgttcaaagatgaaagcaagagttgttgccaatcctatggcaacgaagatacctattggctcaaaaaaaactttccaattttgccctaagccaaagaactcatagaatgaaattccgattgaaagcactccggcaacaaggagaatgatgattaacgggtctgagaatttttcaagaaattctttccaccacggatctttttctggtggagtaagaatgtttgctccatacttcttccggctttctagcacttgggcatcagttaagccaatgtaatttttcttttgttccatataatgattctatttaataatatttttcaaatgtgacttatgcgtaatactgcgatgataacgacactacaaattcaactaatcatatgtatcgcatatagatgtttagactactattttgttttttctacaaccgactttatttataccgaattgaagactacgacctgtttttgaatttctgcacaataatgacagtattttgcacccaagatcatatgcaatgtttgtatgttcttgaattgcctttaggtttgatgggaaatacttcactttagaactcaacttgcaaagtagctcttgttctatatggtcaatatatttatccgcaccgattttgtctatgagccaagatacatcatcgtcagttattgtgtcatgtgattcttctaatagatggtcacaaatggcctg

SEQ ID NO: 10703 - DNA, 40477 bp, Unknown
  gut microbiota DNA sequence
attaaacgttcaattaatgatacaaatataaaactttatccccgcatgcaataataaaattaccaccttattcagaataaaatggtaattaacttatcgtacgttgctttctattgccaaattatcaacttctccaacgtttcaacattggaaagaatttttgcatctcggcacgagcctcttctttcgtgtaaggatgttccatgtctttattgaattcatcaaggaattgcaaacagtggtcaatcatctcgtccatcgtgcaattttcagtaaaagccccgtcacgatagcaataagaacagtattcttcattcttggagccatccgcattacgcccgaattgttcttctgatgttatcggcatcccgcaactttgacaaaatttattttccataatccaagttttatattatagcaaatatacgaaaaacatcggtacatacgccatatttttgtatatctcagacaatttattacatttgtattttcatccttcaaccatgcaactttattgtgtttgtatatgagaagatattgtaaaatatttaaacactgtagttaataactgtatacatacttgtgaattgaactatgatgtgtgggagtttcgtagcggataacagtaggacggtacaagcgttatggctagtgttagctaatatctcgtcattgtgcatgacattggtaatatcagctattcttagccgatatatgactactgtcgagtatggcacatatcgccaggtcatttatatttactcgactcttttgatgatcttttcttttgggcttccaggcgcatattcctactttcttgcacgtgtcccggtagaagaagggcaggcggtgattcgcaaattcagcgtgttattctggggactttcttccgtcttttcagtcactctgttcgtaggagcatcatggatagctgaattactcggtaacccgttgctaaccgataatttgaaatattttgcaatgacacctttgctgttgatgcaggtattgtgtgtcgaacacgtattgaccgtgtacgggatgacacatgttgtgctagtgtacgcattattaagtcgcattctcagcgtactttgttctgtaattcccgtgatttttttcaataccggggttcccggagccataatcggactgacactcgcttctttcggctcatttctcgttggtatgcgcctcttgacattaccctttaaagatgtaacacgaagaaaaacggatttgacaaccgcagatatattgcgattctcgatgcctgtgttttcttcgagtttgtatggatttgtcattggatccgcaagccaatttttcgtgagccgttatcttggggttgaaaatttcgccatgttcgcaaacggttatagggaacttccgattgctggcatcgtgattggtgccgttgccggtattctactaccggaattttcccggatgacaaagggaggttccgatagtaagcaatatctagttctttggaaaaacgtagtactcaagtccgcagcggtgatatatccattttccttgtattgttgcatttttgccccggaaataatgggagtgttatatggaaccgtttatcgagaagctgctgatttattccgaatagtcacgataataaatttggtgcgtatcgtgccgtacggaccgataatgttcgcattaggcaaaggcaaaatatttgccaaggcccatttggtcacggcgctactattgcttggacttgattttctttgcgttacctttttcccgtctttatccgcaatcgctatcattgcaacgacaaccactgtcttttgtcttgtggttttaatggtaagtacggcacgactcctgaacaccgggctctcgagattaatgccatggaagtccatgttcaaaattctgtccgtgtcaaccttctcatgctttttagggagttgtgcggtaaatttaataggagttacccgtgattttccggctctcctctcgggatttttaatatcgattgttatctatctacctctttcatatatcgcagggattaattatgcgaggctgttgaaaccattggtgtcaacaaatcaacgaaaatgaaattgactatgaacgttctaattattactcggaatttttatccttacaataatattggctcttttcgtattaactcgttcgctaaatattttcgaaaggcagggaattctgtaacggtcgtggcagaaggtgaacgagatgaggctatcacctggaatggttgtgatatacattacatcaaagacccgataatgaccccaaagtatcttcataatttggaacaaaagaataaaaaatggaccctaaggcgtgtgattagagcattagaatcgagaatatttttgggtggaccatgtatttggcgagccaaaacctgtaaaaaggtagaggaattatttcaaaagaataattttgacgtggtattgagttcttacgggcctttgactcctcacgcactcgtgatgaaagtattaaaaaagagatacaaattcttttgggtcgccgatatgcgggacgaaatgtcaaaacttccttactattctaaaatacacacaaaacgacttgcattttatgaacgtaacattctcgagaaagcggatttagtattgtccgtgtcgaagcctcttattgatgattttaagacaatgtgttcacatgatcgattcttggaagtaagaaacggatatgattacgaggaatgttatgaagtgaatttccagccccaattcacgatggggtatatcggtcggttttactggatggctactcctgataattttttaaggccttttcggaattgatcggagagggcaggctccccgaaaatagcaagattaaaattgtagggaatttcaaaaaactcgatgtgcctgacaggatatcgtcgaacgtgattcaatgtaagaatgtaccccatgaagaggcgatcaaaatatccatcacagaagttgatacacttctgatgatgtatcaatccggacgaaaaggagtgtattctggtaaattgttcgattatcttgccacgaataaacctattttagctttatacgatcccaatgatgtggttgccccattagatttatcgttgacgatgctgacaaagaggggattaaaaatatgatcatgaaatgttatcagatatggaaaaataaggagatacttccacgagattgggacaaaataaaacaatactctcgtcgcaaccaagtccaaatccttcttgactatttgtctaataatctggcaacgtccggataatattcacaatttcaattttagacggtatcaaatatataaatttatcatttcgtataacttttgggaaacttattacacttaccatccgtttaatacataaatcaaaaaaatagaaatgaaaatattatttattgcaacgttattaatagcaggaatgctgacaacatacacccaggcttgtacccgtgtggtatacctcggtaaaaatggaatggtagtaacaggtcgaaccatggactggaaagaagatttaaaatctaatatttacgtgttccccagaggaatcgagagagcgggggcggacaaggggaacacgattcattggaaatccaaatatggaagtgtcattacggcgggatacgacatcggtacttccgacgggatgaatgaaaaaggtttggtggccaatctcctatacctgacagaatccgattattaccgtccgaacgacactcgtccggctatgggaatcagtatttggacccagtatgtacttgataattttgcaaccgtggatgaagccgtaaaggagttaagcaaagagacattccggatagacgcaccagatatgccgaacggggcgaaatcaactttacacttggccatttctgacgcatcagggaatagcgccatatttgaatatatcaagggaaaactcatcatacacgaggggaaagagtatcaagtcatgacaaactctccttcttacgaacaacaaatcacgctaaataattactggcaacaaatcggtggcctggtaatgttacctggaaccaaccgggcagcagaccgttttgtcagggcatcattttacatcaatgttatcccacagacagacaatcaacgagaagcagtagctggagtttttagcgttatacgcaatgtatcggttcctcttgggatttccaccccggcacagcctaatatctcttccacccgatggagaacggtcgctgaccaaaagaataaagtatatttctttgaatccacgatgacacccaatgtattctggattaacatgaaagacctagacttttcagagggtgcatctgtcaagaaactaaaccttgcaaacggagaaacttacgcaggaaatgcggccaaggatatggtaaacagcccctcgttcaaattcctgttcgaagtgatataaaaggaatgatctgatttgataaagtccatgaggtttgagacgatccccatttttcatgacttgtcccttgcccagtttctcccgggaagaggcattcgtgatcaagagcatcccttctttttctaccaccgaaatggcttttggatccagatgatcgccatgttcgcaggtaatcaagatgattttaatggtaacaaccatcagatcgtaaacttacgtccgatctacacccaaagttatgaattatttctcaataatttataacatcgaaaccaattcacgttgttttcgaaagaaatgaatacgctgcaaatcaccactttccgagattaaagtagaaaaacgtttcaacgacgaaatccaattcttcacgctatcaaacgtcttgtcatctaaagatgccacggaattcaaggtaaaagctttgatcaatgaaagtttacatttctgagttaaaatatacgagtaggtcgtgtcaaaattaatattggatatgtagaaatttatcctgtgcccgttatcaaattttccccgagctgcaagccgttccgtgtaatccaaaaggcgatacaattcctcctttaactcatgcacatcattatcagaaatcaagttcacgctcgaaaaatatttaatgtcattgattaaatacatgaagatcatgttatcgaagataaaacaggaatcttttatccgctgggtttccgtgataaaatttctttgaatttgtaccatgcgatccggaataacaatctcatgtaatggctgcacggaatccagaccatcatgttgggctttccacttgaacaaataaaaccgagttaggtatttatatttcaaatagagtgcctgtgggagaatattggtagacgaagccgcctccgaatacgtattcggttctatcgaacggaaaacatctacaaaattatccatcatgtcaagatctatttccaacggattgataaattctgtcaatttcaactggaaaggccgacttttaggcgaaaccgactccaataatccatcaatcgaaatattcatctctttagaaatttgggctgtctccaacaaggtaaatgggacatccccacgcaaacgccgataaatagcctctttaccgatacacaacaaattccccaatacacttgccaaattctcttcataagggagtttctcccggattgctttcaataaattatcatgtaaaacttcctgtttcatttcatgtcgctctttaatcatcattataatcgtaaagcaatcaaatctccaccatgttatcaaaaaacgttcaggatttttgccgattagtatacactcctctctggatagacatttcggacgaaaacgtatagaaatgttttcttattgcctcgactaagatatatttttttctaaataaatacaaatacattttccctcccacgaaataaaaaaaatgattttatacaaaataaccttcaaaataattttataaaaacaagaagttttttcacttaacaaagctctcatcgcattttgtttcaaaaatcgaattaacgcaaacccatagaattcaatattttcaaaattagatacaaaaacatcccgaccatatctatttagaaacgttacagataaaaatcaacccggatttctattcgaattcacaatcctctatctaattttgttacaaacaaacgtctaacgaaaaacacattaatttacataacaatgattagttatatcatctacggccacatccaattccacatccagaaataatccggaatgtcagacagggaatctgttcctattttccctgtaaaacggattataccaatatcgtgtccctggccgggcgatcagctccagagcaacctcaacacctacacacagcctgactgatcgccatttcttttttcattttcaggaattataatatactacattttttataactttgtgatcatgcaaaaattccaagcaaatgctaacatttattatctctatcggtctattaatcgtcgcttattttacctacggtaaatttgttgaacgatttttcggagcctcatccacaattgcgactccggtgaaacgcctggcagacggggtggattatcacgagcttaaaccttggcgtattttcgttatccagtttttaaacatcgctggcctaggacctattttcggggctatactaggagcggcttacggtccgatggcttacatatggatcgtaatcggttgtattttcatgggagcgactcacgactatttttccggcatgctttctatccgccacgacggaacaagcctacctgatattgtcgggaaatatctcgggaacaatgtgcgcaaattcatgacgtttttcacgggatttttattactggccgtgggagtttctttcgtgaacggaccggcagatttactcggtaacctgacaaacatgagtatgacgccctggctatatgttatctttgcctactatattctagccacgttactccccattgataaaattatcggtaaaatctacccttttatgggattggccttaatattcatggccgtggccgtgggaagttatctactttacgggggattttccgggaaactttatattgaagaattaaccttcgacacgatgaaaaatatgcacgcagacccggcaaacaatattcttttcccgatgttattcatcgtgatctcctgcggtgccatttccgggttccatgccacgcaatcccccatgatggcacgttgtatgacagatgaaaaatacgggcgtcccatcttttacggagccatgatttcagaggggatcgtggccatgatctgggctaccgcagccatggcatatttcgggggtgcagaaggcctgaatgccgccgccacggcaggaaaaactcccgctataatcgtggatgcgatctgcaattcatggttaggacgttttggagcgattatcgccattatcggggttgttgtttgcccgattacatccggagacacagcattccgtagtatgcggttgatcattgccgatgctttaaaattcaaccagaaaccgatcaagaatcgtcttatcgtttctatcccgatattcatcatcgcttatttactttgtaacgtggatttttccacgatatggaaatacgtgggcatcgggaaccaagtattagcaaccatcacgctatggaccgcagccacctatttggctaaaaaaggaaaagctcattggatgatgtctatccccgccacgtttttaagtatcgtatgtacgacctatttcctgatagccccttataaagtaggtggcctgtatctttcctcttctatcagttacccgataggagcgatcgtgggaatcggtcttttcgttctgtttatcacgaaaattactaagaataaataaaaaaaaggccgcctgtacgcaggcggccttcatcacacaaagaaaacattattaattcattcgaatagctctaactgcttttcccccacttcttttctctccctctgcgttatatttctcttcttccattttcgccttatccgctccaagcgtatccccatttttggtcaacaagcgagctttagaattcatcaaattagctttcgcaaaaaaatcttttgtctgagcacatctagtatcgatccaatcgactccttcctgaacgagggccttgtcgtcacaaccggccaacgcctcgatattattctggaaatacatttgctcttcaccatttctgaacacattatacttgaacgcctcacgcatactattcaacattcctttataatccccctttcggacatattcggccgtgtataaactagccaaagctcccgggataaaagcataatccaaagattgaagtaatttaaccaactcggcatttctagcctcgttaaattccccatttcccgaacgccaatacatgatttcagccacggccccctttatcgaattttccaatttatagtcaaccacttctttaccggccacttcatagaaacgcccgatatttgcaatcacttgacgtataggttttgataacggatcgctcacgttctttttaatcaactcccaattatccttggtcacaatctcgtcatccgacaaagcattcaaatattcagcagcaacagccccttgcttctcctgcatgtaagccgaggataacgcagtcaaataacgacttaataaatccgtagtccgctccccggcctcgtaccgctttgttagaccactcaaattgttttgtggatcttttgcgatctttcctccttccattaaccactcggcagaaccagccccaaccatcttatgaaccacctgctgcgtattcgggtccacgaaaaccaaagttggaaaagccttcacttcaaatttatctttcaacatcacgccatccgcatccttttccatatcatacttcacgttcacgaaatccgcattaaactgattccccacatcctcacgggtaaacacctgtgaggataacatcttacaaggcccgcaccaagaagtgtaacaatcgataaatatcaacttcttctctttcttagcctttttcaaaactttcttccattctttcgtctgttcgaaagtaatccccttgctttgagcctctgcgccccaaacaatcccggccatcaaaacgattaatacaaataatttcttcattacataaaactttaattgaacatcctctcgtaatatcactatttaaattttttctgcaaactggtaataatcgtgtcgaactcttcggtcattcctttcttgaattcaggcgaaagttcgtcaaacccattgtaaacagacaacacgacctcacattttttgtctcctttgggatgaacttcaaaagcataaacccactgtttatcgttcgtgtaatccgatcggataacaaaataacaaatcttgaagacatcataatcaatcacgctgatatactgactcctttttttaccatctttcccggtcaactcgattttagcattcaaagccttctcctcgcaagtaaattccttcacgcccgaaaacttcttgtaatttgccggttccgagatgtaatcccacactttttgagcagatgctttcaacacaatctttttctcgatagcaggcggtatttttttcgctgccgtcatttgtgccgaagccaacccggacatgcaacacatcaataccaaacaaagtaatattctcatttcctttaccgttatatattctaaaagaagtagggagatgcatgcaaagaactgtgtgataagaagaagcatttactcccaaccttacacgccatccccctgccccttttttattacattcccatcgcgggcatcgccacgctcttctttttaccgctaagtaattcttctagcttatccgtcaaagcctttccccgcaaattttttgccacgattttcccctccttgtccaaaaccagaatataagggattcccgagaactggtattgtttcatcacgtcttttcctgccttcggagcctgtgcttgtgcccaaggcatattctcttccttcatggcttttctccaagcagcatcatctttatcaattgaaacactaaagaatgccacccccttgttgctatattccttataagcctccttcaagtgaggaatttcagcccggcaaggtccacaccaagaagcccaaaaatccaacacgaggattttccccttaaaatcctgcggtcctaattttttctttccatcaggagtaggaaatgaaaattccggggcaactttcccctcagataaacgctctttttgagctttcgcttctgccatctctgctttatatttcaacaagggagcataattggggttcttactttccaaacgagccaatacttgttgtactaactcttcgttttcctctcccctcaaagacggtaacacggccaacacgctattccgatcggcataatgttcggccaagaatctcattctcgctctcgattcattccccaacatatcgtaaaatttaccggaaacttcctgctttgcctgatcatcaatccccggaatacggtatactccttgagaaacgccgatcatcaactggtatccccggtatccatcccaattcatcaaattcataacctcattgtttggcccaccattaatgtacacgtaaggcggattctttatttttatcttagccgtgtcctctcccctgaaattgatctccaaatcctcatcctctgcccaaaattgtacggattgccacttttgacaatccaacgtgtaaactcccggtttgtccaccttcattttaaattcgtatgtcccatcatctttcaccttgcatgaatcgataatcgtcttgtcgaatccctgccgctcaacaatctccatattgaatcggttataaggaaacttcacttttcctttgatcgtgatcgttttttgagcaaaaacactacttgtactaattagcatacaagcgaataacaataatcttaaaatctttcccataaatatcattttagttcattaaaatttctttgtctattgcacgtcggcctttaaatcttttgccagtttctcgaaaaatgtccgataagacatcatattaccctttccttctacctcattttttgccgctttgactgccgcatcatcaaaccattgagccgctaacaatcttaacgccttatctttacattgcttatttacccgtaatccccaattataaagcagtaaatcagaaactttaccttgtttaatacgttccgttcctaaagcgatgtaagttttccaatcaccaagtttctccgcgttcatcatttccgcacctgaagcaatatcttcccaaccatccacgttcgctttttccatccgtttcacgtaacgtttaaagcctttcttatccaacaccagctgatctccttctttattcacaaaccggttagcaccacctccccacacgttctgaattttccgtttcacatctcgttctccataaatagagtagaattcatcccgatgttcatacacgtattgaaacaaatccgaatcaacatcatttatatacttaacaaatatatcccaatactttctctcttttaaattattcttatctaatgttgcaaaataatccaaactaacttcccctgctttttcactcaaggatgcatttcccaaataagtaagatatgcctgaatgaactccggatcccggttccccttttggtattcagcatctgcataggccaatcctttcccctcaaaagcgatctgagcctgctctattaattccttcaacccaggagcccctaccagactatgcacaacttcaccctgcccattaataaaaagcaatgtcggatatgccttcactccaaaacgatctttcaaatttatcccttcccccttttccatatccattttcaagttcacgaaatgctcgttgaaaaagtttgccgcatcaggatcggtaaacacggttctcgcaagctgtttacaaggtccacaccaagaagtataacaatccatgaaaataagtttattttcttgtcgagcttgctctaacgcccggttccaatctccctcgataaactctatccctttggctttctctaatgccgtcttaccgaaaccgataaactcatctccttccgtgtatccaccctccatataaaccaattttccatcaccattgataaacaggaatgccggataaccactcgtaccatatttttcagcaagctccttttctttcccaaaatgtattttcaagtttataaaattccggttataaaaatcagccacatcattcaatgaaaatacattcttcaccatcaacatgcaaggttggcaataatccgtataagcatcaataaaaatcaatcgattttctttcttcgctttcgccattgcatccttcaagctaatttcttcaaacagaatcgaacgtgtattatttctcttcacttcagcatcttccaacgctttgttccctacctccacgaatttttccggtttttgtgccagaagataaggactcactaccccaaggatatccccgttaggcatgaaaaaaccatatgtcgggtacatattcatcattaatttaggtgcaaatgcctgaccagcctcagaccccatatcaatctgaatagcaatcacgtgctgatcacaaaaatccataatttccgaaattgaaaacaatttccgttctgcgacatccagcttcttctgatcctccggggttcgagcttttcgcatggcatccacgaacacgatttttccttctttttgtgccaactctgccgcttgttcccaagtcaggtttttaaacacggatttgtacttctgtgcgttcaccgatgaaacaaacatcatcaataaacaaataatgatcccggttcctaataatctaatcttttccatacggattcatacatttttactccccgatgtttatcggggagtttttaagctttattctttatacaacacatcaacgattctaccaaacccggtatacggatcagctgttcccccggtaatggctccggttaactcattaaagtcaatcaaataaacctttccctcacctccagactcggtagaaactatcaataatttaccatctttagcatgtcccgaattcttaaatacttcaacgcctgttattgtctcaccactgaatgagtgaaccacagcacccttattcgtcgacgcatatttgtattgatataaatcactaccggatgcataaaaacaaacattcccttggtttccgaaagtgtaaagggaactctctgttaaaccttcacaatccgccatagaatatttcttaacaggcgttgctgtcgctcctgaaaaatccatcacgtataaagaataacctgaagtctccgtgtcatagaaaacagcatacgtgtaagaattaaaaccattctccataaatttcaattctttcgttgaaccgatatcattcaaatcgaattcgcccgttgaagtagactcaaaagtccccacgtttgaaccaaattgattaataggagcaaaacgtttattcttcatgtcaaaaatcacggatgaaaaagaacttgtcgaaatattcggtaaataaggagctgctttataatccccatccaaacgatcgccaaaagtagtaactcccattgacctatgatcccaaacataaactaaaccattcgtcacaatcatctcaagcgggcgacttgttatcacataagcctccggagctgcagtaacactcatcgggaaagagaaccaagaagtaaaatcattagacatgatctcgtatgtatttacatccagtttcaaaccaccgttttcagtaaaaaaataaagtacattattatcagaatacgttccccggcctaagaatttaccatttgtcacttccgtatcattaaccccggaatacacgtgataataaacttgttcttctgatgctgttatatcggtcaatagtttagcactcttgattatattcaaatcataaagtccgtttttctcatccatcacacatagtcccctggaaactaacgtctctacattcaacttcattgtgaaatattccttcaaatcctgaacgttatctgtaaccgtcaatgtcaaataataggcacccggaacttcatatatgatcgtatcgaaaactgctttcgtgtataaaaccacggcggagtcatatttctgcacatcatcatcttttttagggtcctgcggatatattttccattcgtaagacaaatttttctcatcacccgcgtacttcacttctaccgggacattgaaattctcaaactgataagctgtttgttccgctttaattcctaacgtatcaatttgtagagaaatcaaattcttgtaatcgtaattacctttgtcatcataacaactccacaatccggcaacgacagccagcaataacattatctctattataaatcttttattcataacattatcatttaaaaattaatcagggaaagttactctaccttctttagggtctacaagaggaccattctcagcctcgtattcagccaatttttccttcaagatcctcttggccggggtaaattttgctgcatcacccatcatcccccaataactccaactggaaaaatcccaaacacctaattgttcatatacaaacaagtactttgttttactacattccccaaaatactgactaatcggattcataaaccatccttcatctccaatccatttatctggaatatcatccgaaactgtcacgaaaagagttgttcttaacccagccaccaaatcgtcagaatcaactaatttcaccaagaaagatttagcacccgtggtcatcaagtcttccgaacgcaatactttcaagggtaccgatattgaaacctcaccttttggcataatgacattatctgcaatttcataattcgttcctgccacggccccgtcttcgctcgttatcgtcaaaccgatcacccgatcataatctttagcatatcctgtcaacaataactccaaatcaatattcgtatactggtctgtcacaaaaccataagcgatattaactgtatcctttgataatcccattgacgtgtaatcaaaatttatccgttccacatcgctgtaataagggatgtcttctttttcacaggccgctaacacgaaaaacaaacctgtcaaaaccggtaaaacatattttattatcgatttcataattcttaatttttattttccaaactcaatctctgtatccggtttcgggaatacgtaattcaccgtgtaaccattcaacttctcgtccttcatccgcttatgataaaagaaaagctgtccctccgcaataaactctcgtcgatattcgttcaaaatttctgcttgcacagcatccgcactattcactgaaataggatccagcaactctgaatcatcataccccctactagcaagtacttcattcaaacgagccacagcagtagcaggaatagctttatcacactctgccacgatataatacatctcgctcaaacgaatcatcggcatccgatctcgtttaggagtaagtaattgaccatccaccgtaactccatccatttgccacaatttagaaggtacatcccctacataattcatcgtttcaaagaagaaactacggaaatcattaccagctacaaataaagttcccggagaaacacgtgtcaacaaaggtacgcttgttgacataaaatatccttcgatataatctgtcaattttttaatattcaaagcaaaaagatgttcactagagaaagttctatcccgaatttcttttttctcattcaacacatcattcttatctgcccaaggaaacacatttctatttttatgagcatcaataacaaccattgcacatcgacgagcctctgttgtattttcagcatacatataaacacgagccatcaatcccatcacggcataataattcaaatgataattcctatttaccagataaccatcatcctcactcgttgagacttcacggccagtcaaaaccggatcattagccaagcaagttgccgcatctgtcaaatcttgaataacccgttcaaccacctttgcgggagaaacagaaactgtcacctgtttggtcaattcatctacatagggaattccatcttcatcagaagtactcttcgcattctcgcagaatagacgtaacaaatcaaaatgcagaaatgcccttaatgctagagcctctccctttattatctgtttgttatctcccgtaaaaatcaccgatgatttatcgatataagctaaaacactattcgcattagcaattgcattgtacaaaccactccacaacgtgtcaattatcggttttgtatttgtagcttcgtattcatatttaagagcatttgcataacgatgattcgtacctatactaccccattgctgggcaacaacatcaacaattccatatgtcatttcccggccatacaaggaagattttgtcattgccgtgtaaaccccggccaaagcatctttaaatccggcttccgtggaaaacaaatcttctgcttccatctcagttttaggtttcacgctcagccagtcattacatgccatcatgctgaaacaaaccaaaaccaataaactatattttataaactctttcttcataacttggtagaacaattatttatattcataatctccaataattagaatgtcgcttgtaactggaaagagaaagaacgggcaaacggataatccgtacctctttcagtcttcaccgtggacagccggaacacgtcattcatgtagaaagataacttcaatcgctcgataatccccttctgcataaacttacaatttctgaaatcataaccgatattcaacgacgtcatctgcaactcactcaaatcttgaacaaaacgagaagtcggacgagtaaaataattcggatctgtcattttcttaaattcggccttttgtccgggagtcgtccatcttcctgtatatacccgatgatctacattataattcatatcacagttctctactttatcaaccaacgtctggttatacatctgccctcccaaacgataatagaacgaagtattaacagaaaatcccttccagtccaaattaaacccgaatgttcccgtatatttcggcaactcatctccacatacgacctgatcatccgaatcccaagtataagtaagatcaccgtctttcgtcaaaaaaagttcatttcccgttccaggatcaatacctaacgaacgtacagcccagattgcactcatagattgcccctctgcatatctcacagaaggtttcgtggtcttttctttcgtatcctgatcataatttaatcccttatcggaatccttactatcattcatactggacaatgcctcgttaatctccttaattttattcgtgttatgcatcaaagaggcaaatacattcaaatgcaaatcctgatcagagttattaattgcccgaacacttgcttgtaactcaaaacccttattctgtgattttcccagattttccgtgtaagaagagaatcctgcagaaggcgggagcgtcacgggggtcaacaaattacttgtatttttaatataataatcgaaagtcaaatcaacacgcccaaagacagacaaatctaaaccgacattattatcctgtgttttttgccattgtaagtctggattagccaaactcatcaagtaagaaccgataatattatcatacacctcatcagagtaatatttatatgtcgaaattgcctgataagaattaaaattttgagatcccgtatacccggtagatgcccttaattttaatcgctgcaaccacccgaaatcctgcataaaactctcgttatgaatattccaaccaatacccaaggaccaaaaatgtccccaacgcttatccgcaccaaacaatgaagaagcattcgcccgatagtttccgtcaaacaaataacgagaatcatacgaatagttcaccgaggccaaaatactcgtctcccgggaaacagactcgctcccactcggtttacctccctctaaatattgctgtgcatgagtaatataatctaacttgtcattagcaaatccctctgcctggaaagtcactgattccgattttgtctctccaagactccattgcgtattagcaaataacacgtgtttctcattccatgttttagaataattcaatgcaacatccgttgtcaaagttgtcatcttaccattttgcttggtatattgtcctctcttgaaatattcttcatctgtcatattctctttacgaaacatggtgtgatctcttggataaaaaatatcagattcatccgtacgagaagtaaaaccaatacgtccggtagccttcaaatccttaaatacattccactcgatataaaaattattagtaatatccgtgtatttactaacatcttttgtattcaaagttttatttattaatgggttataaataggatcatctccataactaacctcaatcgggttcaatatttcacgaattgttccatcctcattatgcgttctccaataaggattcaattttgcatagtcagaaaatgtcccgtatggagaattttctgctttattatgtaacaaagaaagttgttcccgaaaaagtaacgacttgtaacggtaagaaaaagtaaatcctccaccatacgtcttacgatcagagcctttcattactccagccacattgttataactaacattaacattataacggataaactcatcgccaccctcaaaatttaaagaatgtttctgtccgaccccagttcttaacggcttactcaaccaataggtatccacaccccgctctacttcttttttcaatgcttgatacaactcatctctttgttgttgcccgacaggattatttgtagaagacgtgtatataccagacaaacgttctacttccaacttttcccaagcatcacacaaattataactactcaaatctggcgcttgaatatctaaactacccgtatagcttactgtcatttgcccaattgcaggacgttttgtttcaataacaaccaccccgttcgctcctttagaaccgtaaagagcttttgctgttgcatctttcaatgtcgtgattgattccacccgattcatgtccatatccatcactttctcgattgtctgctcaaacccatccacgataaaaagcggctggttaggatttgtttgatacttatccttcatatccgtaaaactagaagcaccacgcatctgtatctccggaacccgattcggatcagaaccgaactgattactttcaatcacttgaaaagagggatcgatatttttcaatgcttgcagtacattcatattacccacctttgccaaatcctcggcctttacggttctagcagccccggtgtaactttctgcttttcgagtaaaaataccagtaaccacaacctcctgcatttccgttacggaaggggccaacgtcacgtcaatcttactctgtcccttataagcaacttcctgtgtctccatgccgacaaaagaaaaaacaagaaccatatctttcgagaggggtaccgtcaaggcatatttcccgtctatatccgtcgttcctcccaacgtggttcccttgatcataacggtaactcccggtagagtctcgcccttctgatctttcaccaccccggataacgtcacccgttctatcttctcagccttcactgctgctttgcgaataataacaacttgattactggttaattcatactccaacccggtgccttccagacattgtttcaaagctgcatcaagcgttgcattcttaatcacgtaatctttccgttgcacgtgtttcacgtcatcattactgaacatgaaactcaattttgtctggcgcttgatctcgtcaaatacttccgacaacgaagcattcttcatatcaagattcacccgatccgtgttctgttgtgcgaatgaaaacgatactgaaaccagtacaatcttcaccgatagtagtaaatggcatagccaccggggaataacccggaaacacttgcgttcttttttcataaaggtaatttgtttgattttacattagtctgtttttctctttttcgtgtctttctgtttgcggcagaaatgcttagcttttccttttttcttttaattaaattccataactttgtacttagattttacattagtctgttaaagacttacaagggggtgatatttgcggtatcactctctttctattttaatattacattatttccattcacgctaaatgatacttttttaatcttctccatcaactcgaatatctctgaaacctccttatatttcataatatccatcgtgaaacgtaactctttcaattccggagacgaatagaaaacattaaaatcataccaccgctgtaattcatccataatatcctccaaacgagcattcacgaatacaactcgtcccgatttccaagccacaaactcatccacattcacctctcggacctctattttccccatgttatccactgtagcctgctcaccgggaacaattcggtgtatatcatgatcactctttacctcaacggaacctttcaccaacgtggtcagcaattcatcttcccccgaataaactctcaccccgaattctgtacccaacacggctatatccgccttgttcgttcttacaacaaactttcgatctttctcatgtttcacgctgaaataagcctctccggttaaccaaaccaatctctcgtctttcccaaaatgtaccggaattctcaattcggactccgaattcaaataaacagttgttccatcttccaaacgcacgatatactcccctccccgcggaatctgaatcacgttataactattatcaacaacaacaggatgatcacctttcatgaaattcaacgtatctttcgtgttaaccaacgttgccaacccatcattcacacatacagttgtatccccaaaaagcgataactgttctccagttgataaagtaaccacagccttcgacccacctaccttaatttcttgattagctaaaggcaaatctgccatgccatgctctgacatataccacataatcccccccaccaataaaggtaaagccaacatagcagcaacccgcaacacaaataaacgtatctttcggcctttttcaccaacagtccttctctccaacctcttccaactttcctctctcaactcccggttacgatccccaattgctcctttcagatacccctccgaatgtaagcgttcaaagaaaatacgattactttcagacacgttcaaccactcgtccaactgtctctgttcatcgtccgtaatctctttgaaaagagccttaactattaaattttcaatctccctgtttatcatcattctctcttccttaacaatcaataaatgatcatttcttactatcacttttactaagaactccaaaaagtaaaaatggtagtacttcaaaaagtacttttttctcaaaaaatttatgatgattagatccccagatatatcataaagcacaacagtcccttcaaacgctcccgcagataattatttgcattcgttttgtgctttttaattgttgtgatagcgatatgcaattcttccgcaatttccttgtggctcttaccttccagacttttcatataaacattcctgcaagcatccgggagttcctcgaaaatatcatttatcaaagcgtaaatctcggcctcgatcatctggtgtacgaacgattcctctgtctcttccacctcgaaaccctccatacgtttctctttcctttgggcatcccgaatataagtcaggcaatgattccggacaacccggtacagataagtcttcaattgcatctcgttctcgaaccgatctcccttctcccataatttgacaaaaacatcctgcaacaaatcacaggctacctcctcatccttcacataacgcatagcgaaatacttcaaagcggtaaaatactcttcgtacacctctttaaacttctttctctctgataaacagatcaagccaacctcaatttcattcaacatctatcttgcattacgttttgacgaacacaaatataatcacattaaaagtaaaaaagcgaatagaaatcaatttataattgcgaacaaaaaatatcccgggaacaattactctcccgggatcaacatattattctgaaatctttaccagactaagaggcaacctctcctttaataatctcgataatcttctcgttattaataataatcataccgtgcttatcactcgtgatgcccggctccaacttataagtatatgttggcaacttacctttcatcacggtcgggagatattcgaatgtcacgttatcacaacgctttccgagttcctgtcccacctcgataatgtgggtagaaaccataaacgcacaattctttctctcggcaatcgcctccgtgacagccagtgtcgcatcgaaagcatctttcacgttcgtacccttgaacaactcgtcaaaaatcacaatcaaacgtttgtcacgactcacctcgatagcaaccttctttacgcgaaggacctccgcatagaagtgactgtaacccaaattaatattatccggcacattaatagacgtgtacattccatcttgaattcggaactgcatggaagttgccgccacgggaaagcccatgtgagccaggtacaccgcaataccgaatgacttcatcaacgtggacttcccggccatgttagcacccgtcaggaagaacacattcttcgtggccgtcacctccaggtcattagagatcgccccatcaatacgaggatggtgcaatcccttcacggcaaccagaatctccccgtcgtcagccgcttctgcaaaacagaattttttctctcgagctatactacctactaccacgttcacgtcaatctcctgcaacaactcgatgatttccttgaaattcttatgacaaatacaccgcaaattccggtcaaaaaagatcatatccatcaaaccaggattctcccgacaagaattttccaataacttcgtcacccgactgtcactcaatagagcttttccgcgttctgcgatcttttggaaaggattcccggccacgtcacgtcccaactcgtcaaaataagttcgggccttccggaaaaattcaatcgatgtcacgatacgatcccgaataatcccgaattccggatcatggctaatataaaacatagcttttgctcgcataatttgcagcatattcataaaagcacgttttccactagccccggcaatgtattgttccacgacatcaaactcgtccttcccgaaagggaatccaaaatcatgatctttaaaataacggaacacggcagaacgctcgttaatggacttcgcgtccgtcaacggatgcaagaacatatcctccatttttcgttcacctccccgagtgatcgtcccgacatacaaactgtaaacggaattattcttgtatttccccagaagattcaaatcatctaaggtctgtttatctgtctcaaaactcatgcttctccatttttaatgatttcaataatatgttcgttattcacgatcatcataccatgacgatcatccgtgataccgggagctagcgtgtaagtataaacaggcttacttccctccatcttagtcggcaaataaacgaaattaatattatcacacttttctttcagtacctctcccgcttctataatatgagtcgaaatgataaacgtacaattccgaattccggcaaaagcctccgtcactgcaactgtcgcatcgtaagcatctttcacgttcgtaccgcgaaacaactcgtcaaataccacgatcaaatgttgcgtttgtctaacctgttgtgccacctttttcacccgtaaaacctcagcataaaaatggctatatcccatgctcaagttatctggcaggttaatcgtcgtgaacatcccgttttgaaccgaaaattccatttcctttgcgggaacggggaatcccacgtgagccaagaaaaccgtgataccaaaacttttcataaaagtcgatttcccagccatattcgcccctgtcaagaaaatcacgttactgttctcgtctaccgtgatcgtgttaccaacaggtttcgtgaggaaaggatgaaacatccccttcataaccaacgtgtttttatcattcggatgagctttagcgaaaacaaaaccacgttcttttgccacattagccacggccatgtaaacatccagcaaataaacgtaatacaaaatcttcatcaacttatctcgttcctcgaaacgcaacacccggtcataaacaaccgcttgctcgtaacttagcttcttctttcccttctcggaaacataccaagaccacttctcgttaccgagtaacccccttaaattagcggtcaattcggctattgtcttgttatcggcatccgccttagaatttttcaagaaggcatccaatgtattcaacaactctatacaacaaacaatcccgttgtggatttgggtatactctgtatccgtcccaacgagattcttaaatttccgtcctaacgtgttatcctgtgtcatcaactgcgtacgtctgtccgtgttgcccaggtagaactccatcgtgtcaaaaatctctccacggaatgggaattctgcttcaatatcacgataataacgaatcacatcacttctctcattaatctggtctgcatccgacaggggatacaaaaacatctcttcaagaattttcgcaccaccccgcgtacgggttcggttgaaaatatcataaacagacttcgttcggttattcccgaaaatagccagatcatccaatgtctgtttgtctattttaaaactcatcctatatgaattaaaaattgaaattaaaaatcaaaaatgtacatccttacaaatatacatattctaattttttaactctctaaattatagaatctttttataccattatttatgatcgggagatctgcgctctcccgatcataaattaatgtatcttatcttccttttctacgaatccacaagaagattcctattcccgctagtaacaatggcaacacgatcatgaacgaccatttaatcaccttacttccggttttttccacgtacaccttattatccgggagtgcaggacgtctcacgtcaataggaacttcattatctgacatccagaagaaacctccggtaatcaatgaaaagtttgaagcacgtgccgtcggcactcttcgtccgaattccccgttactgatacaatccgcatcaccggtaagaataatcttctgctctttattacccacttttctagacaacgcaaccacggtattgtagattttctcaacctcaccgatagccgggttcagacataccgtatcatcgatgaaatctgttgtttccagttcattccaaacaccgatcgtgtctgtcgtgaacatatttgtcaccgtgtaacccttatcagcaatttgctccaatccggcggtactaggtgtcgtgataaccatacgacgattacgcatcgtcccaaaatcataagcaatactatctgcctctttcgtcgggtaagaaagaatcacatcagcctgcaggtttgtatctctcttaactagtacacctgttgtcatctcgtaaccgaacttggcaaataaattattcatcacgtctctacgtttcggttctcctaagatgaacaaattacctccccggtcaatatactgttgtaagttagcctcctgcttcggagtaaaccactcgcgcatatcagaaatcacgataatattaatatcttcaggcacttgctgatccatggtaacttttgccacatcaaacccttgattttccaaagcataacggaaacccttatcattagcaaacgcactataatcacggtctttaccaccagaataactgcgctccccgtgtccctccacaaatccgaccttcggaagatccattaccatccgtttgaaagcggcagaaatctctttttcactcgggaaacgttgcatatcattatatattctcaaccatgctttctctccattatcacgaacaatctgacgtacgaacgtgttattttctcctgacaaatctatgattttccgaatttcctccggtcccatgaacttgttggaatccaaaccatagatcttacaaacctctaccatcttctcgcgaagtgtcgcattcgggaatcttctgtccaacatggggttcgacgtggtatcataataatacacgtatttcaacttcatgtccggtttaaaacgtaaatattgctcgaaacgctccatatccggtttcaaaaaataaggagccgcataccaggatgcacccggatcaagagcattaatgtaagtcgttattgttataccaccatccaacttcgccacgatatcctgactattcggggtcaacgtgttcattttcgttgacgttgcatcgtgataaagcttcaactgcggaagtgcagacaaataacccaagaaacaagccaagaaaataacaccgatatttctccctaaagtgatcacaaaacggattttctgacgaaccgaattcaaacgaataatcgttaacgccaagaaaagacaaaccacgataacaaaataaaggacatcttcactacaaatcaaaccggcaataaacttaccgcttcgacccggcatggacagccagtaagtcacatcccggataaaatcataatcctgccaccatccgccaaccatgctcaataccatcaacacggcaaatgtaccaatagccgccacgatctggtaagaagtcaaactggacatgaaaataccgatagccgcataagcacaaatcaataaatacaaacccaataaaccggtaagtaccatggataattcaaaatccttaacgacagcccagctacaaagagtgatcaagaacaagattccgatcatgataagaccgtaaatcatcatagagaagaattttcccacgataatctgggtattcgtaatcggagaagaatacagcaaacggatagatccgctacttaactctttacttaccaaactcatggtcaacagaggaatatagaaatacaggtaattttgcatcgtggtgaaaacccctccccaattgctggcaaaaatagtaattgtagatccagaaacattatatcccatttcttgagaactcacaagttgtgccaactgatcggcaaaaagcattcccgattgaactccaaatacgactaaaattaaccacgccacaggagaatagaataacatttgcaattccgtcctcgctatattatatatcattttaaacataatccgattttttaatgtgctttcttagataattctgcgaatatattatcgagggaactcttctccacccgaacctcagacaaacgccaatcgttagcggcgcttagtttcacgatctggtcaataacctcttgtgattctgtaaaacgaatacggaaattccggtttcccaactcctccacaccaagaactccctctatctttgccaactcatcggcaagaggaggatctaccattgaaacataaagagaattcgggataatataattgtcaaattcatccactgttcccataaacaccagcttaccttcctcgatcatcaagatatgatcacaaacagcctgcacttctgtcaaaatatgggtagaaagaatcacggtacgatccttggcaatatcacggatcaagtgacggacttccataatctgattcgggtccaaaccgtttgtcggctcgtcaaagataaccagatcaggtttatgaacgatggcttgggcaataccaacccgttgctgatatccaccggatagattcttgatcaaacgtttacgaaaatgagtaataccacattttgccaacacctcatccactgccgggataatatccttatcagccacccaacgtaatcttgcgcagtgaatcaaatattcttccaccgtcaaatcaccatataaaggtggtttctgtggtaaaaaaccgatgtgccgtttcgcgtcaaccggtctcttacgggcatcaatacctttgataaaaacctgcccttcggtttgtttaataactccactaataatattcatcgtggttgactttccggccccgttagaccctagcaacccgtatattcccctccggggaatctcgaagctaatgtctcttacggcccattggatgctgtaacgatgtgacaaatgttcgacttttacaattggctcttccataaacttgttattaaaattaatattgtctacaacaacacgtataaactttataaaaagacgttccaaaaacaatttagtgttattcaaaaatcaactttatgaaatttttaagatattcaatttcattaacaagttgttttacatcaaattactttaatcaccattctactttttcagaagaaaataacactttctacttttacatcatcacttcaaaaacaaatacacaccaaaaatcaggagcatttttttatattgtgttttgtcaaaaatagtaaaatcctaataggagtgatattaaaaacatgactttaactttttattaataacaacattaagaatcttttcacacattgaaaatcatgtggataaaaaaacattcctcccttattgcagtttcaagaggaatcccctaacttgcatccggattttgagtgaacatataggaatcaaacggaaaagatgaaaaaaacgaaatggatttggatctgggcagccataggactcgtattaggtattattatcttttggcccagcaacagaggaaataaggaggcgatattagaagccagtgcggtagaggaagttattgacacgaccgaacaacaacaaattcattacaaatacggtatccctgatgaaaactttattatagaagagggtaccgtggggaaaaatgagaatctttccctcatcctttccaaatacaaggtatcaccggctaagatccatgaaatttcccaacgctgcaaagatatctttgacgtacgcagcatcagacgaggtcaaaattacactcttttcttggcacaagatagtcttcacaccccggaatttttcatttacgaaaaaaatgccttagaatacgtcgtcatagatttcaaggaaaccgcagatatttacgtgggcaaaaaagacatcacaaccaaagagaaaatggccaatattattataaactccaatctatggaatgccatggtcgatgcccaaacagatcccatgctagctgtcaccctatctgatatatacgcctggagcattgacttctatggcatcgccaaaggtgattccgtgcgggttctttacgaacaatcatacgtggaagacaaacctttacaagactttaacgtgaaagctgccattttcaccaactccggtaaagacttctatgccatcccttttgaacaaaacgaaaaactagcctattttgatgaagacgggaacagcctgcaaaaaacctttttaaaggccccgttaaaatattcccgcatctcttcgggtttctccaacaaccgattccacccggtattgaaaagatacagggctcaccatggcgtagactatgcagccccgacaggcacggaagtacataccatcggggatggcgttgtcgtgaaaaaagcctatcaagccaacggtggtggaaactacgtgacaatcaaacacaacagcgtgtacaccacaacctacatgcacctttccaaatttgccaaaggtatccaaccgggaaaacgggtaaagcaaggggacgtcatcgggtatgtcggtagtacaggattggcaacaggtcctcacctggacttccgggtatataaaaacggaactcccatcaatcccctaaaaatgagttcgcctcccaaggaaccgatatccccggaaaacatgcctcgtttcattcaaatgagagactcgctcgtaaaactcttaaaaaacaatcttaacgtgctaacccatagacaagaatcatccaatcagaaatcataaatcgagagattagtccagtttttcccctgttaccttataataccgccatttcccggtctgccgcccttttttgtaacgtccttcacagaacaagtgcccggtattataataaaactttgccgtaccatgccgtactcctttccgatatgcgatctccgcacggagcgtgccatccaggaaaaattccttataccctgcgatcaacccgttcttataagtcacttgagccaataaatccccgttctcgtagaagaacggagcaaccccgtctatctttccgtctccatacgggagttgcccgagcaactttcccgcaacattaaacacgtaccacacgccatccggttccccgtttttcaacgcccccttgaagatagcctgttccgactcacactcgtaatacccttgatcactcaccgcaatgctatcgggaatcacgggataataaaaacctgcctcgatcttatttatctgattctcaaattgacgattcaactctcgcatcctgtactcctcgggagccttatcattataattcgctataatctgagtctcaaaaactcccctctccttagataacgagaaaccgatcgtttcaaaactcaaaaatgcccccctgttcttctccagactttcttgggaacctgccttgaaagaatcatataaatactcgtatgtattgggcgtctgcacgtaaccgaacacgttcttcctacttcccaactgcccttttaaacgcctatgtttctcgtcattctccaacgtgttgcccagcacatactctttaatcatctcggcaagcgtggcaggagaattactaaaaacgacataatcacccaaaaatgtataataaggtcgttcaaaccgttcgaacattcccccgaagaaaagctggaaaaaaccttttaaccggaaataatgaatcgtatgcccgttaaactccatgactctttcccggataggagttctccattgaatctgttcggccagataagccatttgatccttggccaaatgaatctcttttgatcgtatcgccaatacgatatgatctgccttttgatcgttctccaaacggggtttgataattgctacctccccaccaatccaagatgtaaacacctccagcacatctatattcaaaaatttattcaaccgatccagcgatcttttcatttctgtataagattgcaggtcattcaccttataattctccaacagcaaattttccgcctccttgaaagaaggaaaacaaaaagagacataagctgccgtattttcaaccgcgatcgtctccaagttagaagaacccccttccagaaaactaactacatccaacaaagaatacttattaggatcaggcctcgtttccccgacaaaacgaagagatttatcattcaattgcatcatcaaacgagtatttttcaacaatgaaaattcatccgccactgccgaatcctccatgaccgaagtaacccattttcccaactgcctatgatcaagatcaagcattatatcccccgaaaccaccacttcctgcacctccttgttcgtcttacaccgagccagagagcgagccactagagcatgagacgatgaaccgatcagcagattatccttaatcgtgaaaaagaatcgccagtcagcccagcgaatctcacggatctccccattcgggtccttgatggtctttatttttatctcatcatcctgcaccaatttcagcagtaacgtttcaaacacctgaatcacgttcaatttccccaaatcacaaacgtacaggaaatcgtatttattcaaccccacctgatgacatgaaatagttaccggacgatcagttaatatccttttcaacttaggataggcattcgccaaggaatccacgtattgcaaatttgaatgatattcctcaaaatagggataatttttcaacgatttccaaataaaattccggtgtaactgttcatgcacgctatttacagacacaatattcaccttaaagactgcatccacgggtactgcctgcaaagtatcaaacctccccacttttcggaaaatcccgaaccacacgatcaggccgacgcccacgaacacgcccaaaacaacgattatcttttttttcgtactttttttcatacattagtcatcaagttcgtattttcttcaccagagactgcacaaagacctaaactctcattccaaaaatcaataaagttttaacgcatctgcactgttttcaacactacaatattaagaattttagtcgggaaatcgtacctttgccactgatatataatgcaaaattatggcttcatactggcaaatatttatctcgtttttcaagatcggttctttcacgctgggaggtggttacgcaatgataccactcatccagcaagaagtcgtggataaaaaaggttggctaaaagagaacgaattcgtggagatgatggcaatagcccaatctgcccccggaccgattgcactgaacacggccattttcgtgggttacaaggcacgaggaattaaaggggttattttttccagcctcggaaccatcctcccctctttcatcgtgatcctgttaatcgccatcattttcacggatttcaaaaacaatcctggagtagaacgagtattcaaaggcatccgtccggcagtcgtggctctcatcgccgctcctttatacaaaatgggtaaatcggcaggagtcacccgcaaaaccatcatcttcccggtgattgccgccctactcgtctggttactcaacctctcacccatatacatcatcatcgccgcaatcctaggcggcctactctacggcaaaattacccacaaactctaaaatatgtcagaactcgatctctatatcagcctcttcatcaccttcttcaaaatcggcctattcggttttgggggtggttacgccatgctctcgttgatccaacatgacgtcgtggaaacccacaactggatcagcgtggccgacttcacggacatcgtggccatttcgcaaagcacgcccggccccattgccttcaacaccgccacttacatcggttacacggcaacaggtagcatctggggatcagccatctgcacgattgctgtcagccttccttccctgatcatcatgatcacgatctccaagttcttctttatgttccgggacaacaaatacgtggaaatggctatgcaaggattaaaaatcaccgttttaggacttatcggggctgcagcattgttattgatgaacaaacaaaacttcgtggactacaaaagctatatcatcttcgccatagccttcattgccactttcaaatttaaaatggacccgattctgatgatcattgcagcgggagtcgccgggtatcttctttattagaacacaaacaaaaaaaccgccgatcggcggttttatattttaaagcagtgcattgattttagaaaccaaagtcgtcttaggtactgcacctacttgtttgtcagcaacctcgccattcttaaagaaaagaattgtcgggatgttacgaataccatacttagcggcagcagaaccttcatctacgttcacttttgcaaccaccaacttaccttcgaactctttagaaatctcttccacaatgggtaacatcattttacatggtccacaccattctgcccagaaatctacaagaacaggaacttctgcttttagcacaacttcctcgaaatttgaatcattaactgcaatagccatacttctatctttaaagtttataataatattcatgctaaaagcgttggattaagttccgccatgatccaacgctttgacatggcgaaattaattaattttcattttaatagcatcattattttcaaaatattcatataattctctcgaacgtcctatcttacaggttcttgaaaacatcttcacccggtgtcccgtcccatcgtacaaaataaagttcaacgggagatcccccttctcgttcacgaattggttatgtatctctaacacaagctcgtgcgtcagtttttccacatccacctgcaacgtgatcgatcgaatcaaattttcactgataacgctcagcaaatccatgctctgcacgttaaaagtcagctctccggcccctccccacttcttttcctgcactctacccttgatgtagatcgacgtctccagaataaaataattccggaacttgatatagtcctctccgaagaaaggcaactcgtaagaacccgtgaaatcctcgatcgtcaaaataccaaaatcattccctttcttcgtctttccctcccgcatggcaacaatgatacccgcaatcgtcacgtcccgatctttataagaactcaaatcactgctcagactctccaaaggagtacaaatcgccttgatctctaatttatacgaatccaacgggtgagaagttaggtatataccgatcaattccttctctttacgcgccttctctacgtccgtccaaggttcacacaaaggaatagtaggctttttcacgtcatactcatccattcccccgaacagcgtcgcctgcatcatcaaactatcctgttgcttcttctgcccgtaattcaccagattttcaagaaatgtcgcgtgcccgtcaggcatatagaaatactgcgatcgatccaacccgaaactatccaaccctcctgcggtaatcagattttccaacgtcttcttattcaccgtcttgtaatccaaacgctcgaagaaatcgaaaagatccttgtaaaccccattagcatcccgctcccggataatcgaatgtacggcagcctcaccgacacccttaattccagccattccgaaacgaatatcccccttgtggttcacagtgaaatcatcatccgactcgttcacatccggagccaacacactcaatcccattcgcttacactcgtccataaaaaccgtcaccttctcgatctgtgacaggttacaacttaagttggctgccataaactcggctggataatgagccttcaggaatcctgtctggtaagcaatataagcataacaaaccgaatgcgatttattgaatgcgtatgacgcaaacgcctcccagtctccccaaatcttatccaccaacggattgacctccttacccatttccttgcaccccttcacgaactcctcgttcttgttacacccctcgataaattgagtcttcaactgattcatcgtgtcaatctgcttcttacccatcgccttacgaagagtatccgacataccccgggtaaaattacccaaagcacgggactgcaacatcacctgttcctggtaaaccgtgataccatatgtatccttcaagtaaggttccatcatcgggtgatcatactcgataggagcttccccgtgtttacgcttgataaaatccggaatatactccatagggccaggacgatacaaagcattcatggccaccaaatcctcgaaacggtttggtttcaacgctctcaaatgctttttcattcccggcgactcaaactggaacagaccggtagtatcccctcttgaaaacaattcgaatgtctctttatcctccaatgaaaccgcatctatattcaacgtctcgtgacgagatttctttatattatctaaacaagtttttataatcgaaagcgtcctcaaccccagaaagtccatcttgatcaatccgatcggctccacgaagtgaccgtcatattgagtcgtcatcaaactttccccttccgttggcataattgggatatgttccgtcaacgggtcacgactgatcaaaataccacaagcgtggacccccgtctgccgcacggaaccttccaaaatttccgccaaatggagcgtttttgctaccagcgggttcgaggactcccgttctttttccaaatcaggattctccttgtaagccttcttcaacgtgattttcggggtttccggcaccatctttgccaaccggtttgcctccgacaaatccaacttcagcacccgtgccacgtccttaatcgccatcttggcagccatactaccgaaagtcacgatgtgcgacaccttatccgccccgtatttctgtgtaacccactccaacacccgctgacgcccgtcatcatcaaagtcaacgtcaatatccggcagtgagatacgatcgggattcaaaaaacgctcgaacagcaaatcatacttcaccgggtcaatattcgtgatacccaaactatacgccacggcacttcccgcggcagaaccacgccccggtcccacgatcacccccatatcacgagccgcttggataaaatcctgcacgatcaagaagtaacccgggaaacccatcgtcttcatgatatgcaactcgaaaatcaaacgctccataatatccggtggaatattctcaccatatcgccgcacggctcccttcatcgccaactccttcaaataatccgcctccaacttgatacggtaaagtcgatcatatccccccaacttcttcactttcttttgggcatcctcctcgctcataacgacctcacctttctcgttacgggtaaactcgttgaacaaatcctcttccgtgtatttcttccggtactcttcttccgtaccgatctccggcgggatcgggaaaaccggcatcaacggatcagaatccaatttataatcttcaactttatcaacaatctcctgcgtattctcgattacctgcggaatatccttgaacaactcttccatctcggccgtcgtcttgaaccactcctgccgcgtgtaccgcatccgattaggatcatccaaatccttacgagtattcagacaaatcaacaggtcatgcgcctccgcatcctccgcattcaagaaatgcacatcgttcgtggcaatcaccttgattcctaacttctcacccatacgcagaatctctgcgttacatctcacttgattatcgtaaacctccgctctctctttggccgattctgccggatgcctcatcacctccaggtaataatcctcccccaccaagttcttgtaccacaaggcagccgcctccgccccctcaatatccccggccataatcttctggcaaatctcccctcctaaacaagccgatgaaataattaacccctcgtgatgcttctccagcaaagccttatcaatacgcggacgataataatacccatccacgaatgccgcagaacaaagcttgatcagattcaaataccctttcagattcttggccaggataatcaaatgctctcccgaacggtccaccggtttctccttgtcatacaaagacacccgggccacgtaggcctctacccccaaaataggttttatcccctttttgcgacaagtatcatagaacaactttatcccgaacatattcccgtgatccgtcaacgaaatcgccttcatcccgtcggcaatcgccttctccaccaacccgggcacactcgccgccccgtcgagaattgaatactgagaatgtacatgaaaatgcgtaaatgccatatatacacttaattaaatattaacacacccctaaaaggcatatcacaaatttagccaaaaatcccgacactaccaccccgtataatacaaacaattctaaaaagcagtatatttcccattaaaccggaaaccaatccccagcatcaagaaattaggttcgttaaaattttgtagacgataccccacgtgcaaaaacacggcacgggacaaggctattttcaacgtcaatagctggtaaaacatattcagatcattcttcccgatcacgttcgccccgatcccaactcccacaacaaaaaagggcattacgtactccgcccgcccggaaagccccaaggcgaattgatcacccagagggggacgaacaatgtccgacttatccaccttcccgtacacgtccccttccgtgtacaaattggctcccccgtcaaacgttccatccaaagacacgcctaaccggagtttataattcaaattatacatcggggtaaaattaaacccgaacacggggtaagcctccggagaaggggaaaacccgtcggaagtcttcaccagccgatcgtgccacgagccgaagaaaacaaaatcatacgtgaaatgtcgccgaaaaggctgtgccaacaaagcgtttttcctctccaacgacttcaaatcatccttccggtagaaattacactctaacccgatatttcccccgatcgtgttcaacccggcattaggaatcttcgtgttcccgttggaaaaatgtgatactgtcaaccccgaaagcaggctaaccctcggggacaacctccagcgcaaataaaaattagcattaatataagcattcaccttcgaaccgatcatcgtgttgtacgaattataatacgagtcataaggtttccaccccgcagacaaaccaaaattccactcgtaatacaaagacaaccaaggagctaaactagagatccgagctccttgaaataaataaaacgcaaccgggtttcctaactgtcgggattccccgaaattataaaacccgagtcccaccccttggtaaacatctccataaatacgctcgtcaatactccccggacaataacggaacaaatatttcacatgcgtggaaaaagctccccggataatcctcccctccgcattttcccccttcagaaaagaacttgtcgggaaaatatactccggtcgaccctccacccgcaatccatgcacgaacttacgtggcgacacgtccaccaaactatcgtttccctgtcctgccacacgcaacacgcccccgacgaatattatccccagcaaaacgattactctcaaaatcctttttataccatccatacaaattccattcataaaataatccggttaaccactcttagcctttcctctcaacagttccggttccggcaaagaaacccgggtaaaactcacgatagcggcaagcgtggcaaaccctcccgcaaaatagagggaagcatacgtcccatctaccggaaaaacaacaaacatcaaagccaccaacgaggctcccgtcgtctgtccggtcaatcgggccatacccagcattccgctagctccgccactcctgttctgtggtgccgaagaaattaatatactattattcggtgtctggaataacccgaacccgaatccacacatagccataaacaaagcaattcccgcattagaaacctgattcgcgaagactgctaacaaaaataatcccgcggagaatatcgacaaccccacaccacctaacacccccgcgtgaactcgctcgatcaacctccccgccaaaggagccgcaatcatcgtcgccaatggccaaggggtcagcaacaatcccgtcgccacctcatccagtcccaacgtgtgctgcaaaaagaagggcaaagaaaccatggccaacatctgcgccacgaaagaacacacggatgtccccacagacaacgaaaaaatcggtatcttcaacaaatcgacaggcaatagggggtattcctgcgacaactggcgacgcacgaaaaagtagccgaccaacagcaccaccccaattcccgggagcagtatagataaactcatcccgtgagtgaatccctcgatagagaaaatcaataacccaaacgtgaaggcgttcatcaacccacttatccaatcaaacttccgtccacttctttttaccggattcacgggcaaaaaacgaaaagataaaatcaacgccgcgattacaatgggaacatttatcgcgaacaaccactgccaggaggcaacagacaaaattcccgccgcaatcgtcggccctcctgccgccgacacggcaaccaccagtgcgttgatgcccattccccgtcccaaatatcgtttgggataaataatccggatcaaagaagtattcacgcttgccaaagcagccgcaccaaacccttggaacacacgagctaccgtcaacgtcagcaaagaattggaaagcgcacaagctaatgaggtcacgctaaatatcaacaagccaccgatatacacccgccgataacctaaaatatcccccaaagaagacagagacaacaaggaaaccacgatagccaactggtaagcattcacaatccaaatagacatagcaggcgttgcctgcaaatcctccgcgatagacggtaacgccacgttagcaatcgtgccgtccaacacggaaaccgtaattcccatggcaatggcaagaatcgcccagtatcgtttcgggataggcaacccgtcccattctacctcttttgtgctcattttcccagtccaattttatcgtgtaaaagtacgaaaagatttccatttcatctgccacacgaaaattttaaaagtttccttatcagttgtctgtcggtatttaaatagtaaacaaggagatgacatagtgtactttcctgaaaatggttgactcggattaaacaaaaattttaacaaacaccctaacaatgtatcaaag

SEQ ID NO: 10704 - DNA, 5122 bp, Unknown
  gut microbiota DNA sequence
aagacttagcagtagaagcacgaatattgtgttgtgatttgctttcaaattagtacctttgttgggtcatcaacaggtggttattagtatagatttaataatcaaatcattagtctaatagctagaattaaaaaaatgacacgttttaaaaattaaacccattgataaaatgggttttcttatttctaaaaaagttcaagttgttgaccaggagtcgaagatctcacctcttttttggaatagtaaatttcaatatcaccaaattgtttatccgttatacacaatatccccacatgccctttttcaggtaaaatactttttactcttttaatatgcacttctgcattctcacgactagcgcaatgtcgaatataaattgaaaattgaaacatcgtaaatccatctgcaagtaatcttttacgaaaatccgcagacatctttttttcttttttcgtttctgttggcaaatcaaaaaatacaagtacccacataatacgatattcactaaaacgttccatcaaactttctctggatataaaatttttcgcaattctcccgtaaagcacttgtagagagaggctgttgtttgcccaacagcgatcattaacgggctacgttgaccatcaatcatgacatcgataacagggattttcaacaattgagcttttaactctgtagttaattctttacaagcaattcctgtatcaacaattttcacaaccaactcatctacatatggacgataaggctccattatatcatctgccaaacaataggcattatatctattatgatgatgaatccctaacgtcggcaacaatccacttgttaccaacgccctagccacgacagctctcaatatggcataaccataattaagcaaattattaggaggacatccctctctatcacgagtaaattcgggaatttcaacaaaaagatttcgccaataataagcagcggcacgagcctctatattatttgaatctccactttttacctcatttgcccatacaagcatatttttcaccacaacttggcgcattccccctaacacggctgcctgattgcgtattttatattgaatcgtttgttgccacaactgttttttcaacggaacagacacgtccaactgatttcgaaacctctcattttgtgtcgtattcccatataaaggcaataataaaccaacaggaagacttttacgatcacaagtaatcacagcacaattattctctaacagactttctaaaaggccatgagttattgttatttgcttattatccaaaacgataaccccaatatcctcaacaggaatcgtacgttccgattgttttttaaaatgctccggtaacgaatcatttttctcaacttcaggtaacttgacaactaattgtgcattttttaaactaagataagctggattaccaaaatacaaagttcgtttaatcatgatacgatttttgagacatttacattccagcactttaaaatcttaaagtgctacccttaaactacaaatcggagaaaacgcctctatcttatttttccccggctaccacgaacaaatttcaatattccccaacatgaacaatttgcccgatatgatctatcctaactttgacaatctgactggcaaagtctaaacttttgtattgtttatatgcaatatcttttaattctttacaatccttcacggttgtctccaaatgatgcctgaacttgtaatcccgtacgacttggtttccatacatcactcttgacatagtttgtaccctgaacaaattcgggctaattaaagcatagttatcaggattcatcaaatccacctctttaggatcaaatccggtttcttcattcggaaatacaaaatactcattctgtttcatgctaaatagaaactcccatccctcctgttttttatactctcgatcaatgacaggtagtccctctttcgcccgaaccgtcgcctcgaagaaagaaacaacatcatcctgaatcttaccctccggatcccggtaaaccactacgtggtgattattacctgaacaaacaaaatcaacaggttgaggctgcccatgttcatctaaaaccagtttcccatccttgtccaatttatcatgtaatgcgatcacattactcaccccactaatcgtaacccgtttaatatctatccccttctctttattcaaccaaataggattttcatctaaattagtaaaagccagtttactatcccctccgaactcaacaagtcgtgtttccagaatatctctaactcttttatctatcaccttatcaacttttaaatcaggacctatctccttccgtatcgtgtacacggtttcaaaagaaacgaccttcactttctccggcaccttacaagtatgggaatcattaataaaaatcgggttcttctccaaactatttttacctgtaaaagccttcttggcatcttgatcaaaggcatttagtcgtttcaacaaagcctctctatatgctttattagccacttttaatatcatctccatgttaaacgcactcccgactttcacctctttcgtcacgtattgtttaatactcccgtatatcgtttcttgatgaagttgtccccgaggcgttaattgtaccttttgattcataccccctcttttcttacttttatttacgttaggagtgataactttatttttggcctttgtcgatacgaggacattttcaaggtgtagcttagcctccattcgaaattcttttaacggcattggcgaattaaagcgaagtttacccttactatcccgactcaattcatctcgctctattccatacacactactggatttatcgccacgagcgttaagattattcaggtattggacatacttaggttttgtgaatgctattgtcaaggcatccatcgcgtgatgacgatgatcattacgtttcgtccaccctttaattcgtcgaatttttcttccgtctcgatcttcaacaatttccgttaaccccaaccgctcgtatttgttccagttcaattctttcatcacgtccacgagctgccaatcttcacgcaaacgatccgtgaccgcccccgaggtagaaacaacgttcccgaccacctcttctagcatcgctttcgcccgacgagctatatactgagtatcacgcaaatcccgatcaataaaatcatctggaatatcttttcccgtcattctcaacttgttatatttagctttattaatatatccccctttaaacaaatcctcaacacgttccaagtattcttgcaacccagcttcccctcctttacccgaaacataatcataagcagtctgattatctttttcttgattcacactccttaattcgattgttttattagaaaatgaatcatcaaacaatcttgactgtggtataatatgctcaatatcaaattctttaaaaaacaacttttccagtggaatgtacgtgttagaatataatgttttaaaaccacgagactctaattccaaataaagtttatatcgaacaatatcattcctacttacttgagtaaaaccgaactcttttttcaaaaccgaacgcaacttttcattctctatagttgacttatttatagcacgggtccattcttccctttccttggcgttttttttcagttctctagccaactcgatccgaatctcatcgggtttaccatacttgtttataacaccgtttacaacatgaaccatctggttcagaatcttttcaacaaccggatttctcaacgtattcttgggaagtatatccaacctttcttttaacactcgtttctccctctcttccttcgtcaaggaattctttgaatgacgaaaaccggcatattcacacgctaagctatatttattaccatccttcaagtaaggcaatatcttatgaatagctttagcactcaaattcccataatcaggagggaacacaacatctgcaagtatcacggcgtattcccgatcaaaaccataaaggttcgtgattttatttattaaattctcgttaccactgttggatttatccccttcaaacgaatataacaaatgccacaaccgatacaagggttgttgatccaactctccctcgctattaaaatataaaatatccgtattataccccaacccgtcaaacactccggacactatttctaatatttcagaagataacatccgtgtaaaatcatactctccatgtccacttctggcgataatttcctggtaagccttgaataaagtagcttgcgtacgattaccttcaaccttttcataattcatatccagtttccgtgcatcttcaaaaagtaattctaacacgtctcgcttggaaagtttttccttcaaagacaattctttaaacaaaatttctttctcttcttggttcaaattaggctctttatccctctcgtccattttacgagcctctgaagatttacttttatcgacactccacacgcaaatattattcagtatactccaaatcttaaattcttgaaacaagggggaagatttaggacataccctagagccaacaacctttctcctcatcttcccgtttacctcaatctccacaagtttactttcgagttcgcaaaaagaaatcaatcctttttgactttttaatgaacgctggtaaaaaataattatatcccgaatctctttcttcaattccagagtcaattctttatgaaaaccagcttgtgtttcccagattcgttcaaattcatccaagtaatcctgacgatagaagactttacttttaagactaccattcgggttcgtattcaatttttccatcaggtattgccccaccgtctgcttgccaagataaagttctttacttcgatccccgatagctccaagatacccgctcgatccgctaatggaaccgtttaaatcactcatcacaaaagcaagttcctcgacagaaagttttcgggataatccttcaactctccactgcaatgctcttgataatttatctgcgcctttattatctgccgtgtatatctggtattctcttaagaatatttgggacgtgttcttctggcctttatccctgatctgttctctaaaattctgagtcaatatctccg

SEQ ID NO: 10705 - DNA, 92273 bp, Unknown
  gut microbiota DNA sequence
cattcaggtaaaccgttgttccgtcagccaacaccaaagtatattctcccccgcgaggaacacgcaatgtatgatatatctcgctggaatcctgtattccactggcaacaacttccgtgtaattcagcgtatctccgctatttttcactccctcttccaaagcccgattcgcttctcgatccaaccatactttcgttccatccggcaataccaactcggccatggacacaccgggaacaattcggggagaagttactaccggccctgtttcccatgtagtatcccatgaaaaatacacgatcccgcctaccaacaaaggtaagacaaacaaagcggcataacgcatccacgacattttccgagagtgccgtttttttcgcaccgtccggtttaaaattcggttccattccagctcttgctgctccgaagtcttcacgaagcgacgaatccccctctccaatttctccctggaaaccacgttccggaacaactcctcatgctccgctcgctcgtctcgccagcgttttagctcgtccatctcctcctcgctcaattcacctttcacgtaacgaacgaccatttgttttatccgatcattattctgaatctccatgttctgatattcgttttatactaaagcacgcaaaccttcatttggtgtaatacaaaaaccaattattttttactcaaatcaaaatatttttctaatcataccctatttcaagggttaaacaacccttttcacaaggttataataccctatcgcccttctatctccctttcatcgccctttcatcacccttccgaaagggcgagaaaaggctaaagaagaggtcttgtaatttccgacaggtagttaaaccctagtattacggtagtaaatctttggtattagtatgttctcaagaaatccaagcaagtagagaaagaacatttttcagccgctccctcatataatgattggcattgttcttatgctttttgaccgtgttgaccgatatattcaacgtttgcgcaatctcttcatgacttttcccgtcaagactcatctggtaaacttctttacacgccgggggtaattcgttaaagacatccgatagggtttgaaaaatctccgattccagaatccgatccaaaaatgattcggaatcctccccctccattaccacccgtctggcatacttatcctccacctgttggtggcgcatcaaattgagacaatcattccgcacggctttgtacagataagctttcacggcatattctccccggaaatcagcccttttctcccataaatcgacaaaagcatcctgcacgacatcatcgatcatcgtgtcctcgttcaaatacttcgcagcaaaataacgtaacgcaacagcgtatctgtcgtacaagacacgaaacgcactctcccctccgcgagcaaattcctggattatatctacttctctcgtatccaaattaacactattttcttctacaaaaatacaataaaatataaagcacacccatattctgctattgtttttaatgatgtttctctttcatctcggtgcgaaagagccgtagtaatgtattcacttgcatacgttgggatgcctcttgatatgagattgctgacaagtgcaaaaacggggttttcccttttgcgtacagtcatgtcaaatggagccataacctcaaaagctccctttcctatattcttttggtcttgtattgtctccgcatagcaagcgtacaactgtacgggaacaaaacatttgtatttgtgaagaacactttcagcagaatccagcgagaatgcgaaactcttaatcaagcctccataatctctgccattcgggtacttaccgaatctcgtttctcgataatccgcaaacacttgtatgttgttatccttgaaataattcttaaaggcatttattcggctttcgttaagattggcaggaccgatacagagtacaatatgctttacaccagaagatgtaatcaatttggaaacacctttaaggcttacagattcaatatcaagtatattggagaatatatgaatagtacaaggttgctctacagcaatatcttgagaggtatatcgatttctgtcggatgaattatgttgtctattgtgagagaggtatattccccaagcttgtcttgatacatattatcttccggttattgtatcattgtctttatttaactgatgttgctttcaatttgcaactgccacttctttgcttgcattggcatagcaatattcacataaatgtgggcatgtgttgtattcacctatatctttacttttcatacaaccgcatgccatgcgttgtcctttgtctttgttgttcttgttaataacaacacagtgactattatctaaaaggattgcatccgaaggtatttccaaaggctctatatcaacaaacaaatctggttgttgcttggtatctattatctcgactccaagaaaagtcatcaacttcttggattggtaacccaaacgtactattaattacccataatatttgaaaatgacgaatatatagcgatggaattgagttcttttgttctatttgctattaaaagtgtaccaatgatgcttagaactatacgaaacaaagactttaatgctgtttttcggataattagttgtaattttgcacttatgaatagaggtgtttttactgattgataatatagtagtcatcataacaatggatttgaatactctgatagcagaatgtaccacatacgattttaagttgatgctggaagaaaagaaacccaagagctggttgaaaagcgtaagtgcttttgccaatggtttgggcggatcccttttctttggcattgataatgatggtatagccagaggtcttgatgatgtacagcatgtgtgcgaagctatcagtactaagatttgcgactatatggatcctctgccagaggtggagatgattccgcatgatatggatggtttgcacatcttgcagctcaaagtcgatgcagggcattatactccgtattactacgttggggatgttcagcgcattgcctttgtccgtgttggtgacgagagtcttcctgctacggcagaacatatggtacgattagttcttaaaggttcaaacaaaacctttgattctctacatacagattataatgcagaggactattcctttacgatattggcaaatgctttcaaagaccgcaccaaacaagaatgggacaagaaatatcttttgtcgtttggattggtaactggtgcaaagaaccttacgaatgctggtgccttgtttgccgatgactgcccattgtggcaatctcgcctatactgcacacgttgggatggaaaggaaaagggtgatgctatcaatgatgccgagtttactggaaacgtactcatgttacttcgtgaagtcatgaactttgtgaaatccaacacaaagaaaggctgggagaagttacctgatggtcgaaagaacaagtctgaatatgcagaacgtgctgttctcgaagctatggttaaccacttcattcatcgtgactatactgttatgggtggcgaggtgcatcttgatatctacgatgaccgtctctccgttacgtcccctggtggaatgtacaatggaatgctgattcaggacttagatatcgcagacgtttcttctgaaagacgtaatccaatacttgcaaatgtcatggcccaactggactatatggagaaaagaggtagtggactcacacgcatctgcaacgagaccaaagcattggatgggtatagggatgaacttaaacctgttttcaaatccactccaactcaatttcagaccatcattttcgcctcccccccccccaatgtcggagaccatgacggagatgtgtcggagacgaaaattactgagcgtcagcagaaaatactgaatctcatcaaagagtctccgacaattagtggtcgccaaatgtcggagaagctgtcggtgagccaacgcacaatagaacgagacctttccgctttgcaaaagagtggaattctgaagcatgaaggcaaggataatgatggggtatgggtagtattagagtaatagaaatataagtcaaaatgcatctgtctgctctcaaactatggaatttcaggaaatactgcgaaggtcctaatggtgagccagggctagtggtgaatttccatgaaggcgtgaacgtgcttattggagaaaatgactcaggtaagacggccatcgttgatgctattcgatatgctctgaagacacaaagcggagagtttatccagtttgatgataaagatttttatcaagatgtcaacggaaatagaaaggaagagtttaagatagagtgcgtgtttgacggattgaatgaacaggactcaggcttgttctgggagtggttgtcatggaacgatgataaaacaagatatttgttgaaggtatggctttatgctaagaggaaagataacgtcattatgccatcgttcacagctggtatggtattgaaggacaagcagacagaatggactctgaagcgcgagaattgttaaaggtggtatatttcaaacctctcagggatgcccttacagatatgactcatggttataagtcaagattggcgcaaatcctcggtgcacacgaactattcaagactcaaaaagatgctgaaggaaacagcactaagcacaaactggagaccgactatgagaatttaaagagagaaatagagaactatttcaaagatgggggtaatggctctattatcacaggggacattaataagttcttaaaaaagcatttcctgcttaacggagacccgcaaaatgcccagattaagctgactggtggagaactaacagatatattgaggttgcttgatcttatcatggagggtaacaaatcgggactcggaacgcttaacttattgtgtatagcagctgaaatgcttctgttcaacaaccagaagaaaggattgaagctggcgatagtagaagaactggaggcacaccttcatccgcaatatcagttgaggttgatagattatatttcctcccaacaaaacaatgaacagtttattctttccacccatagcattacgttggcatcgaaaatacgacttgaaaaccttattattctaaaagacaaggaagcatatccaatgtctgcggattacacgatgatgaatccagctcagtatttgtcgggtacgcttctgcctctatttgataaaaatgaggtgactgtggttgctaatacattctttaatgccgttgcagacgggaaccaaggcggacaaaatcttgaacatggaaacatatacaaagaagatgacatggagattgagatagccacggttcatgccgtgaaaggtgaaacacatgctgctacgctataccttgaaacctttttcaacaagtattatgagtctgaacggttaaaagagcaatttaaggggattacgtacatggggactgatgatgatacgctaaaaagtcttagggtggtatatgttggcatgagtagacctcgctacttgttatgtgtcgccattcaaaaggatagatttcacactatcgactgtcaagagttaagagatatatgggatgtggtagaggcatagaccctctaatgaaagttaaatacattaaatctttattttttccgacgtcctcagaatcagcatcatcactttcctaccatttaatttacaagttattgatataaagtgaattacaaatacacgcatttattcatatcggtaatgtttatcatgacataccatccaaaattttatccgaggtaataaagaacaaaaaacactactaaccaaatattttaaagccagttaccatgcaaagacaaatacatttgtaataaaaccaaaacaaaaattgaattctcatgtaacaaatccaaatcaaaacatccggttcgtgtatcagcttagaaaagttttcatccttgaccaaaaacaaagtgtatgagaataaaccttttcatccccgttttgtcttagaatcagatacattaaaaaaccaagcatgggatactccatatagattccatgtaattataaacgattaaagaataaaaacatgaaaacagtaaccctaattatctcgtcgctttttcttttcatggtactaggagtaagcgcacaacaacacggtccacaacatcgcgggcaaagaggtcacatgaaccccgaagaaatggtaaaaagacaagttgagcacatgaaaaccgaattgaaactcaacgagcaacaagaaaaacaggtaaaagatttgttgactgaaaacttcaaacagagaggtgagctcatgaaaaaatatcaaggacaacgggattccgtgatggtcaacatgaaaaagatggaagagcagcaaaacctttctctaaagaaaatcttgacggaagaacaatacaaaacttacctgaccaatcaggaaaaaagaaaacaagaaatggaaaaacgccggaaagaaatgatggacaaacgtggcggacaaagagacggacacggtgatccagctaccgtgaacgaagatcacgaatgcaccggatgcggaggttgtgacaaacacaaataaccccatatattgatcaaatcataaagccgaatctttttctactaacgaaaaatgtttcggctttattcatggataaaactactctcctaattcctgctctaaaattttcagcacctcttccggtttcggattcacggctaaaattttcccgtccctatcgaccaaaaatacgcctcccccggcatttcccaacatatactgagtccatattcgacacccatcatctaactcaaccaactgcaaccaaggataaccgtccagttttatagcctgtttcagacgatccgtgttcttgaactcccgtgccacgccaacgatctcgaagcctcgatctttatacttctcgtaaatcggaatcatcgctttcgcctttgctcgacaaggcatacaccaggaagcccacaaatcaataacggcaacctttccttttataatatccgaaagtctcaccttattcccttcaagatcaggagcctcaaagtcgacataatgtccacccgatctgacattatggaaaccgtcaagtaatattttccccaaacgagtatagtcactggaaacaaatttttctgccaaaacatgataagcatgctctaattcctcatctaattcagactgatacatttgtcgtcgctgtaattcttctatcactaaaaaataatacaactcatcccattgcccctcacagaacttatgcataaaagagtatcgtttccaacctatttcctgttgttgcaactctcggtattcttgatatctctcgttaaactttccccccttcaccatgtaatttttatcaacattcaccgtaatatccactttcccatcttctgcaatgaaaggaaccgtataccactcccagggtttccgggttacaaatatcaatttatacccttccgcatgtggcaattccaacacacattcaaaacaatgatttttcactgtaaccgttgtcccatgataacgggaatccaacgtagcatctacccaaagcacatcctccacttccatcccgactagcttgccatgaacaacacagcgcactttattctcgtctgcaaaaacaacattccctaagaacaagaacaaaatcaaccatcttaaacaattcgtcatatttttccttttaaaatagaagaggagctgcaagcagctcctctaaactatacacattactattttataaccgggaaaccttcctgctcccgatccaaacgatacatatgataaaaattaccgttaccgggctcgtaagtcacattcatcacctcacccttaccattatcactcttaatcaaaaaattatactcattcaatacatatgacgtaatttctccattcagattcaatgacaaagttcgggcatcactgtaattcctgtctaatgaataaccatcaccctttaccgaaaccaaattgttgccggaatatgtgtacatccgatcatttattaaatcccaactcgactcactatgattattcacttgatatatccgattcttcataattcgctttccatcatacacgtattcatatttataaagtgtacgagtttcataattttgagcgtcatccggagcaaacgtatcataaaatgaacggacattaacaatcgaagctccttctccatactcgtaaataaaagtctctttgtaatccaacgtataggtattatcaaaatcatcccctaaaccaaaatcagttttaggaatataataactgaatacctgttgtgtgaccatactctcctcatcaagagtcacatctactttgtacaaagttcttgctatcacgggaatgctatcttccaaagaataattcccaaccccatattttcctttcagccacaaatccaaacgagcaatagagtctgcatccacgttattcacgtaatcattcacggcataggtaatgacaccttgttctttcgtcaccgaaagtcctccttttcggcgaccgtttttatcataacgactcatattctccaacttatcgttcacatattgaattttcaacgtgtaatcaccccaatgatcgttatgtccggcaatttcgctcacccgaaccggattaatcggacgtaccccgacctcgatattatcatcgtcatcattacaagccacccaacccattaccagtaataacagacagatcatatttcttaatattgttctcataaatcgcttattttagtttcccactttattataggccactttcgtaatccggccaaatccttcatatctcccgtgaatatcacgattaggttccaaagtaccacttgtcagtttgacaataggaattgtaagcactttcccctccccggttgattcgttataagtcgtaacaatcaacatccggtattgagcattttgtgttgtcatcccggtagaactcgtctcactactcacgttcatcctgccatattctccccgccacatcattagagaagtaatttccccgtctcgatctctatccacggtataacgactttccgctgtcacattctgggaatcacccaaggcaatcgtatatatctgatcttttgttgcataataaaaatccgtcgagatcggagatgcagcaaaacccacggcctcatttattccgggacagttcgttaaaacatatcgccctttgggtaaattacttccggaatcctcttccttggtctgcatagcggctagccaataatcatttcctttttcagctttgaaaacagtcattaactgggcattttcaccctctcccatgtatatcgcatcatacgctcccacgttattcacgtcaaacaataatcctgaattctgctccctaaattgaaggaaaccatcataacgactattgacttgaaggaatcgatttttattctcgtcaaaaacataaggtacggcatagtaatatgttccgcaaacaaccatctggcttacatcatagtcagccaaatcaggagtatacatgtaaaaattgtaatacaaattaccccaggaggaatttcttggatatactttcccattcacattcaagaactcaacaccccaataatcccacaacatcatattcttagggtggagattttcatcaatcgccacgaagaaaagatcgttattcatttcccaatctgcaaactcgaatggatcaacccgataaatatccgcatcagtcaagatcgtcagagtccgagaatcagacttcacgaacgattgcatatccttcaccaacccattcaaacgatgttgattcacggaagaataaacattcctgtacaacctggtattcttttccaacaagccacgggtaaaattcatcgccataatcaatgacacatctcccgtctctccgtcccgggtatcggcaaccaataatccctcacccaaagaactttcaaccgtcactgatattcgggagaattcttgaatatcagttgttttatccgtaaccgtcagaatcagatcgtacgcggtactattgggggcagccgaaatgggttcacggaaagtcattttattcgataatacagtctccggatactcatttccctgaatcttccattcgtacgtcagattctcgtcagacaccccgttcttgtaaataatcggattaatctccagtgtatcaaattgaaaaatcttcacggcggtttccgccccggcaaattcgatcacgataggcttcactattttaaaatctttggcagaatgatcctcgtaacaagacatcgccgcaaaagccatgtataataataaaaatatcgatattcttttcattgttttcttctttactgaattaaacatcacgctataaacattccgttaaggcattttcacctcgtcacccgcataatccccgtcttcatgccgcagaggatcattcggatgttcccggttatactggagcaaggctgcctttaccttcccggcattagccaataattgattataactccacttttcatccccctcttgagcggaaggataaggaatatatgatacattcaacacatttaggataaaacggtaccaacttatagagaattgttgcccaaaataaaaagccaaatttccccaattcttgggcttaaccaactgattcgtcattgataacttgaaataacgattatcaaaaccggcaagtggaaaatcttcattgggaaccaattttatatgtaccacgaaagtgctatcactcatgtccggagtacaatgaatttccactgggacctctcccaagaaagagccggcaggaactaatccttccaataatttatactgctccgaacgagctgtgttcacattatttgtatcattttctaccacggcaatcgatacctttcgttcataatcaacggaatcccctgttgttgcaaccgagatataatacaaatgtaccgtctcgccataattatccacgaaactatattcatcttcagactgatacaagaatcgcactcccgcctcttgctggtacatgatggttttctcttgatcgcacgacacccataaacttattaccaatgccgctatcatcaacctaattatcatctgtttcatacacatactttttaatctgttattttttcttgtaatcttccattccgcccaaacctacatctccagagggtaacggaactacataaaccgcatcactacccggtttggtcgagtaaggaatcttctcgaatcccaaccgtttatagtaataaaacaactgaccttcccctataaattcacgctgatactccttcgtgatttcgtcttgcacggttcccgccgtcatgtcattaccgagttttgcaattcccctgttgtccctcaccgtgttaagatactcgatcgcttttatccgatcggctgcattacctgtttccaacaaacattcggccgccatataatacatctccggtttccggattagaggtaacacgcttccatgcgagtattcctcgacctcccagtacttatagaaagcccagccgtcaaaataatcattcatcttattgtaccaccgtttataacgataatccgtgcttacaccattaacagcctcaaacaatttattggcccgttcgctcgaatgatataacaaatcggcatttcggttgggcttgtttgcattaggatcaatataatgtttaacactctcgaaaagctctgctatatccaaggcaaacacatgttctcttgaaaaagtcaaatccctatccttctcgtagtaagcatcaatcgtgtacgagtcaatccaagaagtccgacctcccttatcaataaaagatgttgccaagggcaaggcttctcttttccgtcccatccacatatatactcgggtcaacgtacaaaccgcagcccaatagttaaaccgtttttcacgattatcgaaaaatttatcctcgttcggtaaatcataatcatccgacttgggagccaagccgtaaggatcactattattcagcaattctatcgatgccaataaatcctcttcaatatgagccaaaacttcaccaacagtcaactgtttcgtcaaaaccttatcatattttgtcatgtatggcatacacaatttctccaaattttctggttttttcgcaagattaccccaaccaaacagacgtactaaatcaaaatgcaaaaatgcccgtaatcccaaagcttccccttttaacaccccataggttgccggagtaaacaaattctgttgttcatccaaattttccagcatattattcaaattcacaatagcattgaaagccttggcccaaagagcatcagaaactcccgaagtctgggaataattgtaacgactagcattataataagcagctgcctgatcttgaatgtccgtttgttgcccaatagcatccacaaatccccacgtggcttcctttccatataattcgggatcacgtagtgtcagataaacccccattagagcatccttgaacccgctctccgattgaaacatcaattcggatttaatctctgtttttgggtccacatccaaccagttctcgcaagacattgtcgtgcagagtaacagtaaaacacaaaatatatcacgtactttcttcatagtcactaatattaaaatgtagcttgtacagcaaaattgaacgatcttgcaaaaggataagcggtacctctttccgtcttaatcgacgataacataaacacatcattcatgtaaaactctattctcaaacgctccatggcaactttcttgataaaattatgtttccaaaaatcatagcccacccttagggaagagagactcaattcattacgatcctgcacaaaacgggaagtggcctgcgttttttcatccttgtattcattctcttctgcaacccatcggttccccaaggttttatacggtttcaaatcaccgggattccgccaacgaccatcatacacccgtttatccacattacctttcaacgaagcattttccactttatctaccaatgtttgattatacatttgcgccccatactgaaaacggaaagtcgcattcaactcgattcccttatagctaaacatgaacccggccgttccttggaaatccggtagcttgtctccacaaacgacctggtcagacactctgtacgtgtaagttctatttcccttcttatctaaatagatctcctgcccattcgccgggtctatccccaaagagcgaacagcccagatcgcatccaaagaaaccccgtcataatacttttgtaccggtttattataaaatacgctactggcaacctcgtcttgtttgtcattataattctgcatagcagccgacactcccgttatcttattcttgttccgggaaatagccgtggtaatcgtgaaataagcccgttcccgaggcatattccatggagttatactcaaccgaagatcaaatcctttattctccacatctcccacattttcttttaccgttttgaaccccgtgtatgtcggaatgtcaaaatccaataaattatttttcgtttttcctatataataatcaaacttcatactgaacaaacgcccaatattaaaatccacccccacattataatcaaacttttctttccacttcaaatcctcatttctcatcgccttcaacttcgatcccagaaatcccatgtacacccgttccaaatcatattcataagtagccaaagatgcgtaggcttcactactttgtgctccggtatacccgacagatcctctcaatttcaattgttgtatcttagagtctttcaaccatatctcattatgtatgttccagcccacaccgacactccagaattgtccccaacggttattcttcccatattgactggaagcacttgtccggaaagaaccatccacaagaaaccgatcatcataggcatagttaccggcaaacaacacggcaatatcccgaatcgtggactcccgccccgtcggtttggtatccttcacgtattgacgagcaaacatcatatcgttcatccgatcatgcgggaaaccttctgccttgtaaatcaactcctcgtaataagcctccgacaaagtaaaaccggcattggcaaacacataatgtttatcaccaaattgttgcgagaactgcatattgatgtcaccactcaaccgcttctcttctccttcattcatttggtaacttcctttacggaataaatcttcccccgaataacttctaaatttcaaatggttggcaggataaaactcatccgcacgtactcttttctccgtaataccaaaacgtcccgtcactttccatcccatcacgatcatccactctacactgaaattattcgtcacgtcaagatacttacttgttaatttcgtgtttaaagaagcattatacaaagggtttgcttcaaaattagccgccccgggaataatactggcattctgtaccaaatttcccttctcgtcatacggggaaagataaggattcaaaacagcatactcgctgaaagtcccgtaaggagaatcatttgccacgttggatgtaatcgttaaattatctcgaaaattcagtcctttgtaacgatatgaaatagacacgctaccctcgtaattcgtacggtcggaacctttcattgttccttgaacgttattatagctaaatcctacaataagattcaaccgctcatttcccatctcgaaagaaataccatgtttagtcccgacaccattacgcaatggtttggacaaccaatcggtatcaatgccagacacaacagccgccagttttttattataatccttctgcaaattgaataaagtcgaaagatttttatcataatacaatcccgcatctttctctatctccaacttttcagcagcattagtcaagttataagaagaaagatctggagcttgaatttccacacttccgctgtacgaaattcgtagtgaagattcggtatttttctttgtctcgataacgatcaccccgttagccgccttagatccataaatagcttttgccgaagcatccttcaaaattgtcaatgactccacccgattcatatctaaatcggcaattttttgaacagaggcctcaaaaccgtccaaaataaacaaaggagcattcggatcatttgcataacttcccttcaaatcaatatcatccgatcctaaatcaaaagctgttttacctcgcaaagccatagtcggcatcttattggggtcagaaccaaattctaaattatcaaaaatcatcaatgacgggtccagatttttcaaacttgcaaacacgtttgaattacttacctttttcaaatcctctcctttcatggtcaaagccgaaccggtaaaacttcctgcttttcgttggaagataccatttacaacaacctcttccacttctgtcacgtcctcttccaaaacaatctgaagcggtttatcatccgtaacttttacctctttcgtcttcatccccacgaaagaaaattgcaaggtaatctccttattaccgggcaatgtcaactgaaactttccgtcagtgtccgtcacgactcccccggtagttccctttaccagcacggttactcccggaagtggcattttatctttgtccgttacctttccctcaatctttctccccttatcatcttccggagccgccttcacattatccttggcaattaccaagaaatcctctactagcttgcaatgcaagccgcttccctttaaagcctcgttcaaagcctccacggcattcacattccgtaaagtcacggtaacccgtttcaccgttttcaatagtgtattgttatacactaccacgtaaccggattgggcctcgaccgccttgattacctcttcgatcgcggcatccttaaacaggatactcaccttctgctgcgtgtaactattctcagcatgcagctgaaatagtgtcacaagaatcattaatagctgcaatcgcataactttccaaaatttgcataccactttcccacaccgggaagtgccatcttttgatttttttttcatagatttgtgtaccattaattattaattctctcttgccggagagatttagttaaatagaaaaggggaagagggccaattcttcctcttttattttttgtatatcataatcataccatcactctgtatatcaaattttaatgattgcgtactcgacaataattctaacataaaatcaatcggtttactccgtagagcagccccggagaaacacacctctcgcaaggattcatctgcaaacttgaaattcacgtcataccagcgccccaatttttgcacgatctcggataagggggtattgtagaaataaaatgtaccgtatcgccacgaagtgaaatattttaaatcgacagattctacggtcactttacccgaagctatatcataagaggcacactcgcccacgttaacggctgccaccccatgatcagttctcaaattgatcttaccactttccaacactgcccagcattgtccctctcctggataacaagatgcgttaaaagaagtccccataacctcgattgtcgcaccctccatgatcacgttaaaacaccttgcctcatcttttgtcacctcaaaataggcctctccacttaaacgaacctcccgactatgctcgccaaatgcaagcgggtattctaaacgggtttctgaattcaaccatacttttgttccgtcagataacactaacatatactcgccccccctcggaacctcaattcgattgtatgctaattcttttgattgaccgatgtcccccgttactccactataattcagtgcatttatatccttagataacgcaatttcctgcccagaatactcatccacgataaccgaatcaacaattcgattcaaatcaatcacttgaccatcggaaaggtaaagaattgccttaggtcctcccggtaggatctgtttaggctcagatacaggaagtacctcacccgcttgttgtttaaacgtaagaacataaaataacgtgccacctagcaataatggcaacagaagtaccgctgcatatttcagtattcgagaataccccaatgatctctgtcttgttcgtttcagaatattctctaaagcattttctttatgcaaggaatccatccccttcaaaaagtttcccatccccataattccttttatatcctcgtacatctgttcgttttcggaagcctcattacgccactcctgcaacttcatcagctcctccgatgaacactcgtttcgcaaggctctccatacaatttcttcccaattttcgttcatataaaatctaaataaatgatcctttaataataactcaaatttagctgtataaacagttattattcaacaatcctaatatctttttacactcataatcagtttattgtaaaaaagtcttttttctcacgtctctttctcaataaaggatcgtttaataatacaacggaaaaaatgaaaaatgggtgaaaagaattagcaagaaaatacaaaaaaagtaagaaacaattcgaaatcctccttgttcaaccccttgcgcaacaactttaaagctcttgccagctgggtcttaacggtattaacagagacttgcatttcctccgccacgtctttatattttttttcattaaaacaaatcgcaacgagcacttgctgacatttaacaggtaaatttttaacggcttccatcaacaaatcaatcttagaatcattttctgattccggagaaaaataatataccaactggtctgtcattacctccacatccacagtactcttcggtttctcccggactcgatccacacacatatttcgtgttatgcgatacaataaaggccgtgcattttccgtggtcaaacgatctctatacatttcccaaaaacgtacaaacgactcctgcactatgtcctccgcctcccaaaaatcctcggtaaactttacggcatacaaacataaagcctcgtaatttttatcgaaaaccatcgtgaaagtcttttccttatcctgttcaaccaaagccataactcaatacttttacacacattacttgtgtaaaagtataaaatgattttcaaaaaccaaataaattaatatccataggtgcaacacatatacaataacaacagcgaggaacattaccacctatattctctaatacagatcagttgtcgatatttaatatcaccttatcttactatcacctattttttatgttctttttaggaaatggaaacgcttcgaaagttttatcttgaattttggtcatctcaatcaatctcttttcgatcgacatccaatcatattctccattcaccatgacaatatcctcctcaaaatcaatatcatcaaagtaagtaatagctttaaaaggtcttatgacatttgagtttggaaatttacgttcatacattttcaacattgaactgaaagggaaacgagtagagaggaaagcaatatcgataaaatcctttaatcgtgatccattgtctgcaatagcagaaagcttcatggcaataacgtcttccatactatacaatcttataccggattcaatgtatggtttctcaagataatcataagaatgggtaatacaatctattttcacaccatctatcgtacccttcagagtattttttcccatgaaatctgtacgaaatccatactcctctttcaagaattgttccaattgaactgcatcaaatgattccggcgtgaaaagatctaaatccaaactcagtctatgccctaaatatagagataaagaggtacctcctgccaagttaaaaccgaccatcattctttctgcttccaactttttcaggagttcaagagtcgatctcgtaacagtttccgtgtataacatttcaattcttcttttttcaaattaaaaacaacacaaacgaaattcatatctcgtggagacaagctcggaacctcctttatgatttccctgaaaccttctattcccccgtataatttgaatgctgcataaaaatccttcagccatcctctttcaatgatacgttgaaccacaatctttcttgatttccaccagtcaaaacaagacaaatcatattcccaaagtaaagatggagaaattgaaacttcgcccgtatatgtcttatattcatcaaatatagtcatttatcattcatttttaatgatatacaaatttactacatttcgttgggacatacaatttttcaggtattttttatcagtctcgttcttcaggaaatcatcttttaagacaaaataatacttttcatatttacctaccttaccgaacagaccgtttcacaatccagatactcacctcatacaataaccacatcggaagcgacaccaacaacaaggtaaatacatctgatgtcggagttataatcgcagccacaacaaggataatcaccacagcatgacgtcgataacgcctcataaaatcggcagaaataaatcccaatttagcaaacaaccacgaaagaatcggaatctcgaaaacaattcccatcgcaagactcatcatcaacaaagtactgatatacgattgcaaagaaatcatattctcgacctggtcactcacctggtacgtcccaaggaaacggaacgttaaaggaaagattaaaaaataactgatcagcacccccaccatgaacatgatatatccataaccgacaaccctcacgacatacttacgttcattagcatataaagccggggaaacaaagcgaaacaactgatacaaaatatagggagaggcacacaaaactcccgtacacatggcaactttcatgtgaatcataaactgctgagccaaccccgtgttgatcaacttcacgtaaaaatcctgtgcctgctcgtcagtcacccacccgctaaaaaaatacaaccaccgataagtaataaaatcagcgtccttgggagcaagaataacagaaaacagcgcctccttgaaaaagaatgccaccaccgcgaacacggcagtcacggcagcaatctttaccaaggaagcccgtagtatatccagatggtcccaaaaactctgtttttcagactcgctcgcctgctccatattactcctttttcccttccgaagtatcgtctttctccaaaccgttcatcccctctttaaaagaacgaactcccttaccaagtcctttcatcaattcggggatcttcttgcctccaaacaataacaacacgaccagcacgatcaacaaaatttccggcattccaatgccaccgataaataatggaactatcatcttatttacgtattatatgattaataaacaaccaaccgccaacgatttgcaggaacatacccggtaaaccgatacgaaaatcctgtaccgctttataaaaatctccaaccatgatccattcccccagcgtaccgacaacttgataaaaaagtacgacggccacaagtaacaaaagagaagctttgcgaaaatacatggcggcatacccggcggcaatcgctaataataccgatttcaacaatacggcaggcaacaccgccacggcaggcattccaaagagagccgaattcaccaaaggcgaaacaatcgccgtcaacaatcccaccttccaaccatacttataggcacctaccaaagtaaaggaataaataggcaaccaacggatcccaccctgtggcacccaatggcacaactgcggtaacaaaatattacccgccacgaacaaagccactgccaagtacgtctttgcctgcttatactccaaagaataaagtcttaacgttgtcgttctcataactcaattatttatccaatttcaccagttcatacttctggcttccaattcctagtttctctccatactccaacgtatgcatcccgtgacgggaatcaatgcgctcgatcaaatgaattttcccgtgatcctccgatgcccgcactaaatccgtacatgccttatccaaggcgatgggatcaagcgaagccagaataccgatatcccccatttggggatcttccggcgaggcatcacaatcacaatctacggataaattattcgcaacactaaatataaagtattttatccccgcaatgatcggctaccgcttttgcggcctcggccattgattccagaaaatcatcctgaggaggtaaatttccccaaggatcccctttcgttttcccggcagaatgaatccaagccttaccccccgaggaagcaatcccgatagacatattcttaatcgcaccaccaaatcctcccatagcatgacctttaaaatgcgaaagaataatcgtgaaatcataatttagatagtgagaaccgacaaaatcctccttcaaatgttttcctcctttcacggggagagcaacctcaccgtcggcatccataatatccaccggggcaatagccgtaaacccatgctccttggctgctttcaaatggttttccgtatcggcacgtcccccgccataagccgtattacactccacgattgtcccgttaacctttttcaccaaatctttgatcaaagccggttgcaaaaaattatgtcctcccggttctcccgtggacaatttcacggccaccttccccgtggcctcacggcctaaagcctcgtaaatcttcacgagattctccgcggaaatcttcgtaaacatataaaccttcggcacttccatatttttttcggatgctttttcctgagcccggacacaatccgctcccataacagaggtcagcaaacaaaacaaaatcatatacacgttccttctcatatccataatattagttattcaattattaaaatctcacattcacccctgccatcaccgttgctttcggcatcgggaatcccgcattaatctcgtactttcgggctaaaagattttcccctctcacccaaatattcaaccactccgaagcacggaacgaacctctcaaattccacagcacaaaatcttccgtcgcgtaatcaccttgtcccgctactttcacctccgtgtaaagtccggcaacatactggcaacctgtcgacacgtaccaacgtcccttcgaaaaagcagctcccgcgtacaacttatgttcgggcgaagccagcacgggattatccatatgcaaatagctgtaattagcatctagcgaccatgctgacgccaaacgataagcaacctgtgcctctacccctgcgttctccactttccccgtattcacgttcatctgacgcccatccaccggtacacgcataatcaaatccttcccgtctatatagaaagcattcaccccgtatgacaaccgtccttgcagcaaccgctgagaataagacaactcgtaactccacaacttctccggattcaaatcggcattagccggacgaaacatatacaactcgcgaatcgtcgggtaacggaatcccttacttgccatcaacttgatctcgctatcccgcggcaagcggaaagaaagtcccacttgaggaatccactccgtacccacgtgagaatgattatcgacacgcatcccaatatcaaaagtaagccaatcactgatattttgtcgaaaatcgatatacccggccacgttatcctgcgtcttatccacttgcggttcacgctccccctccagcggttgattccacgattctccaccgaaatggaaatagtcaaaccccacagtcaaacgattaccttcaaaaagttgcgcactctggtaccacgacacccccaacatttggtcccgggactcgaaacggtaatccaatggttcctcgtcgagatgatacccgtcattaatccaatgttttccccaattataaaagaaactcactgtccccgaagtcttttcataattattttccaaagcgaaagaagtcattccccgggtaattcgctggtcattatcaagcaaaggatcaaacgtctctcccggatttgaagcattaaaacgggttacattcacatccgcccacacgttccaatggtccgcgatctcataccctagcttggcataaccgccatattgctcaaacgccatatccttccgatgcccgtcagtacggttatacgagccgctgagaatactcgtaaaacgccctttccgaatacggttgctcacctccgattgcaacgtgttataagaaccataccccacgttagcatgtgtacggacaccatcctctttcatcttccgggtaacgatattaatcacgccccccatggcattggaaccatacaacacggaagccggtccccgaagcacttccacccgttccgccagcatcgactggtaagcatctgatatcggatgccccatcaaccccatatactggggatgaccgtcaattaacaccagcactcccgtggttggcactcccggttgcggagcacccccaatcccgcgcaagctcattcctcccgcggcacctcctgacactccatatcccaacatcccgcgggaagtcgtgaaaaggccgggaatattctccgtcaaaagaggtaataaagaaggttcattactttgttcaatctgttcccggttcatcacggacaccgtcatgggtaaatgacgtacatccgtctcgttgcgtgttcctgtcacaacgacttcaccaagcgccacctttctctgtacagccaaactatcaagtacctcttcggcccgtagcgaggtcaattccaaaagaaacaataaaacaaatatcaatattttaatcatctactttttactcattatatttataaattcctcgatctgaaccaaacacgcttccggagtttccaaggaataacaccgagtctccaacggacaccatcccgtccgtgtacgatttataatatgcggcacctcttccgaataccccgtggctatcccggcccgctccaacagttcacgagccggaagactgatcacaagagcaaacacctctctcacgccccccaatgccagcaacgccgcagcagccttaccgatcaccttgtcggccatggatgcccccgcaagaaattccggttcctccttcaacaaacggtataaatcctttactccccgttcccggaatatccgaacctctccctgattataaataacgcaagaacattgttccgctagcaaacgctcttttaactgttgttggttcatatctctgttttcattttctaaaacgtccttccccgtttcaaatcttccacgtaacggtcaatacgccgtaactctttaggaatatcgatactttgcggacaatgaggcacgcattgattacacccgatacagtggctggcctgacgcaaccgtggtaccgaacgatcataccctacaagaaaagcccgccgggcctggcgataattctcatcccgcgaggaagttgatacattcccttcgttaatacacttgttataatgcaacaggatagccggaatatccaacccgtaaggacaaggcatacaatacttacaatcgttacaaggaattgtcgggtaacgaagcatcaactgtgccgtctcctccaaaaaatttttctcctcatctgtcaacaattcaagaggtgaatacgtacgtaaattatcctgcaaatgctccatataagtcatcccgctcaaaaccgtcagcacaccggggcaacttcccgcaaaccggaatgcccatgaagcgacactcgaccccatcttacgttgcttcaaccgcgtggctatatgatcgggtaccttcgaaagtcgtccacccaacaacggttccataataatagccggaatattccgtttctccaattctccataaagataatcggcattcacgtttctccccgaagcatgtttccaatccacgtaattcagctgaatctgcacaaaatcccaatgcacggattcatgcatggctaacacctcatcaaacacatccaccgtaccatggaatgaaaatcccaagttacggatacgccctgcctcccgctctttcatcaggaaatcgatcatcccgttttcaatgtaacgctgccggaaggtctcgataccaccgttacctatcgaatgcaacaaatagtaatcgatcgtgtctacctgcaaatcctcgaatgacttccggtacatggccatcgaattctcccgggtataattggaaaaattcgacaacttggtcgcaatcaggaatttctccctcggatgacgcttcaaggcaatccccgtggacttttccgaccatccctgcacgtacacgggtgacgtatcaaaatagttcaccccatgttcaatagcgtaatctatcaacctgttcacctcctcttgattaatcacattcccatttccgtcaggggcgggaagtgtcggccaacgcatacacccataccccaagatcgataccttttcccccgttttcgggttggtgcggtaagtcattttgtccgtcgggatctctccttgagccgcaagatcacccgtgacaggattgtttttcggggcacaaccggccaaagccaccgtggttgtcgccgcactaattcccacgattttcaagaaatcacggcgatttatctcttttttcttctcttgttcttccatgtactcgtaattttaaatcgttctgtgaagttcatgcccttccacgtaaatcgcactaaacggacgtgccggacaaagattctcgcaagccccgcaaccgatacaacgttccgtattcaccaccggaattttcaaagaattcgcattatcgggatcggaagcgaccatcgagatagcaccaaccggacaatgccgggcacaattaccacacgcaactccgtcacacaacggcacacaattcttctccacccatacggcatgaccgatctgcgtggcagatttatccgcaggcgtgatcttcaagattgccccagccggacacacctccgaacattttgtacattccggacgacaatatccccgttcataagacatctccggctgcatcaacgtcgacaacttcgtcgagggccgtaatacctgattgggacacactgaaacacaaagctgacacccggtgcaatgattctgcatattgcgtaatccttgggcccccggggggacaatcggagtcatccgctcgggtatttttttatccaaaatgacagccaaaccaccatccactttcttctcttgcgcttttactgctgacgaaacaaaaagaagtcccatccccgtcaaaaaactccggcgagcattatccgttttcttttcacccgaaacttccacagttttcttcaaacgggactcgtaacgaatagccccatgctgacacgtatcgatacaatccatacacgtcacgcaacgactataatcaatccgatgctctttatgattaatacaagccgccttgcacttgcgggaacataaactacaattcgtacatttctccgcatcaatcaccgggcggaacaaggaataccgggagaaaaatcccaacaccgtacccaccggacaaatcgtgttgcaatacgtccgcccgtttctccaagccaacacgaccagcacgataaacgtaaccgatgcaataataaaagtcggcaaactcttcaaccacaccgtcgtttcgtaaaaagcataactatcactcctttcggcaatataagccaacacgttatttccccattgatataccggggcaaaaagattcgaggctattcgcccgtaagaactataaggagccaacaacgctaccaccgagccgattccggcgatcacggcgatcacaaacacccccaagacgccataccgtaaccatgataccgcgggagagtaagaaaaacggtatttctttttagggcgtcgtccgctaaaccaagacactatatcctgaaacacgcccagcggacaaatcaccgagcaatatactcgtccgaacacgagcgtcaacacgacccacaaaagaatgaccccgacattcaaggccaacacggcaggcaagaactgtattttcgccaaccatccgaaccacgtatgcaatgttcccgtgaaatcaaggaacaataaggtgatcattacaaatgatacaagggctactgttaatctgatttttcgtagcataaatgttattttagtgatttaaacattacaaaaatatagaataattaccaacaatttgtatacaaattacagattaaacaaccaaaattacagatatagctattcccacacagatctaacccaaataaagaagtaatcctacccaaataatcctacttattcagagcttactcgttgcttagtcgttgctcatgcattacggcatgtgtaagctccgaatgagccacgagaaaggttcgaatatgtgggattatttccttaggttctccttaggaactctttaggttctctttatgaatcaatcaataagtcaccctcctactttctactatccaatatcttcgtcccgatatccatgtagcgatacacatcccgggtggtctcctggatacgttcctcgtcctttttatgccccaaccggacaagaatggcattcttttcaggaatagcgataatatattgtcccaacattccccggaaatagggattttgttgccctttatagttcatcatccaaatctggaaaccataataatccaaagaatccttaccccattcgtccttcagataccccgccggcctcatggcctcgttaatatattcttccgaaaccaactgtttcccgttccaattcccgtgatgcaacatcaaacgggcaaaacgggcaatttccctcgccgtggtgtgaaaacaacagaaagatttctcgtccccgtcctttttatccagcaaccaataggcgtcctgacaggcttgcatcgttttccataacttctcttcggcataatcactaatgctctttccagtcgctttctccacgacaaaagccaaaatctgcgtgtccccgctccggtatgagaattgtttccccggttcctcgatcacgtccaacgtagtcactaaatcataaagatcgttaccatagtagccatgtgtagttaccgaaaacagcgatgcgtaagcctcatcccaattcaacccaccactcatggttaacagattgcgaatcgtgatatttttcttttttccctcgttaaattccgggatatatttccccaccggatcatccagactggtaattttcccctcgtcataagcaatgccgaccaacaaccccacgatactcttggtcgatgaaaatatattggatgtcttcgtgtcattccaaccggaccgatattcctcgtacacgatactatcattttggatcaccagaaaagaaactgtacgaaaatcattcaagtaggcatcatcctccgggctcaactcataggtattataatccttggcaatcccccacgtccaacacgtatcagccttcctcaccgtatgcttgtcaaacatcgacaaatcatctatcgacgggtaccagtacaacaacgcctgccgtgcataataaggcagacagaaataagcaatccccagcaccaccacaaccgtcaaaagtatcttatatctttttttcattttcaattctcaattttcaattctcaattctcctgactttcgccaccatcttccgaattaccccttccccgatacaaggagcatgagcatcttccgggaaaaagatcacgaactcaccgggagataacgtgaacaccatttccaccgggtctcggtaaaaagtaaaatcacccgcgacatcatacggtgcctgttcttcgcccaataaactttgagctttccaaccatagctttccggcatactcaaaggcatttgaatatcgatatacttatcatgccgttcatacacggcttcctcggttttccgtcctttggcatcttcaattttgagataggcattatccccgtcaatgtcaattcgtcccacgggcatacttgacaaatcatgtgtttttatatagtcaaagaccactttaaaatacgggtttaacccctcaattcgttcgctattagccagtacgtctacaatcataattttatttcaatttttttatacaacaaagataacgaaaatacgttaacaacaagaaaaccaagcaagaacaacgcacattttcttctaaaaaatgtgtacactgcccggtttccatcatattctaggccaaacgttatattagaactacataaattttaatcactatgaaaaactcataccttacgatgatcgttttcacgatttttaccatcgctttttgcaccaatgcacgggcacaaaaacagaaccgcgtggaaagactatatcaacacatcgcctggtccgaaggagacaagtacgaccgattgagagaacggatggacaccaaaagcatggatgcctacaaaaatgaaatctctctggccgatgcccttaggcaactgttactgactcctcgtgttaatgccatcgagccgtacttgaaaagtagtatggccgtccagcaacaggacgggggcgcccgactacgctcattctgccaagcagcaaacctgaatgtcaaccttttccgtcacaaagcagactccacgatccttgctttgcttacctattcccaggaccaacttgaagattcccgtacagtacttgcacaaataaaggaatacgattacaatatggaccccgacgtttacgaggccatcgtccggctaaaggaaaaagtacagtatgcagacctgaaagcccaccctacacaggtaaaatgcaacacttatttcaaagacttccctaacgaatacaattatgtcgaggtggccaacatatataatgatctgctgtacaaagccattctcaacaaacaaaacgattcaaccattctctgctatttcaatgacaccacgctaaaaacattctacgtcaactccaaggaaccgcgtccctacctagctgaagtacaaaaactctatgacgactgcctgttcaaagcgatacaaacggccacttccccggatacacaaaaacattgtatccatgcttatatcgaatgtccctatctggcaggatgtaaccgcaaatacctgccacaagtggaatacacgaacgacagcatagacctgatcctccttgttttgcaagttgattctttcccacgcctcccgttgatcaagacttacctccaaacacataaatacaagccatttcgggataaagcccaacagttaaggaaacaatttatcgactcgatgacttacatatcccctaccatcacccgttgttactccggaattaacatcactcgggaaaccagaattcaccatgattcgctcacaatcaccacataccattactcccctcaagggcttttgacacggatcattcaaagcacacgactgcaaaaagattccacaactaccacaccgttaaacttgattgtcacgacattcaggtataatgacctcggtaaatgttacgaggaggaaaccattgattccctcgctaaagcaaccatatgcctgatcaattatcagtatgacacgacttcccatcccgtcatgaaaacgaccaagtggagtcacgggcaaaacactattgactattacaatcacagaggacaggtcaatcgaacccaagaataccggaacgggctgatttgcgcccaaacagactacacttatgacccacaagggcgtctctccggtaaaacatggataaacacccgaccggataccgaccatcccgccacgaaacaagtcacactttatatttacgactcattcggttacctcacaagcatttcctacgtgaaagagaatctgcaaaatgaaaaaataacaagtaatatgactctaacttacgatgaattcggcaacccgatcaatcctaattaccaatatacttacgaccaaaccggagcatggaccagtaaaacgagcaagacgaacccggcggacagcgagaaaatcacttatgtctacaagcaaaacaaaaaatagacccgcacattttcgtttaggctttcaattttcaattagttatcgtacctttgtgcccaattaatttttaaataaatggagcacagagcaggttttgtcaatatcttaggaaaccccaacgtggggaaatcaaccttgatgaatcgactagtcggggagaaattatcgattatcacgtccaaatcccaaaccacgcgtcaccggatcaaggggatcgtgaacggggaggactttcagatcgtgttttccgataccccgggtgtcgtgaaacccagttacaagatgcaggaatatatgcttgatttctcgaaaagcgccattatcgatgccgacatcatcctctacgtcaccgacgtggtggagaatatcgagaagaacgcggactttatcgagaaagtgaagcaaagcgaggtccccatccttctggtgttgaacaaaattgacttgaccactccggataaactggatgccttgttcgacaagtggaaagagatcatcccgcgagctgaaatattcccgatctcggctaccgagaatttcaacgtggacaatctatacaagagaattctggagttgttacccgtgggagaaccttatttcgacaaagaagaaatgaccgatatgccggcacgctttttcgtaaccgaaattatccgggaaaagattttattgaactacgataaagaaattccctattccgtcgaggttgtcgtggaggaattcaaggaagaagccaaacgcatcaacatcatggccgtgatcaacgtggaacgggattcccaaaaaggtatcatcatcggacatcaaggagccgcattgaaaaaagtcggcacggaagcccgtgttgacatcgaagccttcttcgggaaaaaagtattcctgaacctatacgttaaagtcctcaaagactggcggaacaaggaaaacgacctgaaacgcttcggttacaaacaactttaattttttagtttttatcttttaacttttatctttccaatgagtaatattgttgcaatagtaggacgtcccaacgtgggaaaatcaacacttttcaatcgtttggtcggtggccggaaagccatcgtaaacgaggaaagcggggtgacccgtgaccggaattacggaaaatcagagtggaacggcaaagaattctcggtgattgacaccggaggatacgtctccaacagttcggacatcttcgaggaggagatcaacaaacaggtattactcgccatggacgaggccgacgtgatcctgttcgtctgcgacgtggaactcggtattaccgatctggaccacagtttcgcccgtatgcttcggaaagtcaacaaacccatctacctcgtggcaaacaaggtagacaatggagaacgtctttacgatatacacgaattctataaactgggagtcggagaagaaatctttcccgtagcctctatcaacggttcgggaaccggtgatctgcttgacaaggtggtttcacacttcaccaccgacccgattgaaaacatggaagagcttcctaaaattgccatcgtaggacgtcccaacgtgggaaaatcctccaccattaacgcccttatcggggaagaacgtaatatcgtaaccgatattgccggaacaactcgtgacacgattacaacccgctacaatcgtttcggacacgactttctactagttgacactgccggattacgcaagaaagcgaaagtcagtgaagacgtggaattctattccgtgatgcgttccgtacgtgccatcgaagactgtgacgtgtgcatgctactgattgatgctacccggggaatggaatctcaggacttgaacatattccatctcatcgagcgtaaccagaaaggcgtggtagtcctcgtaaacaagtgggacctgattgagaaagataacaaaacgacgatcaattttgagaaagaactgcgggcaaaaatggcccccttcaacgacgtggaaatcattttcacctcggctctcacaaaacaacgtctgttgaaagcgcttgaatcagccatccagacctacgaaaaccgaaaacaaaaactgaaaacatccgaactgaaccgcatcatgctggaagagatcgaaaacttccctccccccagcttgaaaggaaaatatatccgcataaaatacgtgacacagttaccatcaaaaaccccaactttcgcattttattgcaacttaccgcaatacgtgaaagaaccttacaagcgtttcctggaaaacaaaatccgggaacactggaagttcacgggtgtaccgattcagattttcatgcgtaaaaaataaaaaaatgaaaaccatcctcgctgcaggatggtttttattttatcattatatttgttctattcaaaaaatcatattatggcaaaaaatacaatagaacatgatggaatcgtgacgcaggtggctgaaacctttattattgtgaccatacaaagccaaacagcttgtgcaggatgccacgccaaaggagcttgcggcatgtcggaaatggctctgaaaagtatcacgacggaaaaaccaaatgaagatgtgaaaatcggtgataaagtaatcgtcagtgccagtacccaaaatgccatgctttccgtcctactggcatacatcgttccttccatccttataatcgccgttctggctttgttaattcttgccgggaccagtgaagtcctagctgcaacgctgtctctaacgactacaacagtatattttattgttctttatttattaagaaacaagtttgccaaaaaaataaaattcaaggttaaaatagcataacctagaaaaaaaataataactttacgggcgttattacaaactagaggagacaaaacaaacacctttatgatgactactaccattatttacaccattatttctttgtgcgctattggaatcgcgtctgccgtgattctttattttgttgcacaaaaattcaaggtcgaggaagaccctagaattgataccgtggaaagcatactaccgggagctaattgcggaggatgtggcaaacccgggtgtaggggatttgcagaagccacggtaaaggcgacttcattggatggactgttttgtccggttggaggtgcggaaaccatgacgaaagttgccgttgctttgggtatggaagtaactgcacaaactccacaaatcgcggtggtaagatgcaacggcacgtgtgaccatcgtcaacgtaccagtcaatatgacggttacaaatcatgcgccatcgaacattccctttaccggggagaaaccgattgtacattcggttgcctcgggtgtggagattgcgtaacagcctgcccgttcgacgccattcacatggacgaaaacggtctcccggtcgtttccgaggagaaatgcgtggcatgtggagcttgcgtgaaggcctgcccgagaaatatcatcgaattgcggaacaaaggagtaaaagaccgacgagttttcgtttgttgcgtgaacaaagacaaagggaacattgcccgtaaagcctgtacagcagcttgcatcggatgtgggaaatgcgtgaaagagtgtccattcgaggccatcacgttagaaaacaacttggcatacattgacttccgcaagtgccgactttgccggaaatgtgtcagtgtttgtccgacacatgcgatccacgaggttaatttccctccccggaaaatcaccgaacctgcagaccagttgaaaactgcaacgaattaattgacgatttatgaatgacgattaacgatgaataaatctaaaatcaagaaatcataaatctaaaattaaaaagttcattagtttttcaatctaaaatttaaaatctaacacctaaaactaatacaccgtgctcaagacatttaaaattgggggagttcacccaccagaaaataaattatcagcacaaggggaaatcatcacgcttcccctccccgaacaagtaagtataccattatcacaacatatcggggctcccgccgttcccacggtgaaaaaaggagatcaagtaaaagtaggacaaatcatcggtcaagctgccggtttcatatcagcaaacatacacagttccgtatccggaaccgtcatgtcacttgatcccgtgatcgatgccagcgggtatccccgcccggctgttaccattaaggtggaaggtgacgaatgggacgaaaatatcctaaaagaacccatcaagaagcaacccggtacattcacgaaagaagaaatactagcagccatcagtgcagcaggaatcgtcggtatgggtggcgccaccttcccgacacaagtaaaactatccccccctcccggaagtaccgccgaagtactgatcataaacggtgtggaatgtgagccttacctcacggctgaccatcgtttaatgctggaacatgggaaggaattaatcatgggtatagaactcatcatgaaagccctcggcgtgaaacgcacgatcgtgggaatcgaaaataataaacgggacgccattgaagaacttggtaagcttgccagactggcggacggaatcgaaatctgcccgttaaaaatacaatacccgcaaggaggtgaaaaacaattaatacaagcgaccacgggaaaattcgtaccatcgggcggactacctattgctgtcggagccgtggttcaaaacgtgggaacggtatatgccgtgtacgaagctgttatgaaacacaaacccttgttcgaacgggtagtcacggttaccggaaaatcattaaaagaaccgggtaactacctttgccgcatcggaaccccgatctcacaactgatcgaggccgccgggggattacctgaagacacgggtaaagtgatcggaggaggtcccatgatggggaaagccctaaccaacacaagcattcccgttacaaaaggcacgagcggcatcctactgatgcgtcaagaggaatctacccgcaaagaatatcgcaactgtatccgttgctcgaaatgcgttaacgtatgccccatgggattggaaccctattatttgatggtgcttggtgaacacaacaatctggagatgctggaatcggaaaagatcatggattgtattgaatgcggttcatgtagttttacctgtcccgcaaatcgtccgttgcttgatgtgatccgtctggcaaaagccagaaccggtcaaatgattcggtcgagaaagaaataaaaaattaatttagaatgaaaattcgtaagatctaaaatattttatatgagtaatttcaccatatccccctccccccacgttcacggcggggattcgatagaaaaaaacatgtacggcgtacttatcgcgttagtacctacgtttatcttttctatcgtatttttcgggttaggcgccattctggtaaccctcacctcggtagctgcctgccttgtattcgaatacgttattcaaaaatacctcatgaagcaacgccccacaatatgggacggatcagccatcatcacgggagtattgctggcatttaaccttccatcctcccttcccttgtggatcgtggtgatcggggcgttggttgccatcggtatcggtaagatgagtttcggaggattaggaaacaatattttcaacccggctctcgtaggtcgtgttttcctattgatctctttcccggtacaaatgaccacttggcccgtaccgaacgggttcgccacggctgatgccgtaaccggagctacccctctggcactcgtgaaagaagccgtcaagaacggacaagccgtcggtgacacactatcttcagttggaatcactaccggcaacctgattctcggtaacatcgggggaagtttaggagaagtagccgctatcggacttttactaggatttgcttatatgttaatccggaagatcatcagctggcacatcccggtagctatctttgccacggttatcgtattctccggaatactgaatctagccgatcccgcacaatttgccggcccggttttccatctctttacaggaggtttgatgttaggagcgatctttatggcaacggattacgtaacctcacccatgacacataaaggaatgcttatttacggtgtcggtatcggactattgaccgtgatcatccgtgtattcggggcttacccggaaggaatgtctttcgccatcctgatcatgaacggattcacaccgctgataaatagatattgtaaaccccgacgattttaaatttactaattgtagattgtaaattgcttacaaatggaatttaaaatttaaaatctaaaatttaaaatctaaactgatgggaaagaaattagaatcaagcttcaaaaatatggtactggtgttattcttggtaacactggtttcttctgccgccgtgggagttgtgaactcactcacgtccgggttgattgaaaaagtaaaaattgaaaaacaggtacaagccattcgtgccgtggttcccgcttttgataatgacccgatgacggaaaaacagatcgtgaaagtagatggaggtgaattagaattctatccggccaaagcaaacgggcaactcgtggggacggccattaaaacattcacgaataacgggttcggcgggcttattgaacttatggtaggattcaccccggacgggagcatatataactactccgtgctaagccacaaagaaaccccgggattaggttccaaaatggacacatggttcgtgaaaggtgccaaaggggatattaccggaaaaaccccgggtacgcaaggacttcaggtttcaaaggacggcggaaacgtggatgccatcacggccgcaacgatttcatcacgagccttcctagatgcagtaaaccgggcagcaaaggcattgactgaatccgcaaaataacacgtaaaatcaatgaaagaataaagatatgaacaactggcaaacttttaccaaagggttcttcaaggaaaatccgaccttcgtactcctgctcgggatgtgtcccacgctgggagtgaccacctccgccattaacggcttggggatgggattagccacggctttcgttctggtactatccaacttggccatctcgctcgtggcaaacctgattcccgacaaaatccggattcccggttttatcgtgatcattgctgcattcgttactgtggtcgatatgtgtatggcagcttacctgccgagcttgcacgaatcgttgggattattcattccgttgatcgtggtgaactgtatcgtgttgggacgagctgaatcattcgcatccaagaacaaagcccttccttccatgctggacggtttgggcatcggtctcggtttcaccatggctttaacaatattaggagcaatccgtgaaattctgggtagtggaaagttcttcaacatgactctctacaatgaaaactacggaatgctcgttttcgtcttggccccaggagcgtttatcgccctaggttacctgatcgcttttatcaacagaataagaaaaaccaactaattgtaaattttagattgtaaattgtaaattgaaaaagcaatctaaaatctaaaatctaaaatctaaaattagaaacatggaatacgtttttatatttatagccgcagtatttgtcaacaatatcgtgttggcacaattcttgggaatctgcccgttcctaggggtttccaagagcgtacccacggcactcggtatgacaggagccgttacgttcgtgatgattctggcaaccctggtaacgtttatcgtacagaaaaccgtacttgacccgttcggcatcggattcatgcaaaccatcgtgtttatcctaatcattgccgccctcgttcagatggtagaaatcattctgaaaaaggtaagtccgtcgctttatcaagcattgggagttttcctacccttgatcacgacgaactgtgccgtgcttggtgtggccatcatggtgattcaaaaagattataacttactggaatccgttgtttttgcagcctcaaccgccttaggtttcggattagccttaaccatctttgccggaatccgggaacaactggaactatcctccattcctcaaggaatgaaaggaacccctatcgcactggttacagccggattactggccatggcatttatgggattctcggggatcgtataataagtcgaaggtttataaaccttcgactcacttccccatcaagctaacaaactcgtcatacacgcatcccgtgaaatcggaaagcacccgatcgactttgtcctgtatcttctccctcggattcgtggttgccaaaccgacaaccttcatccccgcacgctgtccggcctctatcccggaaaaagaatcttcgaagacacaacaatcatccggttctatctgtaactctcgtgctgccaacaaatagcactccggatccggtttagaccgggtaatcttatctgccgtgatcatacattcaaataactcggcaaactccgggtgaaccctcaaaacgtaagccattttcttattatttgaactggtaaccaaggccgttctcaccccatgtttctgtaacgtcctgataaattgttccaccccggggaagtaaggaaaattcatccaacgctcgaattcgtcaagttcccgtgaaacctgttgttgtaaagcgacatcaccttcgaaataattcttcaaaatcagttcagtcgtctgccctttaattactttatgaaattccggcatatccggatggtaacgtttcccctgttcccgccagaaattatcgtactgcccctccgtgtcaagcaccaccccatccatatcgaataatgccgcaaatcgtctcactctatccataatctttcatctcaataatacataggtcacaaaaatatcgaaaaaagggtaatccggacaaatccgaaacaatttatttggtctgtacaagataacttgataattttgcacacaaaataaataatatgcagttaactcatcctatttttaaaatattatccggaatcgcggcagaaaaggggttggaaatttacgttatcgggggatacgtgcgcgacctgatattacgacgcccctccaaggacattgatattgtcgtgttggggagcggaatagaattggctgagacagctgccaagcaactcggtgatttaacggtttccgtgttcaaaaacttcggaactgccatgttccgctataaaggagttgagattgaattcgtgggagcccgcaaggaatcctatcatctggactctcgtaaacccattgttgaagaaggaaccatcgatgacgatcagaaacggcgtgatttcacgatcaacgctttggccatatccttgaaccaagagaactacgggacactggttgacccgttcgggggacttcaggatttagaggatggaatattaaaaactcccctcgatccgattatcacgttttcggatgatcccttgcgtatgatgcgggccgtccgttttgcctcacaattgaatttcacgatcgaacccgtgacatttgaaagtatcatcgcaaatcgggatcgattgaaaatcgtctccaaagagcgcatcatggacgagttcaacaagatcatggcctcaccgaaaccttccgtgggattaaaattactggaacaatccggcctgttgagagtattcttcccggaactatccgctttaaaaggcgtggaacacgtggatggcatcggacacaaagataacttttaccacacgctgactgtcgtggattcggtaagtcgtgtttccgataacctgtggttacgctgggcagccttactgcatgatatagccaaaccggtcaccaagaaattcattccgggacaagggtggactttctacgggcataaccacgtgggcgaacgtatggtcgggagattattcaaccgcttgaaacttccccaaaacgagaagatgaaatacgtacaaaagctggtaggcctgcatatgcgcccgatcgttctctcggaagacattgtaacggattcagccgtacgccgcctgcttttcgatgcgggggacgatatcgacgatctgatgactcttgccgaggcggacatcacttctaaaaatgaagagaaagtgcgtcgatttctggcaaacttccagatcgtgcgccaaaaactgaaagaagtcgaagaaaaggatgccatccggaattttcaacctcctgtcagcggggaagagattatggaaacattccaactccccccctgtaaggcaatcggggatattaaaaatgccatcaaagaggcaattcttgatggcattatcggcaataatcctaccgaagcccgggaatacatgttccaagtagcgacagaactagggattcagaaagaaggtgaatagggatcagaaatgatccttacgtttcttcacttcatccacgagtttcgtgaaagatttctcttttttccgtttctcatgttcggaggcagagaaatgccacgtttcccgtcgaagtttcaaataactctcgtaaacctgacgatctagtatgccacgactcaccgcatccaacacggcacaacccggttcattgatatgctcgcaatccttgaaacgacacgattgcgcatagtcggcaatctccagtatctcatcaagcgcaccgggatcatcaaccgcaagaccgaattcccgaaccccgggagtatcaatcaagacaccgcctccatccatcaacaccatctcccgacgggtcgaagtatggcgcccctttcccgtggattgacttattccgaacgtgagtaacacggatttctcgcaaagtgcattcaccagagaacttttcccgacacccgaagaaccgacaaacacgaccgtctccccctccgcaataaattcccttaaacgaaaaatcgtccgagactcgtgaatactcgtgtaaaacaccggaatctgccggataacgtgccgtatttgctcttccactttttgttgatcaaaacccaagtcggctttattaagtaccagtacagaagtaatattttcttcccgcatctgaaccataaagcgctcggcacgacggacattgaaattatcatccagactttgcacaataaaggctttgtcaacatgagccgctatggcttgtttttcggcaaccgttccgattttcctacgacacaaagtacgtgaccgaggcaacatatccacgataatccccatcccctcatcaaacggctgaaagattacccaatccccagtacagggtaattcgaaatccgacttcccgtacatcatgtttcctgtcaactcgcaccggaacactccgctcccggcaaccacctcgtaacacgtccggtgtacaatagtgacacgcccatgcgtgagagttccatacgtcgattcctgtttcagttggtttaacttatcattccaaccataataatttaaatctatcattacttcatttttttagcgatataaaatacataaccgtaaaactccttgtacttacggtatagttcagcctcgtgatgctgaaaacttattagttcctcgactgttttattcccgtcatatttccggctgaatatctcccgagctttaactaacggggtaaaatagttctccgtccagcaatactccggcaggataaaagtcgccacggggatataccccgctttctgaatctgggcgactttattaggtatcgtgtcgatctccgcataaacggacatccaaaaatcatggatctctgccggacgttcttcggtaaaccacgaactctcggaaacagcaacatatcctcccgtcttcagatatttgcgccactcgttcaatcctcgttcaaaaccgatattataaatagcaccttccgaccagatcaagtctaattcttcctcctcgaaaggcaacgcatccattgaaccgacaatgcctttcacccgttcctggagattcaacaccctagcattatgattaaaacgctccacgaatcccagaaaaaagtcgagtcctgtaatctgccccggagtgtgccgtgccagcgtcatcgtctgtcctcccgtcccgcatcccaagtctgcaatccgggaatgatccgtaagatggtctataaagcttaacgctttaagcgttacttcgggacttccgggtccctgccgttctgtattcaagaagaattcgcaaattaaattaacgtctattccaagaatggtattattttcgttactcatgattgatcaatataaagcatacacgtaaaagcataattttacttttctcgttgtacacggattaaaaattcaaattataataatagagaaattacccccggaaagagctttccgaaagcaagcgaagggacaacctgtatcagaaatacagattgtttattacaccaaatccgattgtaatctagtttttaacatgatgtaaagatacacatattttattcatttgaaaataattgtcgctatttccgtataagttggtcatcccctcgtcatacgtacactgtcgcacaagcatatctctccaataaataaatatactacacgaccaagccatccggcaaatataatcgtatcaaaaatcaattttatcgaacaagaatgcaagaggaatgcaggatgaatgctccgtggtctaaatgaactatcaggaaactattaagaaaaagtaaaatgaggatagcctaacacgaaggtagtcccagtgcaattttaatgatacggcctagcagaaacgcattcgatattttgtaaatattccaatttagtttatatttgcaacgaacaaataaaaagattcacgttcatatcggcaaaataataacacgtggcaacaataacacctttaaattctagttccatctatgacgaaaaagtcattcgggaacttttcgaacagcactacacgcccttggtgttattcgcaaaaggctatattcccgacttggacacggacaaagatgttgtgcaggaagtatttctctcgttaatcgaatcccaagaaacattcaatgacgtggataatctaaaagcctatctatacggtacggtcaagcacaaatgcctgaaatatctccgccacgaagaggtaaaaagacgctaccagaaatacatgcaaagcgaggttccggatgaaaccaaaacttacgaagaacgtgttcttgaagaagaggtttacgctctcttgataaaagccattcagaacttaccggaacaatgccaaaaagtgtacttgcttgttttagaaggcaaaagcaatcaagagattgcctatcaactccaactaaacatcgaaaccgtcaaatcccacaagcaggtcggaaaaaagttgctttacgatcaactgaaacacattattcccgtcgggattctcattttcttactggaattttagacagcctcatcccattatttgtgtttgcccgtttacaatttattctctacctttgttactaaatacataaagaccatgaataccagcataaccagaaagctacccatcggaatccagaccttcgaaaaaatacgacaaggagaatttctgtacgtggacaaaacggctctagtgtggaacattgcaatgaaaagtgttccttgtttccttagccgcccgcgtcgctttgggaagagtttattactctcaactttcgaatcctatttcaatggacgcaaggatttatttaaagggttggctatcgagcaactggaacatgactggacaatttatcccgtactgcatcttgatctgaatgcggagagatacgatgccccggaacaattacacgccatattgagtaattatctcacacaatgggaaaccatatacggggaagggaaagacgaaattacactctccagacgttttgccggagtcattcagcgagcgtatgaacaaacaggacgtggggttgtagtgttggtggacgaatacgataaaccactgttgcaagccattaataacccggaactaacggaaaactatcggcagacgctgaaggccttctacggtgtactgaaaagtgccgaccgatacctgcggttcgtgtttttgacgggtgttaccaagttctcacaagtcagcgtgttcagcgacttgaaccaactaaacgacatcagtatggatttttcctacgcaacgttgtgtgggattactccgaatgaattaaccgctgtttttgaaccggaaatccatcaaatggcacaaagaaaccaatcaacagaggaagaaattgtgaacgaaatgatccggcaatatgatggttatcatttccacccggatggcgagggtgtgttaaacccttttagcgtgctaaacgctttcgacaaactggaattcggtaactactggtttcaaacgggtaccccgacattcctcgtggaactactgaaaaagagtgattatgacctacgcttattaattgacggaatcgaagcacctgcatcttctttcacggaataccggatgaataccgataatcctatcccgttgatttatcaaagcggctacttgacgattaaagaatacgataaagaatttaggaactacatgctagggttcccaaacgaagaagtgaaatacggtttccttggttttttattgcccttctacaccactctacccggtgaagaacgcggcttttacataggaaaatttgtacaagaactccgacaaggtaatatcgatgctttcatgacccggttacgagccttctttgccgatttcccctatgagttaaatgcccagacagaacgacattatcaagtcgtgttctatctcgttttcaaactcatgggacagtttgtagatgcagaagtacgtagtgccaccggacgggctgatgccgtggttaaaactcccaaatacatctacgtatttgaattcaaactagatggcagcacagaacaagccctgcaacaaatcgatgatcggggctatttgattccgtacacggcagacagccgacaactcgtgaaagtcggagttaatttcaatgccgaaaaaagaaatatcggggaatggaagattaaaaacgaataacacactcatctttacaagaaaactaccatcactataatcacaatattgcaatattttcaaaaataattcatttttgactcactcttttttatgctcaaggggacttactatcaaatgagcgaaaagatgagtcaaaaagagaaaaatatatttcaactagcccgcatcatcgcagcgtctcttaaagggaatgcaaatgatgaagaacaacgcaccttaagggaatggttatccgtttctacaagaaacaaaaagatttatgacgagttcaaagacggaaagcgtctagaacaaaaaatagtcgaatcccaacaaatcaactggaaaaacgattatcaacatttcatcaccaaacggcaacgcacccgcaagaacagaaggatgaaaacgatcattcgttacgcggcaatactcactctcccgatcgtggcggcaggtattttcctactccaaaagaatgatcggcaaactattgtctctatttcagaagtcatcaagccgggagagcataaggcagtattaatcacgggtggaggcgagcgaatcacgttatcggatagcacgttatccccgatacaggaacaaaacgggatgatcgtgaacgtcactaacaacaaggtctcctatatcctacccgaagatagtttatgtacgcaaggaagcccgatattcaacaccttacaaattcctcgtggcggagaatatttccttacccttgctgacggcacagaagtatggttaaatgccgaaacggaaattcgctacccagtacaattcacgggtgacaaacgagtcgtttaccttgatggggaggcctatttcactgtagccccagacaagaacaagcccttcacggttgtctccactcatgccagcgtatccgtgctgggaacacaattcaacttccgggcttatcccgacgagcgggacgtgcagacaacgcttgtttccggttccgtaatcatgcaatcggaaaaatacaaacaacaaatcaaactggttcccggtgaacagggagtgctggaaaagaattccgccaaactcatgaaacaagaagtgaacacgtacctctacacagcatggaaagacgggcgtttcgctttccgtgatgcacggctggaagacttgttcaacatcctcgcccgctggtatgatctcagtgtcttctaccagtccccggaagccaaagacatccggttcacgggagacctgaacaaaacggatgatttcaaatccattctaaaaataatcgaacaaaatgaacgagtaatatttacagtaaatcaacgcacagtttttattcaagcaaaataaaaaaggcatctgacgctcgcaacatcaaatgcccaaactattttctagttctcattaaaaacatcacaaatgtatgaaaaaaatggacaaaaacagccattcctcgggtggattatggcaaaaacaagtaagagttatgaagttatgctttatcttgacatttatcggcatcatgcacctttcagcagccacctattcacaagatacacggctagatttaaaggttaagaatgcttccctcgaaagtgtgatgaacaacatccgcgcacaatcggagtacagcttttttttcgatgatgtagccgtgaaaaagatctcgaatattacgctgaatctgcaaggagccacgattgaagaagtgttgacgacttgtttgaaaaacacgggattctcgttccgggtactggacaaaacaattattcttttccgggaacaagtgaaagacgataaaaaacaatcgttcatcattcaaggaaaagtcgtggatgaaaacaataaaccgatgcctggggtaacagtacttttggatagcacaaaagttggaacggccacggatacagccggacatttcgttcttccattaccacaagcaaaaggtaccctcgtattttcatttattggctataagccccagaaagtaaaatacacggatggtaaattggtgatcgtaaagatgcaacccgatgtatccggtttagacgaagttaaagttgttgcctacggtacacaaaaagcccgcaaggtaatcagttccatttcctctcttaaagccgacgagatgaaagaactcccgacacacagtctggaaagcctgttgcaagggcacatggcgggtgtagaagttaataatctttccggagcacccggtggcggtggttctatcgtggctatccggggatacaactcgttcttcacgaaagggaatgtcggctcaggtgacgagggcgaagaccgacaatacggaaccccactttacgttatagacggagtaccgatgcaagcttttacctctcctatcaccggttcaaacacactttctgaccttgacccttctatgatcgaatctatcgaggtcttgaaagatgccgcctctgcagcaatctacggatctcgtgccggaaacggagtaatcttgatcaccacgaaaaagggacgaagtggtaaagcccgattcactgccaacgtgtcatactccgcttcttggctaccgaaaacacccacgtgtagcggcggacaattggtacgtcaatacaatatgcaggcactacgtaacgcaatacaaccatacaaagatgcaaatgggaaatgggttatgccgaattcctacgaagacgtgtacaattacaccaaagatggaaattatcctgtttacaattatttcttcggtaaccgggaaagaggagaaaatgcctatattttacaagatagtttaaatgaattttacaacaattccacggactggtggaagtacacgtatcgcacggcaaacgtatataacgccaacttacaagcaagtggtggaagcgaaacgatgaactacatgatcggagccggctactataaagaagaaggtatcgcattaggtagtgatttcgaacgtatcaacgtcctcacgaatctctcggcgactccaaccaaacgcctcaaaatagacaaccagatatccctttcttatagtgaccgtagccgcggagggaaaggtaaaacaggcaacaaaattgaaggtatcacggtaagtccaacgaaagtatcctctctgttaccaggtaatgaatacgtgaaaaaatacttactggaagagttaaactctagtatcgagaaaaatcaaagttattctttacgctataacctttccttaaattatgagatcattcgtaacctcagactacaagtatccggttcggtcgattacaaccaacagaaccagaataactttttcccaagcacgacagatgctaattttcaccgttcattcacgaaaggtacaatcacgagaaacatctcgcttttgaatgaaaatttattaacttataatttcaaaataaaacaagaccatcactttgatttgttattcgggttatcattccaaaaagagcaaaactacttgaacgaaggagatgccacagatggacccaacgactatgtacattacgccacgggcctatggggtaacggcagtggactgataaacatgaataacgaatcagataaagacaacaatcctgtttggcaatccgcattcaattacaaatccagcttggaagaacaacgtatgaatagttatttcggtcgattgcggtatgactacagggaaaaatacctactggaaacaactatccggcgagacggatcatccgtattcggagaagactgtcgctgggccacattcccgtccgtcgccgtgggatggatattcacagaagagtcattcgtgaaatctctctactggttaagttttggaaaaattcgagttagctggggacaatcgggacaaaaattttcccaaccttacttggcgcacggcctaatgagtggttccggtacctctatcttaggtaaccaaggtatggaaccagactctaaaggaggagtattaaaccgaagtttaagctgggaaaaaacagatcaatatgatatcggagtagacttaaatttcttagactatcgttttaaattgacttgcgattattattatcgttacacgaaaggacaattacaacagatagatattccgggtaattggaattatttgagattccaatggcaaaatgctttagctgtttcaaacgaaggtttagaagtagaactaaccgctgatatattcagggaaaccgccgtaaaatggcgggtaaaattcaacgtctcccgtaactggaatagatttgaaaaaagtaataatggtcgagactttttgggaaatgtgatcgggaaatccctatacaacatcaaggcctacaaaaccatgggttactacaattccatagacgaagttccttactacgtgcaatctcacggactccccataccgcttcgtacgaaagaggaaaatgctgtattttttgcaggcacaagaaaaatcgctgacttgaataatgatggacgaattaattccagtgatcaatactatgcagccagtccccttcccttggctcacggtggatttatcaatgaaattaaatggaaacaattcgacttgaatatatttttcacttattctttaggaagacatattttgaagatttatgacgatatcgccattaaacctaatataaccggagatccgatcacgcttgatattcgcaaagcaagcacatggaccggcccagacagtcaaaactcggactatcctcgtgccatcttttacaaaaatcttggagaacaatacacgggccgatatgattgtgacatcgaaaaaataaatatgattcgcttaaaacaacttactttggggtataacttgcatgaaagaatcgcccaaaaactaggactttccggagctcgtttatttatcacaggagagaatttatttatgttgacaaactattcaggccttgatccagaaatcgtgaatctcacatcaggactcgactatttgtccgggtatcctcttccccggaaactcaccattggtctaaccgttaatttttaatgactatgaagaagatattcatttttatcttattttttcccctgttctcatgtaatgactggattgacgtgaattcggaagaatccgttactttcaggaattattttaatagcgaacaagacgtggaagacattttcacgaccatattgggatgcgagaaagcagtaattgctcctacaatgatgggattttttgactggagcgcactccattgtagtaatgcaggaacattcggagaagcatatcgcaaattagaacccgctgctatttgggatatggataaacgcacaagttggaatactcattacaaggccatctacctaactaatttcctacatgaaaatcaattccgtttcaagaatatttcacaagaacgtatcgatttttggttagcacaggcagatttcgtaaaagcattaatgtacttccgtctggcacaagactggggagaagcagtggttgcacccagtacggaagatgcctcacaacaagctaaaagtccgatcaacacgattcttaccgaagcgattcaggctgcagaagccgcactgatcctacctacttttgacaaattgacgaatgcacagggaaacaacatcaatagcaggcaatacgctagtttgggaaccgtacataccttactcgcaaacatctacgcatggatggggggactttatgacaaagaggaatattggaaaaaagcagaagcgtcagcctccctcgtgattgaagggaaagtcggtttctatgatctcgtgagtatgaaagacctcgtggaaaaaacatttggaaaatcccgagacctgacagaagtaatttttagtatcgagaaaaacgagcaggatgacaactggtatgccacgagtagtcttgaaatgtactacccgggattcgctttgattaattacccgtatagcgaaaccgatccccgtaaagtagataaagatgacatccctcgcattttgctagattcagtgtatgctttatatcctgataaaacagatttgcgacgtaaagagtattggtggaatctcggacaggcaattacgattgaaggagcctctgctccttacacccccaaccatgccttcattaataaatggcgagataaagtttactcggtgaacccagaaataacagaaggttctaaatcaaaactaatcgccatggaagggaattgtatatactggcgtctggcagatcttattcttctacgggcagaatgccgtgctcatttgggaatgccagaagctgcgtctgacttgaaccggattagagaacgtgccggtttggacacctacagaggtttcacagataaaaagaatttactacgagaaattttccgagaacgggaacgagaacttttcggagaaggacatcgctactatgacatcgtgagaaataagtatttccgggatatactaataggaaactacaaaaccctgacagacgacgaggtgaaaaaaggagcactttatctcccggtaagcagcgacgcatttttaaacaatccattaatgactcagaatatttactggttatggcatcaaaattaacaaacttattttatggagccttggtattgatcatgatcaatatctgctcttgtaccgactataattatattgacgggggaacagcaaacggtattcacaactgtaccatgtgggaatatttcgaaaaccaaacttatgattgggattccacaatgatcatgattgaacacgccggattaaaatcactctttgacggtagcggggaacacaaacaaatcacatttttcgggataacagacctttgtatcgtaagatatctactcgatcataataaagccatggatgatgctaaagaacaaggaggagatattaaagatagcgattattggtatcaagtgacagatattcctccagcaatttgcgctgcatttttgaacagattagttatccctgaaaggattatgttgaaagatataccggaagggaaacgcttaaaagatcccgaaggattaacttataaagaaacggagggtaaagtattcgcttctcttttcatgcaagaagaacttttcacctgggtattcagtgaagcttatgccggtataagcaagaaaggcgagaaacaattatggattgcacgccgtctgtcaacagctgataactggagaatcgcttcctcggacatacaaactaccaacggcgtagttcaagccttaggatatgacttcaaaatgatcaatttttaatacaaagccatgataagaaatacaatatatttaattgccacaagtatcacttggctgttgttagcttgtcaggatatcacaatcggctacttggaatcagatgcggccaaatacacgatcgacacgctacacattgttgcaaacgccaaaagcgagttacaaaggttgaaagtcattgagatagatttttactcagccacatcaacactgcaagataaaatagccggattagaagaagaactggatgaattgcaggataaattagacggaagtgatgaatattgggatgcctacgacgagctaggaggtactgatatagaggagcaattttggaacgatgaaattagtttcgaagaatacacacgactcattgaccaaataaacaaagaactcgatgataagttcggaatcacagcactcaaagagagtttgaatgaggctaaaacaacattggaaaatctcgcaacggaaatgggtataggttcgctggaaattctaaaaaaacaaatcgcagaataccaacaaaaaatagactataaactcccgtggacctctgctaaaatagaaggagttcaaggtacacaacctttacttttcacggttatcgggataaaaagtacaaacacgagtgaagccgaaaagtttatgaaccatgtcggtgtactgggtgacggaacgatttacgtggagttggacgtgaatgtcattcccggaaattacacggtatcattacagatagagaatgaaggaagaactaaaatactgaatgatatgttcactttcgtagtggatgcacccattcaagaaacactcacagaagaataacaataaattttactttagggagctgtaaaaatagctcccttataaaaagaactatgaaaaagatattttacatgattgtgttcctaatgctaggaacattgggaaacttatcagctcaaataaccttatttaaaggtacatttgatgaggctctaaaaaaagcacaacaagagaaaaaggatttgttcgtggactttttcgcagaatggtgtggaccgtgcaaaatgatggcaagcgaagtattcacgcaaaaagaagtcggagaatttttcaacaatcgtttcatatgcgtacaagtagacgtggatacacaagaaaacaaagacatcgcaaaaagatacaacgtaacagcgttaccgactatggtgtttatcagtcgggtaggtaaagaattgcgccgagtacagggaagcgttcctgcagaatcgcttattaaagaggcaaaaattgccacgggagaagaattgagtttcgagcaattgtacgaaaaatacaaaaagaagaaaaatgacctcgatgtacaacaacaattgttgatcgaagcccccgcatttatagctacacaacagggatacaatcaacagaaatggggaacccgtattgaaagtcttttcccagaatacctaaaaaacaaaaaaatcgagaacatggcaaacgaagcggactttctagtgctaacgatgtatcaccgtgcggcttcaaaagaagaccctatctttgattacctggcacagaactatcaaaaatttgccaaagaaatcgggaaagacaacgtggctcgctacttggtttctttgaataacacatacattatccaactctgtaaaaaaggagacttaaattacaaaaaacggctggaacgggtaaacggggatttaaaagatgtttactcggaattttctttcgggaatctttcggttcagaatgccctcacgttacttgccgatgccacgtacagcctgcatcgccatgacgagaacaccttcttcaagaaaatggatgcctattttgccgggaaaggcgacaaaacggaattgaacgactatttccaacccttacaagacatcgctgtcgtgtacgagggtaaattgtcggaaaacgcttaccggagatgcatcaactggatcgccaaagccttgacattcgataacgtgggagcgtcaaatcgtacccgcttgttgatgatgatgggggactgcttgaaaaacacaggcgataacgccaaagcaaaacaatcctataaccaagcattcctagcgagcgcacaaatcgagaacaaaatggagatgcaacaactccaacaaggtatccaacaatcgttacaaggcttatgaaaaaaatactactccttatatgcattatcggattgtttaccccggcaacactacacgcacaagatcgtgcaaacgtgttccgccacggaaaactagacaacgggttgacttactacgtgcgccacacctctatgcaaccggggaaagcagacttttatctggtacaaaacgtaggagcactcatggaagaggacaaccagaacgggcttgcccatttcctggagcatatggctttcaacgggagcgagagtttcaaagaaggaatccccaattttctgaaacggcggggagtgacacgctttaatgcgcaaacgggacaggacgaaacggtgtactacatgacggcaatccccacaaacgacacaaagttactggattcctgcctcctcgtgatgaaggactggtcgggtttcttattgctcaagccagacgagattgataaagagcggggggttatccgggaagaacgccggatgcgccgcaatctaggtgctcgcctaaaagaacaatcagatcctcttgtctttaataacagcaagtacgtcactcgtaacgtcatcggtagcgaaaagatcataaacaactttacacccgaagaattacgggcttattacaacgatttctaccgcccggatttgcaagccgtaatcgtagttggagacattgatgctgccaaaatagaaaccgaaatacaacatcttttcaatcccatcccgaaacgaaagaaccccaaaccccgattggtatacgagatcccggacaatagcgaaccgttctacacaaaagtattcgacaaggaaatgacagaatcttctatcacgctgctcaaacgggtacgccagacaccgcctgcctcgctaaaagagatgatgaaagaaaatttgattaacttgttctacaaccaaatcgtggaaaaatacctgcaaaagtacatcgaaacccaagaccccgcattcgtacagaccatggtcggattcagcggattggtgcggaattacgaccgctggaatatccacgtgcaggcttacccgcacaaggaacggcaagccttaaaagatttgatggaagaactggaacgcattcaccgctatagaataaacaataaggaagtaaaggagcaaatcacggcatatctctccagactggacgagacagaaaaaaacaaagacaagttcccgaacgaggtatacgtgcaaatgtaccagaacaatttcctagaaggaaaaccgatcacaagcatcgaggaagacatctccttgtcacgagaaatattactgaaaatcacagcaaaagatatacaagactggattgcctcgtggaataacaacagtaaaaactgggtatttatgatgcagggcaacgacccggattatgatttcccgacaaaagaggaaatcgtgaacatcatgcaagcagccaaggacgttgaagccaccacggctaccgaggaaatcaaagcggttcccttgttggattacgaggtagaaggcggaaagatcgtgaaaacgaaaccgatcaggatgctgaatgcagaggaatggacattaacgaacggctgcaaggtgtactacaagttctgcgaccagaacggcatcaaggtaagcctgttgggcgaaagttccggcgggatgtcattgctcccggcagaaaatctaccatcagcctcggcattatcaaccctagccatgtattccggattgtacaaacatgacgtgcaaatgatgcaagaaatactgaaagggtatcacgtgcagcccaatatcacgcttggggaaacattcgagggcgtgagcggcgtgtgtgataacaacgaaatggaaatgctactccaaatcatttatttgctcttcgagcatcctcggttcgaccagaacgattttgaaaagtttgtgtacttgaacagactacaagcagaaaacacaccccgcacggtgaatgacacgatagcggaacagatgcaaaaattgcgggtaaaagattctccccgcctgtggaaacaagatgccaaattctacgatgccatgaattacgataaaatggtttccatctatcatgatcgttttcaagatgcctcggactttaccttttatctggtaggaaatatccaacgggaagaagcacaaaaactggtggcgaaatatttgggagctatcccgtccattcaccggatcgagaaagccgtgcaacatgacttgaggaaagaaggttccatcacggaaaccatcactgccaatattccggacaacaagtacatgacgaatatcgagttcacgaacacgctaaaattaaaacccgtggaggatttggctatggacgtgattcgtttcgtactctcgaatcgttaccaagatattatccgagaagacgagggcggtgcctacggggtaaacgtagccgcatcttataccgcatacccgaaacacacacaagccattgccatcaacttccagagcaacacggagcaaggcgaccggatgcgtgccatcatccacgagcagattgacaaacttgtagccgaaggcgtaagcgaggaagacgtggaagatatggtgctaatgatgaaaaaagggcgcaccaacatgctggcaaatcgaggaaatgcccattggcaggaagctttacgatattatgcagagacaggtaaagatatcgattctcccgtgatgttcgagcaaccgattgaaaaactaaacgctaaaatagttcacgaagttgccaagaaattctttacaacggctgaatgtgtcgacatcgtagtgagatccaaataaggtgcaatttttattttcttcatggagggactataaaagtccctctattttctttttcccgcgagggttaagccggaaactcatcacagttaaatcatccgattgctctgcctttccgacaaaacgtttcacgtccccaaccactttatccaccatttgccgtggtgctaattgagaatgacttaccaccaagttaaataaccgatctatcttataaaatttggactgttcgttttgagcctctgacacaccatccgtgtaaaaaagcaattgagcccccggtgcaaaataacattcctgttcctcgtaatcataatcagaagtaacgcccaaaggcaaattatccgccgtcttgaagaaagacacggttccatccggagcaatcaataacgggtaaggatgtcccgcattacaaaatctcagacgattcgtgtttagattcaataccccggcaaaaaaagtaataaacatactcgtgttctcagcccgaattaaactctggttcatcaaattcatgatataattcaaagaggtatcccgcagggccaaagatcgcatctggctgatcgtggttgccataaacaaggaggcaggaactcctttccccgaaacgtccccaatggcaaaaccaaactcatcctcgttcagcatcaaataatcatacaaatcccctcctacctgacgagccggatgcaacacggcatggatatcaatacattcagctccaaaggtggggacaaattctttcggaaccattcccaattgaatatcatgagcgatacgcaactcactctcgatcttttcattcgctgtcgttgtccggcgtaactggtctacgtactccgttaattgttgctgcatgaaaagaaatgattcatacaattcccctaattcatccttagaccggatacgtggcaacggcgtgttaaaattcccttgtgccacatcccgggctgaagcagcaaatatcgtcaatggttttgtgattcgtcgcacggccacaaaacaaataaaataaacaaataacaacaacaggacaaaaccaaccagcagatacatattaaatttgctcaacttaccaaatacctgatcgtatggacaaatcaccgccatgtaccaatcggttgccaccacaggcgtgtaatacacataggacagaactcccccatcgtccacgatgatactaccgcttttcccggcagccatctcgtttaccagaatagtaacatttgtatcccgagcctcttttgccgtttcaaacatattttggccaatcatcacctctccttccctgcgcaagatataacgtccctgcttgtcaataaccacggtataactacccttgtaaggcttaatcgaatcgaccagatcacgcaaccatcgattggttaaatccactgataaaataccaattagttcattcttttccccatgaaccgggaccgcataagacgtcgtgattacatccggatcacccgcatcccgatagggcttactccagtaccgatgttccctcgcacctttgtaccaacctttttcaaaataattgtaattttcacttcccacttgaatagtcttcacagaatctccaaccaaaaatgaataaggtgcaaagtattgtcccttttccggaaaatagtaaggttcaaaagcgattgcgcaaccaaaaatctccggattatcttttacaatcctccgagtgataccaaacaaagaatccggctcctttacatattcaacgatcatccatcccaagttttcgggaattttttccaccttactcaataacgcactcacacgtaaatttgcctgagcagccatactctctatcttatcctcggcctcttgcgacaacgtttccgttgagtagtgataaaatacacccactaaaacaaaagaaagaattgtaatgaccgaaatcacatacaaactcaattttgcaggaaaagattttttatagcgatcaaatatcatattatcaattgatgaaaagttccttattataccccgttataataagccacgaatatacaaaaaaactataaaacaagtacaaaaaaataattattcaagagtcttttcccaagtgattccggctaacaagctccaccagtactgattggaaaaaataaatttgtaaaagaatttccacacacgaatacttctcatctgaaatatttgttcttattaaatattaatactaatttagtcgcgaattacaaacgaaaacgttttaaatatttagtagatgtataaaccatcagaatattatttcgttttagcctacatcgtgggcgtactcaaattgttcgggggactatgaaaattccgccggaataatttcaggcatcttttggcaacaggtatgttgctctcttttaagcaaaacaaacaacttaaatcaataatcttttaattatgcaaaaacaactattattaggtgttgaagctattgcacaaggtgctatagacggaggtatatccggcgtgtttgcgtacccgggaaccccttcaacagagatcacggaatacattcaggaatcgaaacaggctatcgcccgtaacgttcaccgggtgtggtctgctaacgaaaaaacagccatggaaaccgcattaggaatgtcctatgcaggaaaaagagccttggtatgtatgaaacacgtggggatgaacgtggccgcagactgtttcatgaacgctgctattaccggggctaacggaggtatggttattatcgctgccgatgacccatctatgcactcttctcaaaacgagcaggattcacgcatgtacggtaaatttgccttaattccgatcatggaaccttctaaccaacaagaggcatacgacatgacccgttacgctttcgacctgtcagagcaaatgggaactcccgtgttattaagaatcacgactcgtctggcacactctcgttccggagttgaacccagagaggctagagccgaaaatgaaatgcgtttaccggaagacaaacgtcagttcgtgttacttcccgctatcgcaaaaaaaagatatagattattactagagaaacaaaccgctttcgaagaagcatccgataactcttctttcaatcaatacattgacggagcagacaaatcaatgggtatcgtcgcttgtggaatcggttacaattacttgatggaagtattcggtggaaactgtccttacccggtagtaaaagtaagccaatatcctcttcctagaaagatgatcaccaagttggcggaaagcaccgaaaaattacttgtattagaagaaggatacccgatcgtagaggaagcattgaaaggttatttggaaaaagaatgtgtactcggacgcttggacggcacgctccccagagacggagagttgaacccggatcacgtagcgaaagcattcggattaccttctatcgagggatcgcctgtaccggagatcgtggcacctcgtccaccggccctttgcgtgggatgtagccacagagacgtatacgccgcattgaatgcagttgttgccgaatacccgaatgcacgtgtattctctgacatcggttgttatactttaggagcccttcctccattccaagcgatcaactcttgcgtggacatgggagcctctatcaccatggcaaaaggtgccgcagatgcaggattatacccggctgtatccgttatcggtgactccacgttcactcactccggaatgaccgggttactggatgctgtaaacgagaaagccaacatcacaattatcatttccgataatgaatccatctccatgaccggaggtcaggaatcttcagcactaggacatctggaatctatctgtcgcggtattggtgttgaaccggaacacatccgtgtcctacttcccgtaccgaaaaatcacgatgaattgtgcaaaatcatccgtgacgagatcgaatacaagggtgtatccgtgatcatcccgagaagagtttgtatccagaaagctgcaagagacgctaagaaaaagaaaaaataaattgattcaatgatcaatttaaaatctaaaacttaaaatttaaaattatgaagacagatattatattagcgggtgtaggtggacagggaatcctttctatcgcagcagcattggggtctgccgccctcaacaataacctgtacatgaaacaagccgagactcacggaatgagtcaacgcgggggggatgtgcagtctttcatgagaatctccgacaaaccgattttctctgacctgatcgccaaaggaacagccgatattatcctttcagttgagccaatggaggcattacgttatctcccttacttgaaacaaggagggtatgtggtaacaaacgccactccattcatcaatatcccgaattacccggaagttgagaccttgatggctacgttgaaagcccttcctcaccaagtaatcattgacgctgacagcatcgctaaagaagcggcaggtaacgtacgtgccagcaacttcgtgatgatgggagccggttctcctttcatcgaaattcccttcgaatacctggaaaaaggtatcatggcaattttcgaacgcaaaggtgccgatgtcgtagagatgaacttgaaggcattacgtgctggacgtgaattcgcacaaaactacattaaataatcggatctgggggagttggcaatgactcccctgcttaaaaaataccggtattgtctacttaaacaataccggtatttttattttaaacagaagtaaattaataggtgatgcgagtacccgaatttcgataaatgaaattctttgcgaccccttttcccgtataggtatgaaccgccttcggattaatatcaggagtcgctccctcccgattatatgttcgcagtacccagttaccatccttgttagaaagaatgctaaacacatccaccggagtcaccgtactcggatcagaagaatgtgcaatgtacacaatctcttcatccgcaggaatagagatcatatttttcttctcagtctgattacttggattataataatgtaccacattatctcccttcgaataataaatgacaccactatatgccggaggtgtagataaaacgccatatccttgtacggcaaacaccttaccatttacaacatcgaatgatgcaggaatcgtcaatccgcgataacctttatcatacacggcataataattttgcatgacaccgacatttatctgccacaaagaagccacaccagtcgtacgatccttcacaatagcatacgttcctcctaccgaagtcgacgaataaggttgcacccccatataaatcaaatcacaattcgtgaagtacacctcaccaaccggtttcagggaaagcggagaagcagattcaatcgcattttttatcggataatgtttctgcacataatacccgacaaattctccggcacgatcatcgtaacacaagcaactactactacctgccgttaccatcgaattaagctgcatatcgtcattcggatatgcgtatccgaaatgtccaccgccaccaccaccaagataagcaaaatgaacagcattattattcatcaacataaaaccacttgtagttgcccacacgccttgcggctttttaacagcgggtacttcaagaaaggcatcattccatcttttcaactgtttcatactggtcccctcgtagatacccaaatcttcatcggtacaaatcatataggccggttgcaagttcttcctcgtcctatttccttctgcatcatacacgtaatatgcatattggttatattcgtaagtacctcgtatcggtttaccggacaaactttcaccattaattgttttaagaatatccacgttcagttccccgttacgatcgataaaatcaacatccgtatatccattctcatatttgagaatataataaccttcactgaagaaactggctaccactaacttcgatttataaaatgctgaagtcccattcgatttatctgtcaccttaaacaccaattgataggtccccggttccatcgaaattgtacaatcaagtttcttacttactccaagcgtatcattaggcgcactactcgttaccgtccccgggaaagcgtaccacacgtaatcatattgagattcatctccttcaatagtcggatcgataaccaaattttccagcacgagaacagaatagttctcgtcaatccccgatttgataataggagcaactacatccgggttctcataactgtaattcccggtgtcctccacgcaagctgcaaaagatatacccagcagcatggcaaataaatatattatttgtttcatagtcttcaatctttaagatgtttaagatgctgcagggaatgttacccgtgtactgtcggcctcatagataggccctttaacggcctcatattcggctaacttttcccgggcttttagctgcaaataatacctgtaatccgtaattaaggtctcgtcgaaagtattatacccaacataatcgatgatgaacctcatcttctcctgtccccattccccaaaggtggccagatagctattcggtgaatcccagttagctggtttcgtagctttaccggtaattttaaggacatacacgacacgatccttgattccctggatgaaatattcattaggaagaatttccatatccagtcgatactcctcggtatccatctgtggtgttcgagtcatgatcaccggtaaggcgacagacaccttatttgccggcatcaccattctcttcaccatttccggatcatcgaatgcaacgtaatgagttcctgcaacagcggctccgggttccccgacattggactgcacgatacgaaacgggcgatcttgatcagaaggcgatcccgtaagtaatacatccagccaaaccgtatctacttgaatagatcccgccaaaaagaaggaataggatgtactatcaagttgtggcgttcccttgctattgttattataaatatcacggaaaaagaaaagggaactttcgttatcaaacgtactgatttcattttcttggcaagcaacaaaggccagcaccgaaatgaaaaagaaaaatccgtatttcattattttattgaccataatctaagcataaaattattcaaacgacatttgggattccgggaaaggaagtttataagacgcatctggcacttctttcgtcacgggccatgccaaactattatatgtaagccgtttataaaagaaaaacatttgaccttcaccataaaattcctttcggtactctttctcaaggcgactctttattgccgcaggagttgtcaaagttccatcaatagaggcatccaatacccgagccatacgatatactttaaacaaatcatcccgcccacattccgtcacgataaaatacatctcggcaagccggatcaaaggaatatccgttacggcagtcactgtactaccagtttcattgtattttttgaaaaaattaaaagcggaactggccaaaggaacaatccggttttcccacaagcgactattccgatagcgaatatcagaagtgtgaagagaagcttcaaaggcctcgtcaagataagctaccgtctgggtatatgccgtactgtaattaaagaatactggtgttaacgtttgggttgccaaagtactgctgactgcaaaaatatgctcggcagggaaagtcatttgtccattgttggcatccgcatcacttcccaaagtgaattttgacttctcatcactatccaaagcatctatcacaaccaaggcattttcaagcgcatcggaagttttccctatccaaagataataacgagccttcgtcgctttcaaggcataatagttaaaccttgactggcggaaataatggtattcatcagccggatgtggcaaatcttggttcactccctgcaagtcatccggagagtttaggatggtattcgaataagtcaggatcggatcatcaaccaacaactcctctgcattgttcaagtccatcaaaatattatcaagcacttcctgatatgacacggccaataattcctgaggatttttcgtgactattttcacgtaaggaatagctttatcggaactcttagccttactcggaagaggtccccaataacgtaaaatttccaagtgcaggaatgctcgtaagcccaaggcctccccctttatcaattcataatttccatttgtaaagagatccttcttcgcatcaatattctccagaagagaattgatattaataatcgtctggtaatattgcaaccaaacatcctcaagaagctttttcgttgaagtctgtgtaaaatcgaaattactgatatgatagatctctgcctgtgtcgaattggcagatggtatcgtccagtgctgggccatcatttccggcagtttcatcgtcgtgttgagcccgtaaagctccggagtcgccattctgatataagctccggtaagtacatctttgaacccttgctcggactcgaacatcgtagtctgccgcatttcgagttccggttgtatatccagccattcgttacacgaggtaaacgtcaaggccactgcaactgataagtataaatatatctttttcatcttcatgctgattgattattgtttctagtattaaaaccttaccgatagtgaaaccgagaatttacgggcaaaaggataggaaagtccgcgttcctgcttaaccgtcgaaaggtagaaaacatcttcggcataaaaaccgatggccagatagtccaaacggcaatgtctcttcagccattctgtatcgaattcataattaacatttagcgtgttaagactaagggcattttccttcatcacaaaacgggaagaggcatttgtggtattgaaatctttaatattcttgaatttcgtaacatcaccttcattctgccagcgatcgtacaaagcccgcttgtccagatttccccagcgtttcgctgcagttgtcgtgttctccactttatccacaagcgtctggttatagatatggcccccaagacgataagagaacgtagcattcaacgtaatatctctccatcggaacatggttctgagattgccccgaactttaggttcattcaccccgaaaggcaccttgtctttcgggtcccacgtgtagactctctccccatccttgttcaaaaacaattcagaacctgttgccggatcaattccaagtgaacgaaccacgaaaatcgtattcatggactgtccctcctggtaaagaaagctcggattaggtccggcctcgtctaacaattctgaattaaggaattccaacgcattggatattttcagtatcttgtttacattgtgtgcaagatttcccccgacagaccacataatatgactttcactatttctgatcaaaaacacattagcatcaagctcgatacccctgttgcgcacctccccgacatttgccttataactggagaaacctccggccgtgggcaaattaatatctgtaagcaaatcctccgtgagcttattgtaatagtccacgttcaaacgtaccaaaccattgaaaagagaggtttcaactcccagattcaattgctttgtcttctgccaagacaaatccggattacccattccaagcatatatgccccgttccaatacttgtagttctcctgtccaaaataccgataagtggtcagtgcctgatacgaactgaaattctgggacccgatagtaccataagagaagcgaaaacgaagtaaattaatagcatttgacgaactcaaaaaattttcattatgtacgttccatcccaacccggcagaaaagaaaggtgccgtacgatcattacttccaaatttggacgatccctcaatctttccagagaaatcggcaaaataacgacgatcgtaagtatagttgacattaaatatcaaacctaaccgacgggaatgagcctccgtactggtaggctttcctaaagcataagctccggccattcccaagttcttcatattcaaagacgagaaaccacgcccggtaacagaatagctctcatctttatcttctgcaagattgccactcaacccggcataaagctgatgaactttattgaaagttttcgtgtaattgactgttaaatttccctcgtatgaaagcatataagaggtcgtgtaggtataacttcctttcatattggaattctcacccttgtactcgtcagtgtcaaaactggtatgctcgcgggaaagatatttatccgtacgagaatcctgtttcgtgaaaccgaagtttccccgcacgaacaagtcggaagtgattttccactctatggcaaagttattctggatattcgtgtaactaccatcatcccgagaaggcagcgacgcattgtaaagcggattaccagccggatccggagtccgggaggtctgggatatagtttccaccaactgtttctttatatgcccctcgtcatcataaggagtataaattggattcgccagagaatattccgaaaaacttccatacggagaatttttatttttattataactaatagtcaaatcgttttgaaacttcagatttttaagttcatactggaaatacaaatttcccgataacgtgttacgtgacgatcctttcatcactccattgatattattataagaaagtccgatcgcatatttgaagttatctgagcccccgtctacccgcaagctatgtcgattcccgacacccgtcttcaccggatacttcagccaataggtattcacaccccgttcgacttcaatcaaacgacgattatacagttccatcagattctggttattgggattgtacttatcatcaagcattcctgccgctacttcataatctagcttttctcgggcgttcatcaagttataagatgtgaaatcaggagcctctatattgacagatccgcgataactcactctcaacttaccggcttctggacgcttgagagtaattactaccaccccattcgccccgcgagccccatacatcgcagtagcgcttgcatctttcagcagcgtgattgtttcaacaagctcgtcatccatatccatcactcgttgaagtgacacctcgaaaccatccatgataaacaaaggtaagttagccgtactcttcacgctactctcctcttgaagattgcgcacattgacatccatactggtacgcccgcgaatggtaatatccggcaactggttcgggtccgatccaaattcaatattatccgcaatattaaaactcggatcaatattactaatctgagacaaaatactacgattacccgatgctttcagatcgctggcggaaatcgttttaactgcccctgtgtaactttcacgggatttattgaaaatacctgtcacgacaacctgatctattgattggacatcatcctgtaacacgacattgatttccgtttttccggtaatacgaacttcctgcgaagtcttcccgataaaggaaaccactaccagatcgtgatcagccgggacctccagttcaaaattaccggtagcatttgtaaccactcccacgcttgtacctttgacaacaaccgtcgcaccgataagaggcaatccatcagcctcggtaacaactccttttatcttcacagctttttgtctaatagtatcttgcaccggttgttccttaattttaataatgaccactttcccctcaatctggtatgtacaaggctttccgatcaaaacggcatccatcaaacgttttatggaaacattggtaacgttcacactgactttcccaatactctgtactgtttccgtactatacatgaatgaatagtcagtctgtgcttcgacctcccgaacgatttcctcgaacggaacattttgtttattgatacttatgtttcggttttcctgtgcagacacttgcgaagaaaacagagaaaagaaacataacaccacaataacaagcaaacatcttgctcttggggaagaaattctatttccccaaagacactcttgtctcttttttttcatacatttaattggtaggtttatcgagttctaaaattattatctttgcaaaagtcgaagggtgaaaagaagaagaactcgttaaccttctttcccctgtttggttgacccgaattcctgcccgaattcgggttcatcatttgtgttacagttattctttgccgttcttaatttttatatgattcccagatactaaaaatctaatctcacccgtcttttccatcagactcattaattggtcaaaacgatccatatgtggaagccttaaccgaaacttcttgttttttaacgcactatcctcaaagctatactcgaaaccaaaccactgactgaattcatgcataatctcgtcaagagttcggttgtcgaacacgaacattccccgggatcgttccctgtaaacatccgcattcacctcctcaattttgatttgccgattcccgcaatcgaagatggccatctgattcggttgcaagaccgtcgtaccgttcagcatcaccttaccactaacaagcacggtttctatcgtttgttcttctttgtaagctctcacattaaaactcgttcccaagacttcaatcgaaacctgttccgtatttactgtaaagggtcgagtagaatcacgtttcacgttaaagtagccctcacccaacaacatcacggaacgctcatccaacgagaagaattccgggaactgcaattcagaaccgggatataacactacggtcgtactatcttccaagatgatggttcgtgttgcaccacacaaaaccctcactttatataattccggagcagatgtcgattttttttccaagggaaccgtattttgtcggataatatccagtacgttcgttttatccgtcaacaccacgctatgaccggaaggaaactcaagtaccgtctcattttccagcaaaacaatctctcttcccgtatcatcaacctggttcatatacaaataaaacccaccggaaagcccgaggcatacaataataattgcggcataccgtaacaaaagcctcccgacatgacgtttcggacgtttcagttcattctctatagacaaccacacttttttcccagtttctatttctgcatcatcattacccaatgtcatttccttttcggcaacatcctgaataattttctgaatgttcacacccgctttcctcgccagcgagacaagctcttttttctccccttcagatatatcctgcatgacgaacttcgttagcagccgtgcaagccttgtcgatttataatactctttcatgtttcaacaatgtttttacacttctaatatccacaaccggacaaaaggtattatcctatgacccaaaaaatgtttttacatttaaaaagataacaggataataccttttcatctcttctggatatttaaggaagtaaaaacacttatcaatttgaaattatgaaaaaatgtattttagtactggctattgtattatcatcagtagctctttttgcccaaggtgttaattttcaagaattaacactcaaagaagcatgtgcaaaagcaaaggccgaaaacaaacttgtattcatagattgttatacagattggtgtgggccatgccggttgatgaccgaagaaatattccccatgaaagaaatgggagactatttcaacccgaaatacatatgtattaaagcaaatgctgaaaaaggtgaagaaggtcccgccatcaaggaaaaattcgggatcaaagcgtacccgacatttgtcattctcaacaacgatggcaacctgatacatatgtttgccggtggagtgctgggacttgagtttattgataaagttgaagaatcctttaacccggaacttgcgttcggagaacttcaaaagcgatacaatgcaggcgaacggagtaaaaagctaacctctagctatcttcaagcattacaacatacctacacgacgaacgtgggtcccctcatcgaagagtttgccaactctctaagtgatgatgaattgatatgcgaggagtgtttgtttctattcgacgaacacgcacggttaggttctccacgagagaaattccttacacaacacgtggaaaaattccgtgaagtcgtggggcaagataaagtggatcaaatcctaaatcggaaatacgaagcctattattgtggtattcttggcaaacaaatggctgcaaccacgactgatgtagaacaagttaacaaacaactggaagcacttcaccttactggagtaacctctttacctctctatcaagcggcagtagccacttatctgacgaaagaaggaggggaagcacttttcgaaatgattaaaaaggtatccggtgaccttgaaaataatgacatcgatcgattcctatacttcaccattccggccgtaaacgaagtatggagtgaagaccagagtaaacaaattgtcgctctgattaacaaagacgatatacgaacccggatcataaacacgctggaacgtcagaaaaagacttcacaacccaaataaaagaacaaaactactaatatctttaagttcttgacgtaaagaggcataggcttttgttttttggttctttaccgtattgatagaaatattgagagtgtcggcgatcatctgttcgctcatgccggacatcgacaacagaatgatctcccgacgcttttcaggtaataaggaaatggcccgggatatttcacgcttaaactcgatttcggtgattttgagcaatacatcatcactctccttgttctcggcagattcgagattcagtatatgcttatttctcgtgatgtatttcaccgtattatttctcaacgctttataaaaataagccttaaaatgatcttcactcttgaaagcttgtcgtttatcccagatatgaatgaacacctcttgaagaatatcgtctgcagaagaatcgtcaacttggaaagacttgacaaactggcgtcctgcagagaaaaatccccagaataactcttcgaatgcacgttgatttccttcccgaaatcttttaattatctcatccataaaacaactttatttacatatccactattgactttcctgtattccgtttcttacctccaacaaaataactatccacaaacccacaaaaggtactatcgtaccctaacattattttaggtcacaaaccccatatcatacattgatcctaaaaggaaacaccagactaaagctagaaataaatttccagcaaaaacaattgaaacaaaactttaacatacaatcacctctaggtcatacctatgttccttcgatgtttcaatataactccgttttgattcattccgcattcaaatgtattttctccggcgatcactcgcaagtgacacggagaaagcacggagaagacacggagaaaacctagccaaacaatagagtaacaacgtaccatgagagtaataaaacacgtgttaatgaataactatatccatgttcaaaaaattctctaaaaacagaacaaaatcgcttttcaaaacgtttaatttataattaaactttaaaaattaaggctatgactgaggattatgaattaaaagatgacgtacatcggcaacaatacgaattccgtatcgggaactataccccgaaaatcgaatatataaaatcaatcaacggagagatatatcttacccataccgaagtcccgcgggaactggaagggaaagggataggtagccagttggtagaaaaaacgttacaagacattgagcggcaaggtttgcggttagttccactttgtcctttcgtggcagcttatatcaagaaacaccccgaatggagacgcatcgtgatgaaaggtattaatataaaataagcacatatggataaaaaaattgaatatacaaacggagaattaaccattatctggcaacccggcttatgccaacacgccggggtatgcgtgaaaatgttacccaaggtgtacaatcctaaagaaagaccctgggtcaaaatcgaaaacgcaacaacagcagaactaattgaacaaatcaataaatgtccctcaggagcattgggttacagaatgaataagtagtgaaagtcgccgaattcggcgactttcattttttccttttccacaaatagcaaacaataaagatcaacaagaaacagagcacgatagttgcccccgaaggtaatttcaacgctgccgaagtaaacaagccgataattgaaccgacacaactgataatcgtagcccacaccagctgtttcgtgaaattcttatgaaacatcccggcaatagcttgtggtatggtgagatacgaaatcacgagaatgattcccgctagcttcatacacaacacgatacacaaggcgatcaacgctgtaattccgatttccagaccattcaatgcgacgaaatgcgtccggctgtattctttatcaaaagcgatataaaataaaggacgataaaatttagcaaagaacacgatgatcaccaagcacaacagaagcgagagaagaacctgctctcccgtcaccgtgaggatattcccaaacaggtaagataacaaattaggagcataccccggtgtcagataaataaacaacaccccaatggccatacccgcagaccagaaaatcccaatcaaagaatcttccttaaatcgcttgttatccgaaagatatagaatacagaaagcggcagccaaagcaaacacggccgccccgaaaagaggcgataatcctaagaaataggctaaccccaatcccccaaaagaagcatgtgtgattcccccactgataaagaccatccgtttggccacgatataagttcctaccaatccacaactcacgccaatcagaattgtacacaacagtgcattctggaaaaaagtatattctaataattcaaacaccttattaatttttgattttagatttatgattttagatttccacccacgaatcaacgcttttcctcaatcgaaaatcgtaattcataaatcgtaaattgattagttttcaattgtacgatcgtgtttcaacaacacccgatgaggtaccgtaccatgagagatcaattcaatcgggcaattatacaatttcaattgttccggcgtgatcagatttgattcatgataatgcaagccgccatttacgcaggctatcgtcttcacgtaagagcagattgttcccaaatcgtgagaaaccatcacgatactcatcgttttgttcaactcgcccaacacggaatagaattcgttctcaaaattcgcatccacgtaagtagaaggctcatccagaataagaattttcggggaagaaataatagctcgacacaggaataccctctgcatctgtcctccggaaagctctcctatcgggcgatttccgaaacctcccattccgtatgtttctaaaagatcattcaccttttcccgatcagccttcgtgtaacccttaaaaattcccttctccgacatcaaaccggacaagacgacctctttcacgctaatcggaaatcttgcatcaaaacggctgttctgaggcaaataaccaaacaacgattgtttcgtaacatgataaacaatttcaccggagaaaggttttagcaatcccaaaatcaccttcaataaagttgttttccctcccccgttcggtccgatgatcccgataaaatcatgttcccgaatggtaagatttacgtcccgcaacacgaccgtctgctcgtatcccgctgtaatcccttttaactccagaagttcattcattcttctatttcattttctgttcaatgatacccaataaagaacacatctcggccttccagtccgggctcaacggatctatggctatcacctctccatcaatctccttggcgatagccttggcattgtccacatcaaattgattctgaatgaaaacaatctttattcctttagtccggcaagaatcaatcaccgctttcaaatgcgaaggattcggttcctttccctcattttcaatagagatttgttccatcccgtaatccttggcaaaataagtcagcgccggatgataaattagaaaagttttattctcttttttcggaataatccgacgggctgcctgatcaatgctatcaatctccacccggaactgacgatagttcttttcaaacgtctcccgctgatcggggaactttgccgccaacacatctaatatcgtacgagccatcatctccgcgtacctgggagacatccacacgtgaggatcaaaattcccgtcatgcgaaccatgatcgtgctgatgcccatccccgtgatcatgattacaagctccttgttccaaatccatcccgacagattgcttcacaagcaacatatttttctgcgtttccagaaaaggatacaaattactcaactcgaaaggcaaatatcccacagcaaaataaacagagctattgtgtaaagccttcaactgctccgtactcagatcactcaccgccggattcgctcccggtggaatcatcacgttcaccttcacgtaatcacccgcaattctctccacgaaataacgctgcggtaaaatactcacgctaatcgttctctccttgtctttattctccccacaagccgttaataaggctatcaaaacaactataattcctattttcattacattggatatatcaaattcttctcctcaatcacatctaacacttcggaaagatattttgcagcctcgtattttgccataggcaaattgtgtaacaaataattaccacaatctttagcggcaacaccgggaacttctccctcgaaatcccggataaaacggaaggtttcccgcattaactccacgatgtcacgggactccaagtcgccttttatcaaaaagtaatttcccgtacaacatcccatgggtccccaaaacacgatcttgtcaccccactccttatgattgcgcaaataggtcgccgccagatgctctatcgtatgtaactccccctgccccaaaacgggttcccggttcggttccttcatgcgtatatcaaacgtcgtgaccacctgatcgcctaaatagtctttacgggaaacataaattcccctcaacaagcgcaggtgatcaatcgtaaaactcggtattttttccatactttaaattttattcttctgataagactttaatcaacactttaatcatttcaaaagaacgtttaggtgcctcttcccaaaaattcaaatattgtttgtaatgatcttttaccccgggagtatcactgataatacgatagctcaagaatggaaccccacacatatagcaaacttgtgcaatggcacatgattccatgtctaccgccattccttccggaaaacgttttttaatctccgttaactcctctttatcggtaataaacttatccccgctacatatcaaaccaccgtaaacattaccctcatgagcaacagacaatgccaatttacacaactccttatccgaaacaaaacgagccggcaaaccttgcacctgaccatattcatttccttccccacaccacacgtcatgataaaccatattctcgcccacaacaatatccatcacttgtgtcaagggatctatccctcccgctaccccggtattgacaataatatccggtgtgtaacgctgtatcatttccatcgtaccgacagcagcacatacctttccaataccgcttttaaccaagataacctccacgttcccggtatgtccttccgtgaaaagaagtccgcgaacagattcctcttttgtctgttccaataatgatttcaccaatccatattcggacgtcatggccacaattattccgatccttctcatataactctattgaaaaaatggattcattcttttttcttccccgatcgtcgtgaatcctccatgcccgggaatgacacgaacatcatcgggtaatacaaacaatttttcccggataccattcaacaactgattcatatccccacccggcaaatcagcccggccgatacttccttggaacaaaacatccccggcaaccagtaatttatccttgtcactataaaagcaaagccctcccggagagtgtcccgggacatgaatcaccttcaattccgaatgtccgaacttcacgacctccccatctttcaggtattcccccaaagccggtggcggggtaattcctttcacacctaacatagccgcatatctttcggcatcttctacccaaaacgaatccgcctcatgcgcccgggctgatagcccaaattcatccagcatgaaattattcccgaaaatatgatcgatatgcaaatgtgtatttaacaatgctaccggcatcaactggttctccgccaagaaactcttcaaacgttggccttcttccttcgaaaaacaaccgcaatcaataatcacagcctcccctgtctcgtcatacaacacgatcgtgttctcttgccatggattatttgtaaatactttaattttcatctgtcgtgcattttaacccgacaaatatacgaaaaaaagaagtggatcaaaaaggcttttgatccacttctttgtccgtaacgtttataaacgaatcgtcagattttcagcgtatcgaatccccgaccataaactcccataacggtattcatcgtcaagaacgcatcaggatcaaccattttcgttacacgcataatattttgcatttcgctcttacgagctacgacaatcaacatcttacgagcctctccggtgtaccatccctgacaatccaccacggtaacaccgcgtcgcaaatcacgagtaatggaattcgccacatcctcgtatttttgggaaaatataaggaattgtaccgattgcatctgtcccgtgaacaccaaatcaatcgtgtaggagttaacccccatcaccacgtaaccatagataatagtggctatttttgccgtgggatctatcacggtatcctccccaataaagtaactacatccgatgataaacacatcgatgtacatgataattttaccaggactgatattccggtacttgttgataatcatggcaacaatatccgtaccggcagtacttcccccgttcaccagagaaataccgatccccgcaccacacatgataccggaaatcacggcacacatgaatttatcttccagcagaggttcgtgtatcaggttctgaaacacactcaacaagaaagaactcatgaaaatagcgtaaatggtcttaaaaccgaaacgaggtcccagaatcttgatagcaatcgccaccaacaaaaagttgatcacgaaatagctatacccgatcggaatcacctctccggaaaggaaataaataattgttgaaataccggtcactccaccaccgaccatacgatgcggagccaaaaatgccgtcacggcgaacgtgtatatcaacaaaccgaacgtgatcaacagatacgcccggatttcactcatcaacttctcctttgtaactttcatcacattaattattttgttttgcccacgtatctttcaaaccaacagtccggttaaacaccagcgctcccggcttggaatctttatccacgcagaaatatcccagacgttggaattggaaacggtcaccttctttcgcctccttcaaactcggctccaacttacatcccgtcaaaacttttaatgagttttcattcaagaattccttgaaatccacatctttatgtccggcagggtccggatctttaaacaatcgatcatacaaacgcacttccgcctcgatagcgtccggggctgacacccaatgcaaagtacctttcaccttccggttacttgccgatccggtaccgctacgggtatccgcatcatacgtacaatgaattgtcgtgatatttccctccgcatccttctccacgctttcacacttcacgatataagcacctttcaagcgaacctcattacccaaagtcatccggaagaattttttcggagcatcctccataaaatcatcccgttcgatatatagttcgcgagagaaaggaaccatcctcgttccggccgtttcgtcttccggattattctcgatttccacggtttcggtctgtccttccgggtaattgtcaatcaccacccgaaccgggtccaatacggccatcacgcggggagcaatcttattcaaatgctcccgaacacagaattccaataaagccatatctaccacgatctcccgacgggcaacccccaccttctctgcaaaattacggatagattcaggggtatatcctgcacgcctcaacccggtaatcgtcggcatacggggatcatcccaacctgccacaattcccttctgaacgagttccagcaaacgacgtttactcatcaccgtgtaactcaagttacgacgggcaaactcaatctgccggggacgatactctgtgtcaatcaactgatccagaaaccagttatacagaggacggtgcacctcgaactccaacgtacatatagaatgcgtaataccttccaaataatcgctctgaccatgcgtgaaatcatacatcgggtaaatacaccatttatccccggttctgtgatgagccacgtgcatgatacggtacatgatcgggtcacgcatcaacatattagaagatgccatatctatttttgctcgcagaactttctctccggcttggaactcaccgtttttcatccggcggaataaatccaaattctcttccggagtccgatcccggtaaggactatttactccgggttcagtgggagtcatacgttgagcgctgatcacttctgccggctgatcatccacgtaagcctttccctccagaatcagtttttcagcccagtcatataactgttgaaaataatcagatgcaaaatgcggttctccttcccattggaaacctaaccattgaatatcttgttgtatggaatcaatatattcgacatcctctttcgagggattcgtgtcatcaaaacgcaggttacattttccctggtattcggttgctaatccgaagttcaagcatatagaagttgcatgcccgatatgcaagtacccgttcggttccggcgggaaacgagtatgtacccgaccgccattctttccctcggccaactcctcttcaataatctgttcgatgaagtttaatgatttaccttcaccttcttcttccacgagatgatttttatccatactaaaattattataacatattcgacgcgaaggtaattaatttatgagagttttaaaagtttctgtatatttgcaggccatgaaaaatatattttataccataatatgctgtctgatttcactcacatcgttagcccagagtgatttcggttacgaaaaccccgatggaagggatccccgggaagaaggaatgcaacgtgattccacgaaagaacaacgttacgttccgcatcatcgtttaacttggaaatgggtacacgacggtgtgtataaagaattttaccagattgatacacttcaagacgggctacaaaacacaaacttgatattcaaacacagtgtttccaatacatacctgggaaacttcccatccccttacgtatcggacatttacatcctgcgtccccgaggagaagatttcttaccgcaagatcggctaagagattatttttttaaaccggaagacgcgttagattacaacactaccacgcctttcacacaattaagttatttcaacggcgggggccggggaaaaacagaggactggttagacgtgtggcacattcagaacatacgcccctattggaatgccggattccggtataacctcatttcatcggatggagcctattcttatcaaaaatccaaaacttacaatttttcttttttcagttcatacgagaaagaccggatggcagtatccatgttcataaaccagaacatggcacacatcacagagaatggtggtatcgaaaacctagccgatatccgggatacctcgcttgatcccaaagttgtcggtacacggcttgccatggagccaaagaacaaccttatgaatttcaatttcaaggctctggcgcaatacaatatcggtaatcccaaggaaatcatcacgcaaaaagatagtgccacgatagacaccacgataacctatcccatgaaatttgccttggccctcaaagcagaggacaatcgttactcgttcaaagaagagagtgtcgaagaaggatttttctctgatactacctacattagtaaacagggaaattccgatatgatcaaaaaccggaaatatgaaatcgacgccaaattcatcttgaatgaacatcccaaatataaatatttaccgggcgtatatgccggacttaaattcaaatacctgagttacgatcaacgggtctcgctggacacgattaataacaggggaaccagcaaatacaccgggacatacctgacagccggaacctttaacatggacagtaccaccatgtttaatttcgacatctggggaagtttttgcctggccggagattattctgccgactattcattagaaggacgaattatccagtacttgaataaaggaagaaattcctccgtcaccgtccacgccttgctggaaacgcaaaccccgaatcactactatctccagtaccaggggaaccacaatcaatggaagaatagttttgacaagatacacgcctacaatttacgagggcattacacgaataaacgccttcggacagaagtcggggtggccctcaacaacacgaagaactatatttatttcgacacaaccgccatgccccgtcaatatgatggagaccttatggtattcactgcatgggcaaaacaaatattccgactaggacatttctacttcgaccagaaagtgtactaccaagtgaccaacaaggaaaagatattaccattaccccaagtagcacttcactcgcacaattactaccagaaccgcttttttaaacaagctttgggtttccagatcggtatcgacttgttctacaacacctcgttctatgctaatgcgtacgatccggcaatcatgcagttctacaaccaggaaatcgagaaaaccggaaactatccgaaaatggatgtattcgtcacgttaaatataaaacgggccgacttgtttgttaaatacgaacactttaacgaattctttggcagcagggattatttctcggcatacacctatccaatcaacccggcaaaagtgaaattcggtatccggtggaacttctttgactagcgtggaaaaacggacaaatactttcctgcggaatccatagactttatggatcttatggctttatgaaccttataaactccactaatttggtagttcacaacattttccgtatttttgtggtatgtatataataagagttgttacgtacacgctgtcactcttattttgtttcgtctcgtgcaaaacaaaacaagaagaaccgctgattataccagaacccggaagattagaacaaatagatcaacgaggggtattaaatgtttgtagctactacaacacgacagactactatgtgtacaagggtattcccaaaggattccattacgaattggtaaaagatttcgccgactatttgggagtaaaattaaatattgaggtcaacacgaatattgacgaaagcatacagaaactcaatgaaggcaaatatgacctaattgccatgagcctctcggtctcgaattcccgaaaagaagacgtgcaattcagccaacccctattcaccacccgtcaagtactggtgcaacataaatcagacacgctgatcccatcgattcaaaatttaaaaggcaaagaaatctttttacaggaaggcactttctccaccaaattcctgcaactattaaacgattccttgcaactcgatttgaagattaccgaactggaagacgtcacgttcgaagatattctattaaaaatagaaaacggggaaatcccctatacggtaatcgaccaaaacatagcccaaatcgcagcccaatacatgaaacatattgattattcccttcaattatctcccgaaaaccctgtggcttgggctgtcacgaaaaaagcaaccttattggatgaggaaattaacaattggctgggcgcaattaaaaagagtggaaaattaaacgtcttgtacaatcgatattacaaaaacagttacatcacatcactacacaactccaaatactacaaactgaaaaatggagttatctccagctttgacccgatcatcaaaaaagaggctcgggcaatcggttgggactggcgcttgttggcagccgttatctaccaagaatccggtttcgacccggaagccacttcccaccttggggctgtcggtctgatgcaagttatgccggaaacctccctacaactcggattcgaggaatacgaagaacccaaagacaatattcacgtcggggcttactatctaaaatacctggaaaacaagttcaacaaattcgacctcgacacgctggaacaaattaagttcactttggctgcctataatgcagggctgggacacgtactcgatgctatccgattagccgaattatacgggaaaaaccccaaagtctgggataacaacgtggattatttcatgctccataaatcccaaccggaaatatatcgggattctgttgtccgtttcggctattgcgacgggaaacaaacattcaacttcgtcaacaacatcatggaaaactatactcattataaaaacacgatcaaaaaataatcttaaatttaaaatcgaaaaattcagaatgaatagaatcacagaatttaaaatcatgaaatttaaaattcgaaaggcgaatattgatttacattaatatttttcataccttcgcattagagttttgattattatttaactaattactaaggatatgccttacagaagattaccgaatacagatgcagcaaggataagggcattagaaacagccttgaataacgaagagttttctaatatcaacaacttaccgttttcattacatcttaggcaaaagattgagtttttcttaccaaagttcaaaacggcaatcacgaattctcaatgcgccagagataaacaaaatgtgaacagtaggaaatatgcagaatatactcgaaaagcaaaattatacatttctcatttcctgcaagtactgaattttacaattgcccggggagaattaaaaccaatggcaagaactttttacggaattgacgaacacgacaccaaacttccctcgttagtatcagaccaagatttgctggaatggggagcaaaaattatcgccggagaacaggaacgtacccgcaatggtggcggtagtcccgtgtacagtccttccattgccttggtgaaagtgaactacgaaaacttcaaacaagcctatgcctcccaaaagcaattccaacagaattcagctcgttgtagcgcagaagttgcacaataccgaggcgaggccgacgaatacatccttactttatggaacgagatcgaggctcattacgcggacctcgaagatgaagaaatacgccgccaaaaatgcgaacatttcggtctagtctacgtcttccgcaaaggtgaaaaagaagaaataaaaagaaaaaaggaagctgaacgcatcacgctcaaactccccttttaatattttagattttagatttacgattttagattcttaaaatcacaaatcgtaaatcataaattacatatacagatctctctcccctctcgcaattctatcataataagaacggaacgtggggagtaattttttgtctgtaaagaatggcatattttcaatttcctgcaattctcgtgcaatcaacttttcgccaatttctctagtctccggagaagcatagtcattcaaatattcccgaaacgtcaacaccgcgttcagtttacaaaatttaccttccactcctttctccaacaaattcatgatcttatctcccgtacgcccgcagcgataacctgccgtacagaaagaagtaatcatcccgtcatttgccagttcgcagatcacctcgtccaaagaacgctgatcacccaacataaactgcaccttatccgggttctcctcctgtttcaatttcttggcataagccccgattcccaacttagaagaagcatccgtttgggtacatccgtaatgattgatcaaatcacgtttcaacaccggattctcacgtgccgtcacgatcaacccgctatacgggattgccagacgcaacaccgaaaccacccgtttcatggcttcatcactcacgatataaggagaatgctcgctcaagaaagaaccgggagccggttgcatacgcgggaatgacacggtatgcggtccgataccgaaatgtttttccaaatcccaagcatgatgaaccaaacccatcacatcaaacttccaatcgtacaaaccgaataaagccccgatagccacgtcgtccaccccggcctccatagcccggtgcatggcgtaaagccgccagcgataatttcctttcaccgtgtttgccggatgtaattcggcatatctcccccggtggtaagtttcctggaatacttggaacgtaccgattcccgcacgccataatttcttcatatcggcaatctccatgggagccgcattcacgtttacccggcggatattattaaagccatttcccgtcggagtcgtgcgtttcacggaataaatcgtggaaatagactccgcgatataatcagctccatttttaggatgctcgccatacacggcaatcatccgcttatgtccctcatcaatcacggcagccacctcatcccgcacctcatccatcgtcagcacgtgacgaacctcatctttattttccgcacggaatccacaatacttacagctattcacgcaaagattcgacaaatacaagggagcaaagaaaacgatacgattatcatacactttcttcttcacctccaacgccgcttcttgcatttcatgcaataactccggatcctccacgttcagcaacgtagccgtctccgccggagttaaaatttttatatccaaagatttttgtaaaatatcccgcacttgttgtttatcgggattcttatgcttttcaatatccgcaaatatctgttcttcatcaataaaatcctttccgccatccagatatttatcgatttccgcttgtttgattacactggcagtccaatcttttacactactcatttttcacttcattacaagttcataaaagtcctaaagtctacaaagcccaccatgcacgttttccccacccctctcatcacgtggaatctttatgcatacacaaagatcgttaattatttcatcaatgctctctattcctgatatttattttcaatcagctcataaagaaaatcaataacccgatcatgtaccccgtaaacgtcccttctaaattcctatgaaccttagcttaataattcttttaccatagcggaaatcgctttaccgtcagccaccccggccaattccttggaagcgactcccatcacttttcccatctctttggctgaagtagctccaaccttctcgatgatcactttcaacgcggttctcagttcttcctcacttaattgtttcggcaagaattcgttcaacacttcgacttgcgccatctcatgagcatacaaatcttctctcccttgatttttatatatttcagccgactctcgtccttgctttgccaacttctggataattttcacgctttcactatcagcaatttgctccggagccccggcaacagattttgcttcgataaaaaccttctttatatttctcaaaacttccaaacgaatggtatctttagctttcatggctgccatgatgcctttgctaacctgttcttctattgtcattgttcctgaatttaaaattaaaacccacgaagttactatttattcctcaaatttccaccagccatttttaattttcgaaatcctgacgtaattttgtatcgtaaaaatatctgcatgaaaacaatcatcacgaaccaaaccatttggaatatagcttacccgattatcctgggtagcctggcacaaactcttattacccttaccgacacggcattcttagggcgcgtcagtgaggtagccttgggagcctcggccatggccgggatttattattatgttttttccacgctggcctggggattctcaatagggatacaaatcatcgtggcgagaagattgggagaaggtaaactaaaccgtatcggagtcgttttcgaacacgggttgtgtttcgtattcctcctgtccatgaccctcttcctcatacaacgatattatagcgacgtgttgctcggagcttccatccaatccccgaacatctacgcggcagccatggaatacatgtcctaccgccattacgggattatattcgtatgcttcaactttttattccgggccctttacatcggactctccaacacgaagatcatcggttattcaacagcagccatggccatcatcaacgtgattttcaattacctactcattttcggaaaattcggtttcccggaactgggagtcggaggtgcggcactggcctccgtgatggcagaaatttccgcctgccttattttcattttctataccttactaaaactcccgatcaaacaatatgcgcttttttcgttccacaaactagagggttggttaatgctcaccgtactgaaaacggcctttccaaccatggtacaaaaactgttgtcattcgggacatggtatatatttttcatgctcatcgaacacatgggagaacgccccatagcgataaccatcatcgtacgtagtgtctacatgctcatactcattccggtattcggttacggggcaacggcaaacacgctgaccagccgtttgatcggggaacaacgccaaccggagatcatgagtaccctgcgtcggatcatgaaactttccatgttgagcgtcctccccgttctgcttatatgctacgtgttcccgtattacgtgctatccatctactccaatagtctcgaactgattgccgcatccaccccttcactttacgtgatcggtctggcagccctcagtttctgtttcgggatcacgtttttcgaagccatttccggaactgggaacaccactcatgcccttatccttgaaagttttgtccttattttctacacgttccaaacttggctattcaccacggtcgttcgctccgatgtggcattcgtgtggaccgtagagatcacctacggaatattaatcggtgttgtctcgttaatctatctcaaatacacaaaatggcaacaaaagaaggtataattcttggtgattctacactcattttttctctactttaccgtaaaaatcaagaaaaagatgtattttcgaaaaaataaaatcattggctgtgaaaaagaacattttacttacatttctgacaattcttgtcttattaaatagtacagcgatcggatattacatttatcacgatcaaaaagaacatcaagagaacgaggaaccaccattcttcctcatgaaatcatcagacgtggatttcccgacaacattcagcttggccggcgaacaggtccccctggaaagaatcgatgtggcagaagctttcaaaaaggaattaatcgtgaatacctacttgcattcacacacgatccaagttttgaaaaatgctccccgctattttcatattatcgaacccatcctaaaagcggaaggagttccgaatgatttcaaatacctggctgtcatcgaaagtagcttgaatccgctggccgtatcttacgccggagccgcaggaatatggcaactcatgagcgcaactgccaaagaactgggattagaagtgacaaacgacgtggatgaacgctaccacgtggaaaaagctacccgtgccgcttgcacttatttgaaaaaagcctaccagaaattcggttcctggacactggccgcagcctcctacaatggaggtatgaatatgctcaccaaacaaatgaaccggcaaaaagaaaaaaacttttacgacctcctgctaaacgaggaaaccggaagatacgtgtatcgtatgctagccttaaagcaaatcatggaagaacctcacttgtatgatttctacgtggaccatttgtatcccgtggagccgacctctcagatcaaggtaactaaaaacataaaagacttggcagatttcgcgcaagagcatggaatatcctataaaacgttgaaacgcttcaatccctggttacggcaaacctcgttgaaagtcgggaaacacaaaacatattatattgccattcccgaaaacaagcaggcatacaagtaaaaatattcggcacgctatttgtacctccctgcctatattgaatgtaaaaaattcccaacatggaaaagaataaaataaccgtcttttgtgaaaacaacggacaagaatatcagatacccacgggatctagtttaaaagaattcaagaaaatcgtgttccccatgaaccaccagaacattctgggggcattagtcaataacgaagtacaagatctgcactacgaaatatacaaccccaaatacgtgaacttcattgacgttaccacgctggacggatacagcgtgtatctgcgttctcttattttcgtgctttacaaggcgattcgcgatctctacccgaaaaaaacactcatcgtggaatacaatctttccaacggattattctgtcgtttggccaacaaagaattcattcttagcggagagagaatcgaagaaataaaaaaagagatgctacggatcatcgatcatgactacgagatcacgcgcacggaaacccccacggaagaagccatcaagcttttcaaccgacagggtttgaaagataaagagttgttgctttctacccgcggcaagatgttcacctcggtttattccatcgacggcacgtgtgactatttctatggtacgttagccccttctaccggatgtttaaaagtgttcgacctgaaggattacaaggacggaatgttactgatgttaccggatcgggacaacccgacccaaatacttccatttgtcccccaagagaaactgttcagcacgtttagcgaatttaaacgctggggaaaaatttcagaggtcatacaaatcggacatctgaatcaagccatagagcacaagcatgccggggacatgatcaaagtaagcgaagctttacatgagaaaaaaatttcccaaattgcagaccagataaaaaaacagaaaaaagtaaaggttgtcctcattgccggtccttcttcttccgggaaaaccacgttcgggaaacgattggcaattcagttgttggtgaacggtattaagcccgtgaacttatcactggataactatttcgtaaaccgggaaaatacccctagggacgcgaagggcgagtatgacttcgagacgattgatgcattagacattaacacgttcaatgacaatatcatgagattattacgaggggaagaggttgaaattccgaaattctccttcgagaccggacaacgtttctacgacggggaaacactaaagatgtccaaaaacaacgtgattatcgttgaaggaatccacgggttgaatcccaaactaaccgaatacctgccccacgaaagtctgtttaaaatatttatctcggcattgaccgtaatctctattgacaatcataacatcatcaatccttccgacaatcgcttgattcgtcgcatggtcagagatcataaataccgcggctattcggctcttgacacgttaaaaagatgggaaagtgtactgtccggtgaacaaaaacacatcactccttatcaagaagaagcagacgccatgttcaactcggctctcgtttacgaactgggagccttgaaacaacaagctgttccgcttttggaagaagtattggtaaagtacccggaacactccaaggctacacgcttactgaaattcttctcgtacgttcaagccgtgccaacccgggaaattccacccacctccattttgagggagtttttgggaggaagttcatttaaatactaacagcgccttaggtatttaacgtgagttcgaaataacttaaaacaacacaagttgcctgtccttgacaaaattgacatcaatggc

SEQ ID NO: 10706 - DNA, 154520 bp, Unknown
  gut microbiota DNA sequence
cttttaatattgacagtgcagaaggaagtacgctattcaatataatgtttttcatgcaattcagatatagtgggaaatataaacccgattgccccacacttatattcctaattgccccatcaaaaaacaagtagatttacagacctgaaaatgcattttaacccggttctattttatttaaaataaatcgtagtcaaaactacttcttttttgcattcatcatttgtcatgcgatcagatgagagtgttttacagtcgtttctatatgtttcgagcattccgaaaaacgtagcttagagagttgttcaattattctgtccgttactataaaaccccacgttaacgaacacgtaacgaatagatataaagcaatgtattgagcaacagataacaaccagtaaagtccaacaaatcggtttatctctgagtgatcaacgaaaaaggatactgttttctattaattcactacagtattatatttaattctagtttaataaaatcgctcttccactctttcctgacagacaatctaaggcatgacaaacgaaaaaggtaataactggctagccttaatcaagatggttccttttttgcctatcatgataacatcaaaatccgctttatagcgttgaacaatttctgccatcacttgccgacaggccccacacggagtaacattctcatccacttccacaccatgctcacgagcagcaatagcaattgccttaatccccgtcttcggataagcggaacaggcataaaacaatgcagttcgctcggcacacagaccagaaggataagcaacattttcctgattcgtaccgcaaacgacctccccgttattcatcaacacggcagcccccacggcaaaacccgaatacacacaatacgcatttttcgtgacctccaaggccgcacgacacaaatcctcgtatccttccgggtaagattcccggtacaccgtgtaatcaatcttcaattccgctttctccattctattttttttcgtaattttaccgccaatataaaacattatctgaaactatgagcaagatttacattattttatttttaagttttatatgtgttaacatatgtggagcttctacggacagtcgcaaagcgtttatcaaaaaatataaaagtatcgccatcgaagagatggatcgtacgggcattcccgccagtatcaaattggctcaaggaatgctggaatccggatgtggaacttcaaaactggctgttaatgccaacaaccacttcggtattaaatgccacaactggaacggagccagttttaccatggacgatgataaacgaaacgaatgttttcggaaatacagaaatccggaagaatcatgggtagatcacagcgaattcctactctctcgtcctcgctatgcattcctgttcgacctgcccaaaacagattataaaggctgggccaaaggtttgaaaaaagctggatatgcaaccgcctccgattacgcacaaaaactcattaaaatcatcgaggaagaagaattatatcaattcgatcgcccaggcaaaaaaatccatccgatacccaacgaattaaattataaactcagcgaaagtaaaaactaccaaagccgagtggtatatatcaacaagattccttccgtgaaagtaaaagaaggcgacacatttgaaagtatcgctcaatacttcaacatcccgttgaaaaaactattgaaatacaacgataaaaacgaactatcaatccgtacgggaatgcacgtgttcttggcaaagaaaaagaacaaagctcccaagggatacacattccataaaacaaaagccggggacaccatgtacatgatctcccaaatatatggaataaagctcgctaaattgttgcaatataattacatggaaaacggtgaaaaacctcaggtcggagaaatgatctctttaagaggtcccgcccaattatactaaagaagaatgaaatgaaaaaaaataacgagctattcttaaaacagaattcaatattcgggtgcctgattggagcaaccttcatcttcgcatccttgttatttatcttggcaggcaaaggcatcgtggtgaatgcccaattccataatatcattatgatgctgacaattttcgggattttcatgggtgtccgaaaatacagggatgaacaactggctggtgtcatttcttacgggaaagcactgaaaacaggaatatatattctttgtgttgcctcgttatgctatgccgtgtacgtattctttttatactcgttcaacgcggatttactgacggaattcaaaaacgtgacaataaacacgctaaagattaccggacagaactccccactattcaaaatgctcgaagaaaacatggatatatattttgtccccgtcagtattgctttcggagaactattcaatagaatcctcgtaggagcagccttctcgctatttatagccggattggtcagaagaagtaaattaccgtttaacccgcaagaattttaaacatggatatttcagtagtcataccgttatataacgaagaggaatcgttgcctgaactcttagcatggatagggagagtcatggcagcgaacaattttacctacgagattatcatggtagatgacgggagtaacgataaatcgtggaaagtaatcgaacaactgtccacgcaagataaccgtgtacgaggcattaaattccgccgtaattacgggaaatcggcagcgttacattgtggtttcgaggatgcgcaaggagacgtggttattaccatggatgcagacttgcaggatagcccggatgagattccggaactctaccacatgatcatggaagaagattatgatttgatttccggatggaaaaagaaaaggtatgacccgataaccaaaacgctaccaacaaaacttttcaacgctaccgcccgaaagttttccggcataaagttacacgactttaattgcggattgaaggcttataaaaacacggtggtgaagaatatcgaagtgtacggggaaatgcaccgctacatcccgattctagccaaacaagccggatttacccggatcggggaaaaggtggttcatcatcaggcccggaaatacggggttacaaaattcgggcttaaccggtttattaacggttttctcgacttactttccgtaacttttattacccggttcgctaaaaaaccgatgcacttattcggtgcgctgggaacattgttattcattataggattctgtgccgccgcttggattggtgttgaaaagttgatcgccgtggcccacaatttgagggcccctctagtaacgaacaatccttatttctatatcgcactgacttgcatggtcattggttcacaactttttttagccggctttttggcagaattagtttctcgaagtgccagcgatcggaacgtgtacaggatcgagaaaaaaatataaatcacaagatatattctaaattaaaaatgtccacttcaaacgaggtggacatttttaatatgaatacaatctattttcttcttactgttgaacgtttggtaattccaaaccaagacctttcaccttatcaacacgtttcaggattataccaataatcaaagcggcaactcccaagcaagccaacatgacaagaggccacgtataattataggaaacagcagcttgttccggggtgatcacatgattcttcaagtcatttacaacttgaggattcgtgttatccaacactttaccgatcaataacgggaaaagccacaacccgatattttgaatccagaagatcagagcgtaagctgaacctatcactttctgatcaaccaacttcggaacactaggccacaatgaagccggaactaacgagaatgatgcacccagaatcaagattgtcacgtacgcaatcaaaacacctccgattgcactatctttaaacaaaggtaatatgaatgcaaatgtcaaatggcatacaatcaacaaaatagaaccgaacatcaacatggaagcagccttacctttattgtcaaccactttaccaagaatcggcgtgatacctactgccaataacgggaatacggcaaaaatagtctctgccgactgacgcatatagcccatgtagcagaatacaaccaaaccgatgacagagatagttaacaacaaagttttcaacgacttcttgcttgtgaagttaaatgcaaatgctgtagctgcaacgaccaacatgatacaatattggataattgtcaccgtatttcctgcccagaaagagccttcggcgggaggagtgaatgacaagttacattgcaacatattaaccgcatatttttggaacgggaaaatagccgagtaatataatacacaaagtaatgcaaccaaccagaaaccaccactggacaaaattttcccaatatctttgatcttaaagggttcatctttttcttctgcctcacctgtttgtgcatccaatttcttatccatgaagaaataaacgatgaacatgatcaatgcgatcatcaataacaccacaccaaaagcaacagaacgggaaacatcaacctgtccaccaagtttcgcaaagaaaggagagaaaatcatacacgtggcaactcccaaacgcgctaatgccatttcggaacccattgccaaagcgatttcacgtcctttaaaccatttcacgataccgcgagataccgtgataccagccatctccacaccgcagccgaatatcatgaaaccaaccgctgccagtttagcagatgccggcattccctggtaaaacggggagattcccaactcgtcaaaacccggaatgtaattcaaattgttcgtaaaccatgcttccaacccgcttcccttgaaaccttctgcaacagcataccatttaataaccgcaccgattaacattacaccacctgataaaagagccgtgaaacgaacacccattttatcaagaatgataccggcaaaaattaaaaagaatacaaatacattcaagaatgtttcagaaccttgcattgttccaaatgccaacgaatcccaaccacgttccgactgcatcaaatctttaatcggtgataaaatgtccataaatatgtatgaacaaaacatggctaatgccagcaacaataaagcggcccaccgaacggctgcattgtctctaagagtaagcttttctgtcatttgaatttattttttatagaaatgaagaaaataaataatgttttcctataaccacgcacctttacctcttcacatctaagtaaataatttattttgcaacaaaaatagtatttatttttaatagagaatcattgttattctttaaaaatacgggaaatgcttttcaacagcagcatttttctctatctttgtttaatgtcacgtctttcttgaagagtgattttatagctaggggacatccttatagctaattttttacaagagatgattacaaacgattttatttatacatcatggaaaatagagtaactaaactgttcaatataaaatacccgattattcaagggggtatggtatggtgtagcggatggcgcctagcctccgcagtaagtaacaacgggggattaggattactaggtgccggttccatgcacccggaaatgctggtggaacatatccggaaaatgaaagaggccacggagaaaccgtgggggatcaatgttccgttactttatccggaaattgaccgacttatggatattatcatccaagaaggcgttaaaattgtcttcacctctgccggaagcccaaagaaatggacccccttgttaaaatcgcatggcatcaccgtggtacacgtgatcagtagcgcactgtttgcaaaaaaatgcgaagaggcaggagtagatgcggttgttgctgaagggtttgaagccgggggacataacggacgggaagaaacaaccacgctcaccttgattcctaatgtagtggaatcctgctccctacctgttattgccgcagggggaatatcctctggaaaatccgtggtagccgccatgactctcggagcggaaggagtacaaatcggaacccgttttgctgttgccacagaatcttccgctcatccggcattcaaacaacgtgtattcgacacggaagaaggtggtaccatgctggcattgaaaaaactcgctcccactcgcttgattaaaaatgaattcttcaaccaagtaaaagctttagaagacgccggagctgagaccgcccaattaaccgaacttcttggtaaaggacgggctaagaaaggaatcttcgaaggtgacatgacggaaggcgagttagaaatcgggcaaatcgcatccatgttgcacaaagaagaaaccgtatctgaaatcatggaagatattatcgctgatttcaacaaaacgatgagcaaattgagcgatctgaaactatgaaaatgaatttatatttatgataaaatttacacgccacacactagacaatggcttaacaatgatctgtaacacggataccagtactccatttgtatccgtgaacatcctttataaagtaggtgcccgggatgaagatcccaatcgcacgggctttgcccatctttttgaacatttaatgttcgggggatccaaacacatcgcagattacgattatcacgttcagaaagcgggcggggatagtaacgctttcacgaataacgattacacgaattattacatcacgattccggctcccaatatcgaaacggccttgtggctagaatcagaccggatgctggcactcgatttctctcaaaaatcacttgatgttcaacgcaacgtggtcattgaagaattcaaacagcgctacttcaataatccttacggggacatctggttgaaattacgtcctttagcctataaggtacatccgtatcagtggcctactatcgggaaaaacattgaccatatcgcaggagcatccctggaagaagtggaagacttctttcatcgtttctatgccccggataatgctatactaagcatcagcggtaatattaccgacgagaaagcccttgaactcgtgaaaaaatggttcggggacattcctcccgcccgttataagagaaaagcattacccatggaaccgcaacaaaccgaagagcgtcgcctcgtatgcgagcataacaaagttccggctgatgcaatatacaaagtatatcatatgggcgaccgccgatcggataatttctacacgtgcgacacaatctcggacatattatccaacggtcaatcctcccgcttgtacataaacctcattaaaaacgggaaattattctcggaggtagacgcttatatcaccggggacatggatccgggattattcattttctccgggaaactctcggaaggagtagcgatagaagaggcggaagccgccatccaaaacgagattgaccattttatcgaagacccgatttctgaacgggaactccaaaaggtaatcaacaaaactgaagccagaatctcttacagcgagatcaattatcaagggaaatcagccaacttggcgttttttgactatctgggagatgttaacctgattaattcggagagtacccgatacgcagaagtatctcttgattcgataaaacagaccgcacgagaattattctccgcaaaaaattgctctaccttgtggtatcttaaagacaaataatggctacttttatgaatagaaatatagaaccctctattgcagaaatttcccgcccctcattgtgggaacatcaacaaatcacgcttcccaatggtatcgagatcgtgtacctccacgatcctaatcaagaagttttcaagatggacgtggtactcgcagccgggatttataatcaatcccgtccggtcatcgcatcaagtatgattaacatgcttaacgagggaacccgtcagcattcctctgccgaaattgccgagttgtttgattatcatggagcatacgtagattttaattgtggtatacataaagcagaattaagcctaatttcgcttaataaatacgcctcgcaaactattcgtatgctggcagaaatgacacttgaaagtacattcccgcagaaagaactggaaacgtatatccgtaaccggaaacaacagcatctggtgaatatagaaaaaacatcttaccttgctcgaatggagttcatataccgtatgtacgggaaggcacatccttacgctaattgtttcacactggaagatttcgatcaagtgacaccagaattattacttgatttctaccaggaaagagtgcaggcatcacaatgcagaatcatgatctgcgggaatgtcagcgatacggtgttacaagaagtaagccaagccttttcgttgatgagtagtaatccagtaccaccggacaagacttacacaatacaaccgagtgggcccggtaagtatcatatatccaagcccgatgccgtacaaaccagtattcgaatcgggaaaaagggtgtcactttactggacgaagactacacgtatttccaacttttaaatatggttctcggtggttatttcggctcccgcctgatgtcgaatatccgggaagaaaaaggatacacctacggtatcggttcatacaacgttaccatgccgcaagctgcccactggatgattgccacggatgttaacgcggacgcaacagaggccacaataacagaatgtataaaagagattcgccgcctacaagaagaacctatacctgaagaagagttaagccttgtgaaaagttatttcaatggtgaactactgcgggaattggatggcgttttctcccagtccgatgcattgaaacacaagcttaattacggattggataatacattctacctccagactatcgacaagatccgctcctgcacccccaaagacatcatgcgtctggcacaaaaatacttgaacgtggacgatatgtatatcgtgactgccggaaaaaacgctcggtaatcaactcaactctcccccgtataaggggggaggtggagggggcaagaaaatccccatcatatacagcaaaaggtttgtatctttataactattgtaattggaaattaattggaacagtatattcgacactgacaggatttcctctctgcgtccccggtttccaatttggcatcaactgtaaaacacgtatagcctcccgatccaataacggatcaacactcttcgcaattctaaagtttacgggttctccgtttttatttattacaaacgtcacaaacacttttcccgtgatattctttttctgcgcttccaaaggataacgtattcgcttggcaaggaatttcataacattaccatcttctcctataaattgaggcatatcttccaccacttgaaaaatatcttcatttttatcgtctttttcgctataccctactaccacaagctcatccaacacaaccggttccgtcgtcatttttatctgtatttttttagcactcttcacaggaataaattgatttgcttttcccacgtaagaaaagataagcacagttcccggtttcacggtaatagaaaattcccctttatcattcgtcatagttccgattcctgtccccttcataatgacactaaccccgacaagaggcaaatcattggtatcaacaacaattcctttagcaacaatagaatcctgccccataacgcccattacattttcgttcatatgtacaatcgcttgtacattactggataaaatcaacagacctgcaatcggaacgagcaaggcatatttgattaaccccattctggaagttctttttttattcatcatcataatacgtttttttaacggtgacacattaaatttatttacgatttgagctgcagccgaaggattggataaacggagaaggtgatattgataagtctttcggtcaaaaccggagtgaacaacacgcttatccgctaaaaattcaagattacgacgaatctcgcatttcagtaaccacatggcgggattcatccaaaagaatgcacataaaatttcggagaccattacgtccaacgaatgatactgttctgcatgagtccgctcgtgggtgataatttcttgcatgtcatcagaattgtacaacgatggacttacaaatatccacttaaaaaaagaaaacggtgtaatctttcccgataacgtgatcaccgaaacagaacaacaatatgtcctttttcctttatagaccaactgaatgattgacaccatttgaataacaatccgaccgagtaaaagcgttacgattccccaatagcagaaccttaaaacatcccagattcctactgatgccagatgtccttccgggaacacgcttagctccggaagtaaattaggtgcgtattgaacaaccgcttgttgaattgcaattttttgctcttcttcgaatgaaaatgtaactaaaggataaataaatgatgcacctaatatgatccacaaacagaatctccgcatgacgaagaaagtatcttgactaaataatagccgataaaaaagataaaacacgaccagcgcaatatttacctttatcaaataaatgaacgcctcatccataattatacattttattgtttctctatgagcttgatgatctcttcgagatctttcgttgaaatcttttgctccttagcaaagaatgtcaccatctccttgtaagaattttcaaaataattacgtactaccccggacataaactttgttttatattcactttcatccatgacaggaatatactcgtagatatttccatgcttcttactggttaggaatccttttttctccaagtttttcacaatagaagcaaccgtcgtgtaaggcggcttcggttcttccatccgatttaaaaaatcttttatcacgccacttttcacctgccaaatgatcaacattatctcttcttcttgatgtgtcaatttttccatacgaactatttatttacgatattttcgcaaatctacgaaaacttcgtaatattacaaacttttcgtagaaaatatatttataacattttccatccactcacgtatagtattcaaaaaagggaaatatgaaaagaattacattcatctttttgattggaatactgttctatacaacaggtcaagctcagaataaaaaagaaatacgtttcgaaaaagagtttcagaaaacgctggccctggtaaatagagatcaattcaccattaagttctacattgctacccctaccgtacaaacacttttcacgccaccgggagcgggtgctaacattgacattaaccccaaaaactgttacttaagcataaatgattctctggtaacgacacaacttccttattttggcagagctacatggacatccaattcacacttagattcaatttctttcaacacggtattattcagccgcacggtaaaaatttaccaagacggaaaaaagaaagctatcgcctatcaaataaccgttcgctccaaccaagatatttgttatttgaacatagatattcaatatgacggaacctgctatttatattttagcgaccgcaagagggctccaatcagttatgtcgggcaaataacaccacgagataccactatgcaaaaaagatataggccatcaccaaagcagcaatgatacccgcaaaatcagcgatcaagccacaaggtatcgcataacgtgtatttttaattcccacggcaccaaaatacacggctataatgtaaaaagtcgtatccgtggccccttggaaagtagaagccaaccgtccggcaaaggaatccgccccaaacgtgttcatagtatcaatcataaggccccgagccccacttccactaagcggtttcatcaatgctgtcggtaatgccggtataaaatcagcatctaatccacaagccaaacataaacgttccaatccactcatcaacatatccatcgcccctgcagcacgaaataccccgacagcaacaagaatagccactaaataaggaatgatttttactgcaatggaaaaaccctcttttgcgccatcaataaacgcatcgtacacatttattttacgccaagcccccatcgcaatgaaagcagtaataatcgaaaaaagaataacgttactagctaccgtggaaatcgttgtaatcgtttccttgtccaacccggaaaaataccagattaaaccacccacggccaaggttccccctatcaaataagccataacgacccggttaaacaggttcaatcgctggtacactgccaccgcaattagacccgctaacgtggacacgtaagtagccaacaatatcggaataaatatatctgccggattcgccgctcccatctgtgcccggtacaccatgaccgaaaccgggataatcgtcaggccggaagtattcaacaccaaaaacatgatctgtgcgttggaagcccgctctttatgagggtttacctcctgcatttgttgcatcgctttcagtcccacgggagtggcagcattatccaacccgagcatattcgccgcaatattcatcatgatcgaaccgtatgccggactatctggtggcaattccgggaacaacttccgaaaaaaaggactgatcaaccatgacattactttcacggcccctccccgttctccaattttcatgattcccatccataaggtcaatactcccgttaaacctagcgagatttcaaaccccgtttttgacatatcaaaggtggccttcacgatggcagaaaaaacttctgtatcacccatgaagatcaatttacaaagtgccacgataaatgccgcaccaaaaaagaaaatccagatataattgagaaccataaaatcaattgaaaacgaaaaattgaaaattgaaagttgaaaagaaatactcacctttcattttcaattttcaattctcaactttcaattatttaatgctttgctttacacgcttttatcgtgttttgcaataaagtcacgatagtcatcggtcccacaccaccgggaaccggagtaatatatgaacatttaggagccacgtgatcataatccacgtcaccaactaatttccagccattctttgccgtttccgaaggaatacggtgaatcccaacatccacgacaacagccccttctttcaccatatcttctttcagaaaatgcggaacaccaatcgccacaatcaaaatatccgcttgcagagtaatatctttcaaattcgctgttctactatggcataatgtaacggtacaattagcattcttggctttccgggacattaacaccgccattggggttcccacgatattacttcttccgacaacaacacaatgtttaccttctgttgggatattataacgggtcagcaattccactatacccgccggggtagctggtaaataggtcggtaatcctaacaccattcgtcccacattacaaggatggaaaccatccacatccttatccggatgaatacggttcaaaactttctcttcggaaatatgtttcgggagaggtaactgcacaataaacccatctacatcggggtcctcgttcaacttatcaatgactgccaacaattgctcttcagtgatgtcatcaccataacgcaattctgaacttttcatccctaccgcctgacaggctttcactttactagcaacgtatgtttcgctagccccgtcatttcctacaagcacagcaaccaaatgcggaatctttttcccttctgtcacgaaagcagcgatttcatctgcaagttcttgctttacctgtgctgaaatttttttaccgtcaataatttccatctaatcaattttaaattttagatttcaaattttaaatttcacataaacattcacgtaaaatctaaaattataattttatctatttgattttaaatcttaaacctcaaattaaaacccgataaaaggattaaatccaaaatttaaaatttaaaatctaaaatctttagcgtctcttcatcggggctttccccatcattttgccgcctttggataacattcgcatcatctttttagattcatcgaactgtttcaacaaacggtttacatcctgaatagtcgtgccgctaccggatgcaatacgtttacggcgtgaaccattgattagttccggattctcccgctcttccggagtcatcgagtaaatgatagcctcaactcctttaaacgcatcatcatcaatatccacatctttcaatgctttacccacacccggaatcatagaggccagatctttaatgttacccatcttcttgatctgctgaatctgactcaagaagtcgttaaaattaaactgatttttggcgatctttttctgcaacttcttcgcctcttccgcatcaaattgctcctgagctttttcaaccaaagaaacaatatcacccatacccaagatacggtcagccatacgttcgggatggaacacatcaagagcctccagtttttcacccgtaccgacaaatttaatcggcttacttaccacggtacgaatagacaatgccgctccaccacgagtatcaccatccagcttggtcaggatcacaccatcaaagttcaaacgatcgttaaattccttcgccgtgttcacggcatcctgtccggtcatggcatccaccacgaaaagggtctcttccggatcgattgctttcttgatggcagcaatttcattcatcatctgctcgtcaatagccaaacgccccgcagtatcgacaattacgacgtctttacctgtagcccgggcctctttcacggcattcaaggcaattttcaccggatcgttatttccttcctcgctatacacgggaaccccgatttgctctcccagcacttttaactgctcgatagctgccggacgataaacgtcacaagctactaacaatggatgttttccccgctttgtcttcagcaaattagccagtttaccggaaaatgttgttttaccggaaccttgcagacccgacatcaagataacagccggattaccttttatattaatatcaacatgggtccctcccatcaactggatcaattcatcgtgaacaattttcaccatcatctgacccggtttcacggcagtcagcacgttcattcccaatgccttttcctttaccgtgttagtaaactcttttgcgatcttatagtttacgtcggcatccaacaatgaacgtctcacctctttaagcgtttctgccacgttgatctcggtgatctttccctgtccttttaaaatcttaaacgatttttctaacctctccgatagattctcaaacataatttatcaattgaaattcgaaaattgaaaatcaaaatgcactcacatctaatcctcaaaattcgctattataactcttaattaattcattccccgcaaaattaataattttacccgaaaacatacattttcacttttcaattttgcgacactcttctttttaactatttccgactgatattcttcaacaccacaaacgttttgtctattaatgaattatccaccacaacggtaaactcgttggtggaagaaataacctccgtcaagttgattccctcccaagataactccttcattatgcaataataaaaaccgggttgcaatatatttcctttaggaagtttcagcgtaacggacgacaaaccattctttttgaaaatacactgttcctccttaaaatgttcatccaccattccttccatgatttcactcacgacaaggttagtctcaaaaaccccctgtaccatcgtgtagaagacctcgtctcttcgtgcaatggatttcagcacccgaatgtggcaatccatcagagtattcgaatttttaaacgtataatcacacaagttactcctcaggataatatctcccatattattcagtaatttgtttaattgcacctgttctcgcacttgtaaataaggtgccaatcgattcaacgccatcacaattgcacctgcatttaccggctttcccaataatttctccacttctttctgtatctgtcgggccaaagccgagatattgataatccctgctgccaaagattccgacaaataaggcttgtgctttacgattccttccactgcctgggctacacttatcatgttaattgaaaattgaaagttgaaaattgaaaattatttctctctgtattaatataattcgatccactcgtaagcatttcccacgtaatccatgtaacgaatgaaatcctccgtttttatggctaacgaggcgtgattgtcattcgggtggaatgataatcttttcgcttcttgtaaatgtttatccaaaaatacatacacgtggtgttccgtatcattcagcaagccaaaaggactaaccgagccggggcgtaatcccagatatttttccattcgagcttcagaggcaaaacttaatttaccctgtttcagcattttttccatatcatgaatggccatatcatgatcacattgaaggatcaccagataatggcgattccctttgtgattcctgaaaaacaaattcttacaatgcgtactatccagatttttccaatattgtctggcaatctcaatcgtcggtgcagccggatgttccgtatattcaaactctatctccagaactgccaacgtttcatatactttctcctgtcctaccatgtattaattttaaatttaacaattttagatttaaaattccagccccacaaaccaacgcttttgcaatcgtaaatcgtaattaatcctattaacttttagtttttagtctttaacttttagcttttcaacctcccctgccacgtatccaactcttccaagcgtttatccaatttcgccgtgaactcaaaatttttaattccccattgtggagcaattaaatattcggaaggagattggtttacaaaacgctccaaataaacatcggaacgaattcgttcgatcacctccacgacaaaatccaaatattcatccaacgtgtaaagatgaaagagtgccggattttccagatactgttctgccagacgagtccctttcacgatttgcaactggtgaagtttcaatacttgaatcggcaattcacacaaacgaatagccccctccaacatagattcacgactttctcccggtagcccgaaaatcaaatgcgcaccaatcgttattccatgttccgctgttgcccggatagtctgttccgcaacggcaaaatcatgcccccggttaatctgacgtaaaatagtatcattcgcagactccaccccgtattccacgcaaacataatatcgttgagccaactcttccagataatccagaatttcctcactcacgacatccggtcgcgtcccgattaccaatcccgaaatcatcggatgtgccaaagcttcctcgtaacgcaacttcaacacatctaacgatgcatacgtgttcgaatacgcctgaaaataagccaaatatttttgtcccttatacttccgggcaaagaaacgaataccttcatcaatctgttccgtaattccccgcaccgctcgacaataatcgggattaaaactctcgttattacagaacgaacatccgcccacacccttacttccatcccggttaggacaagtaaatcctccatctatcgacaacttttgtaccctttcctggaaaagagtcttaaaaaaagtcggataatcattatatcgttttttaccgggttcaaatttcatctcgaacaaaatattaacaggtcgcaaaaataaatatttatctgtttagaatttaacaaagctcactaattttttattagcgccctcatttttatcggaaagtgacctatttcatacgtttgcgtagattttaactattttttcttatttatatattcaagaaaaaaaattatctttgcatcccaagatgaaaattttgagaaaagaatgatctataaacaatctctcctgaatgtcaggagataaacgcaaaaatctaacagaatatgagtacgaagtacgtttacacctttggcgacggaaaagcagaaggaaaagcagacatgagaaatctgctgggtggcaaaggcgccaatcttgccgaaatgaatctcattggagttcctgttcctgcaggttttactattacaacagaagtttgtaccctttataatcaagaaggaaaagacgctgtcgtaaaactaatcgagaatgacgttaaagccggcattgcagctacagaaaaattaatgaatgccaaattcggatcaaaaggagaggctttccctcttttagtttccgtacgttccggtgccagagtgtccatgccgggtatgatggataccgtgttaaacttgggaatgaatgatgatgccgttaaaatcgtggcagaaaaatcaggtaacgccagatttgcatgggattcataccgtcgtttcgtacaaatgtatggagatgtcgtgatgggcgttgcagccggaaaaggcgaacacaacccgttcgaagttgaaatcgacaaattaaaagcagaaaaaaatatttctaacgacaccgaattctcggctgaagacttacaagaacttgttcgtcgtttcaaaattgtcgttaaaaccaaaaccggtaaagatttcccgacctgcccgtgggagcaattatggggagccatctgcgccgtgttcgattcatggatgacggaacgcgctgttctgtaccgtcagttgaatcaaatcccggaagaatggggaaccgcagtgaatgttcaagccatggtatacggaaacatgggtaacaattccgctaccggagttgctttcacgcgtgatgctgctaccggagaagatatcttcaacggagagtacttgatcaacgcacaaggagaggacgttgttgccggaatccgcaccccgcaggaaattaccatcgagggatctcgccgctgggctaaaatgcagaacatttcagaagaagagcgtgccgctaaatatccttcattggaagaatccatgccaaccgcttacgcagaattaaatgctgttcaacaaaaattggaagattatttccacgatatgcaagaccttgaatttaccatccaagacggtaaattatggatgttgcaaacccgtaacggaaaacgtaccggtacggctatggtaaaaatggctgttgacatgcttgaacaaggtatgatcaatgaagaaactgcaattcttcgccttgaagcagctaaactggatgaattacttcacccggtattcgacaaagaatcacaatccaaagcaaaagtattaaccaaaggtttaccggcatctccgggtgctgcttgcggacgtgttgtattctttgctgacgaagctgaagaatggaaaaacagaggagagcaagtaatattagttcgtttggaaacttctcctgaagatttacgcggcatgaacgtttcagaaggaatccttaccgctcgcgggggtatgacctctcacgcagctgttgttgcccgcggtatgggtaaatgctgtgtttccggagccggagaaatcgttgttgattaccacaaacgtacctttaccgtgaaaggcgttaccatcaatgaaggcgactggatttctttgaatggttctaccggagaagtttacttgggtaaagtagccactaccgaggcgtcactggatcatgacttcaaaaccatcatggatttggccgaaaaacacactcgtatgtacgtgagaacgaatgcagacacgcctcgcgatgcaaaagtagcacgtgatttcggagccaagggtgttggcctttgtcgtacggagcatatgttcttcgaaggagaccgtattgacgctatgcgtgaaatgatcctatctgatactgttgaacaacgtcgtatcgctttatcaaaaattcttccgatgcaaagaagtgacttcgagggaatccttgaagctatggacggacttggagttaccatccgtttattagacccgccattgcatgaatttaccccgaacgagccggaatctcaaaaatatatggccgaaaaaatgggtatttcagtagaagttgtcaaagaaaaagtggacgcattacacgaattcaacccgatgttaggtcaccgcggttgccgtttaggtattacttatccggaaatcaccgaaatgcaggctcgtgcaatcattgaagcagcttgtaacttgaaactgaaaggccttaacccgaaaccggaaatcatggttccgttggtgggtaccgtgaaagaattaagacaacaagcaaacatcatccgttgcactgctgacgtggtatttgcagaaaagggcgtgaaagtagattacatggtaggaaccatgatcgaaattccccgtgccgcattaaccgctgaccagattgcagaagttgcagaattcttctcattcggaacgaacgacttaacccagatgactttcggatactctcgtgatgacgctggtaaattcttaccggaatatatcaagaaaggaattttgaaaaccgatccgttcgctgtattggatcaagagggtgtcggacaattagttcaaatgggagcccaaaaaggacgttctactaacagcaagttgaaacttggaatctgtggagaacatggtggagaaccttcttccgtgatcttctgtgacaaagtgggtatggactacgtttcatgttcaccgttccgtgtacccatcgctcgcctggctgccgcacaggccgctatcatgcacgcaaaaaaataaaaacagcatagtttatgaaaaaaaccacttgtgaaaacaagtggtttttttgtccttattcaatccgcacccatttcaccgcatcagccatcaagacctcattatttttcaaaccatcatcatgtagtaccaacttcacatacccctctgtcaattgaaatattccggccgcccccatccaccacgagagttaaaaggagtcgtccacaattctataggctccttacctacataataaataacactttttacccctgcactcaatccattaatattcaacgtaatactctcttccaaaccatcataataaaaagtataacgatgaagcggctgcacccaatcattcaaaaacattcccacgtaaatatacatttcatacgttccactccgtggaattcgagcattccactccacgtccgcctgctttcctccagcacctttacaatggaacccccggacaaattcaccataactatttatatcataattaaagacaggactccaagaggtcggactcaaaaggtgtagttgataaccttcccacttccgggtaaaaaagaaactttttccttttataaccttgaatccttcgtcctcatcatccacgatgatttcattttcagaaggacagaacaatgacgtgtcacaatcaaaacaaccttcatcccatcttgataaattacaggattccattgcattttcgtattcgcccggcaaattctgagacaaattagtatttaaccgtactcttaggaaatcagaacttggctgcatcagataataattcacttccttggcacagcctgcttcaatcaagtaatgttgatctattattttcttccttgcgctctcccacgcctctaaagaaacaatcgcatccactcccgtggggttccacactttaaaatgtacaaatcgtttctctgaattctccgtctgaattctccgcatatgaaaatttcgtacaagtaacttcggcacgccacgttcatgcaaccattgagggatatattccctcaaatcccaattaaaccttgcctgaaacacatccagaaaataatccaaactcacttcctgaaaaggatgttctttcaaaaagtgatccatgaaagccgaaaaatccgtccacgccacttgagtcaaaatataacgttgaagttgcaatgctttcaagtagataacactctccatacaaaaactagcgctatccatatgtaaagcatcccataaactatgctgcataagaaatttcacaccttcccaatgataagataatttgtccgataatgccatttccctctcctcagcctgcctttgcatgatcgttatcatccgatgtataacaggaacctcatcagacgtgatcaacgttccacacgtcatcaaaagtggtcttatgctatatttattatccggccaagcactaaataatttttcactccacatccgatctcgttcctgtttactattaaataatatttctttaacagacaattccgggacatcatgtttttgcaccctactcatgtattcttcagataagatatatttctgaaaccattcctcagacttttcttctttggtctttacttttttcatcctccgccgaaattcagaagggacaacacctctccattccctgtaaagctgcatttccgggtgaacgtaatcattcttctctttccaagaacgctcgaaagcataaaaagaaacaggcacttccacgaaagccaacttatcaaacgggtattttcccccgggactcatccactgaagcacggtagatgtacgctttaaactccattccagagcttgtagatagtccccccaagcgctccctaacatcgatttcttcgttccgtaaaactcgaaaagcaaaggattgcccgcaagtcgaaacgaatctcgataaaactgaccggaaatcaaggtaattccctgtaatttgcggttatttgtgaaatagctcgtatctcctgaaacagttaactcaccttgcgacacaaccgtgttgccttgagcaggcacaaccgtaagcgtgtaatctgtgtattcagaagtattcacataaggattcattaactcggtcacgggtttactcacaggataccataaaacttctggggttaataacgtgaaagcttttcccgtgaaaacaaattttttcccgtaacaagcgaaaagctcatcctgttcctgctcatcgtatcgctccggagatatatccaaatagcaaatctgcggatcaatcgcccccgaataagaaagctccagctcactccgttcatccgggtacagcgatttttcaatctccacaatctgctgatttctagtaaaatttaaatcacaattcccggcagtaacacttgttatttccaaagaaggattcaaataaaaaattacagtatccacccggaatgaattactatttcgaacagatatcacgctatgagctaatattttctcaccatgaatatcatacttgatttcatgctgatcaatctttactttaggatatgcatcgtactttttctgaatagcgatccaatcgctccttgtctctcgcataacttgatgtggtaaccaatataaccaaccagtcagaaatcctaacagcacgaacaccaacccaactacccctaatcttctcgaccgtcctatattattagggagacgtttgaatccatacacggaaatcacgaaacatcctaccccaaccaacacgaacaccaaccgatgcaacaaataactccccatagccggatgtcccaccattgaagaaaatatatgagggacccgggatgccatgcaatcaaatacacccaaggcttttgttgaaaagacaaaaagggaaagaagaaagaatatcaccagtaccgtaaaagcaaaaaaacggaattttatccatattttcatcatgaaagccaaaccggacatgaataataaggccggtaaagaaactgtcaataaatagaaaaggtaaagtccgacattaaatttaaagctactcgcaaataaatgaatgagcatacaaataaacatggaaataacattcaataccaaaaatgcgaccaccaccccaacaagcttccctgtcaaatattccaaattactaaaatcccgtgccagaaacacgtcattcgtcttttcaatattatcccgataaacaaaatctccaactacaaaaatcacaagaaacgactgcatgatcccccaaagataagcattcgcatatggcatcccggaaggcaaattcacagtgtactcaaatacccgccaatcactctggagaaagacatgaaacactgtaattcccaacaacataaatccgcacaacaataaaaaaataaaattacgacaaagtaattttccctcataatgagcaatcaatagaatcagcattccattcataagcataaattttaagtttcattccattctgctttattcattaatattaatatttatattttcatctttataacacaaaaaacaaccttccatactattcaaatctcatttttaatatagcccataaaaacttgtcttttatcagatgaattgtcacccaaagaagatacacctcatcacttgtaacttccccacattaaccctatctttgtatcaaacaaaatacaaaaacgccatgcaacaaaatatagaacatcctgaaaatgatgcctgttacgaaggcttagccgtcaataaaggcatcgaacaaccggatccggtgaatccagctattgcagaaagactaaagcatttaaagaagaaaacactgaccgcagatgaatacgtgaccgggatcttccggggagatatcaatatcttaagtcaagcaatcactcttgtggaaagtgcccgcattgatcatcaggccatggcacaggaggtcattaatcgttgtctgcccaacacgggtaaatccgttcgtatcgggattacgggggttcctggagccgggaaaagcaccttcatcgaagctttcggtaaattccttacaagcgagggacacaagatcgctgtattggccattgatcccagtagtgaacgttcaaaaggaagtatcctgggagacaaaacccgtatggaagaattatcatgtgacccacatgcatacattcgtccttccccatcggcaggctctttaggtggtgtcgctcgcaaaacaagggaagccatgttattatgcgaagccgccggatttgatattatcctaatcgaaaccgtaggagtcggacaaagtgagaccgccgtacattccatggtcgacttcttcttgctagtacagattgccggggctggagacgaattacaaggaattaagcgagggatcatggagatggccgacagtatcatcatcaataaagcagatgggaacaacatcacccgtgcggaactcgccaaagttcagttacaaaatgcccttcatctgtttccacctcacgaatctggcgtagaacccaaagtgatgacctgttctgcctacgagaaaactggaataaaagaaatatgggaaaacatactacattattgtagcgaaacccaacaaagtaaatatttcgacatccgtcgtagcgaacaagctaagtactggatgtacgaaaccatcaacgaacaactgaggaatcgtttctatcaaagccaaaaagaacaaataagagaagcagaagaaaaagtgcaacataacgaagaaagttctttcgccgcagcattccgcttgttagataactatttcaaggaagacacgaaactataatcgtaaagcatattctctccatcatgctattattcaagcagatggagaggtataataactaaacagttttccctcttggacaccttgagatttgtatcccccccaatattaatacactttcaaaaagacaattttaagataagcatcgggatcaaatattcctttttaaaagaattattaaacgaacgtttaataaaaattcattttatccatgctgaacaaatataataactttttaatcacctgtgaattgttgattatcagattcgaaaaaaagaaatgaattatgagaatttgacgaaatttgtttatatttgaatggcattaaacgttggtttaatgatatagaaggatcaatgtagcctaaaaaaattcagagtccgcctctatggttgcaaattgtatgtgaaagaacatgttacattcccatcggcatcgcttaggcgatgtcggggacatgttcaattcttttaaacaaaaatcctgtttacccgcaaaaattcggaatttcagctaacatttgaaattttccacccccggagatctccccgcaaaaatgcaagcacccgttcgttattgcgataaaacgagctgcaatggacaaattatactggaatgcctgatcgaagacagcttgcgataacgccacggaaggagccttacactccacgataaggtaagggaccgcctgcctatcataacataccagatcgaaacgccttttcataccgcatacttgaatctctttctcgacagcaatcaaccgggcgggataacctttactctcgatcaagaaatgaataaaatgctgccttacccactcttccggagtcaacacgacatatcttttccggataatatcgaaaatccagatctgcccgttctgctttttcaccttgtactcgaaaggaggtaagttcaaacttttcacacgctcactttttatcttttcttactttcaacaaactactatcaccataactcaaaaaacgaaaatcgtgagtcaaggcgtaatcatacactttgtgccaatcttccccaatagctgccgctaccaataataataacgtgctctgcggctgatggaaattggtaaacatcgccgtgatcacccggtacgaatagccgggaacaataatgatcgtggtcttcgccttcaacaattcggcatcctgttcatcgaaccaccccaacaaggctgtcatagattctttcaacgagtaaccggaaggcaagtcgtaagcttcccactgccccagcgaactgaaatcctcatcttccaaaattcgtttcacccccatccaatacagactttccaaggtacggacggatgttgttcccacggcaataatattttccgggtgagtacatagatgctccacgacttcccgccgaacggaaatatgttccgtatgcatatcgtgccccccgatagtctcgcttttcacgggacggaatgtccctgcccctacatgcaaggtcagctcctcaatcgttatccctttttcccgtaaagctttcaacacggggatactgaaatgcaaaccggctgtcggggctgccaccgatccctcattcttggaatacaccgtttgatagcgaattttgtcatcctcttccgactctcgattcaaataaggcgggatcgggatacgcccgcaacattccaacacttcactaaaactggccggagcatcccaggtaaattccacgataacatcattctcttcgcgaaatttcagtgtcgcagccaactgatattctttcccctcaaactgataatgacaataaatcgttccttctttccatttcttcaaatttccgaccatacatttccactcgcacttcccgtaagcggcaaagctctgcacgtagtcagagggccggtaaggttccaaacagaaaacctcgatcacggctcccgtgaccttctgaaaaagaatccgggcatagatcaccttcgtgttgttaaacaccaacatcttcccggtatcaagaatttccggcacctcgtaaaaatgcctctcgtcaatcctgccctcgtcataaatcaacaacttcgacgcctcccggttttccaaggggaacttggcaatccgctcgtcgggcagatcatatatataatcctcaatcctaatttcttttagcttctctaccatgtcacgagaattttcgattgctattttttttgtcattcggcaataatatcttacttttaaggctgcaaaagtaatgataaataacgaaaaaaaggaaatgagatattccattctcaaattttccaaccgacatattatgaacatgaaaacaaaaaaagatatcgtggaagattggttgccccggtacaccggacgggccttggaagatttttcaaaacacatcatcctgaccaactttgattactaccttgacttgttcgcggaaaaatacaatgcacccatcatcggggagaataaaaatatgcccaacgtttcgcacgacgggattaccatgattaatttcggaatgggtagtgctaacgccgccaccattttggacttactttctgccatagaaccggaagccgtgttgttcatcgggaaatgtgggggactgaaagccaaacaccacgagggggactacatccttcccattgccgccatcaaaggagagggtacatccaacgactacatgccgaaagaagtcccttccctgccctctttcagcgttcagaaagcctgttcaaaaataattacgaatcatgacaggcaatattacacgggagtggtgtacaccaccaatcgacgagtatgggaattcgacgagaatttcaaagaatatttaatcaaaacacgagcgctagccgtggacatggaaaccgccacgattttcaccgtcgggttcgccaaccgtataccgactggagccttactcttaatatcagacaggcccatgatttccgatggcataaaaacatctgaatcagacaaaatcgtcacgcaaaatttcgtccggcaacatctcgatataggcattgaaaccatgcaatatatcaaggataaaaattattccatgaggcatcttattttttaaatattatgtcgtattttcgttgtcaaattatattgcatatgctgaagggactattttacatctttttagggatcatgctcgcctgctcatgtaacagcaaaagtaaaaaacaaaacgaacaggaagtaaacaccccgaccagcgtgaatgattctaacacgattgccaaaattgaattcccgcaaaaatcattcaactttggcgacctgcaagaaggagaaatcgttacgcacacgtttcgtttcaaaaacacgggaaccaaaagtcttgtcattctcaacgtggaagctagttgtggctgcactacccccaagtatgacaaaaaaccgatcccgccgggaggagaaggaaaaatcgaagttgaatttaactcttcgggcagatatggtaaacaatacaaagtaattaatatctttgcaaacgttccggaaaaagtgattgaactaaaaataatcgcaaatatcaagaataaataaaaaagtaaatttatgaacacaattttcatgttaacattacaacaaactgctacacaaggtaacgctttcatgcaattcttaccccttattcttattgtcgttgtattctggttttttatgatcagaccccagatgaaaagacaaaaagaattgaaaaaataccgggatgaattgaagaaaggcgacaaagtcatgacaaccgggggtatcttcgggaaaattgtcgagatcaacgactttaccgttatcattgaagtagaaagtcaagccagattaaaagtaagcaaggaagccatcgtgaaagacatgacggacgttccggctagcaaataattttagttacaggttacaagttcgccagttacaagttttgtctttcgtaactcgcaacttgtaacctgaaacttgtaacctttccagcatatgcgtggttttatcggtaaaatactcggttattttggtgcatcccatgaactgcacatcaaacgtaacgtggtcacgtacggaatctgcgttatcatcgcaaccgtcttgtggtttttaaacgcactgaacaaagagtacaccacggaaattacttacccgataaaatacacggaacttcccaagggaaaactgctcgtttccgagccgcccaaagaaatgaccctagcgataaaggctcacggtttcgccctattgcgttacagcatcagcacctcttttttaccgatcgtactcaatgtaagttcgttgctagataaaaaagacctgctggaatacacgataaacacgtctgagataaaagaccgcatcagcacccagctgaacacggacatacagctgatatctattaaaccggaaagcatcacgtttaagttctcccggttcgaaagtaaaagagttccggttattccccgggtcgagtacacgttgaaacgacagtacatgctgaaaaacgatatttctgttactcccaatcacgtggccatcagtggaccggtctctattcttgacacgctaaaagcggtgtacacagaacctatttccttaaaaaacctctctaaagaggtaaccaaaaccgtctcgtttgaagaaatttacgggactcaaatcaacgagaacgatgcgaaagtcaaaattgaagtggagcgattcacggaatcgaaaaaaacagtccccctcgttgttaaaaatctaccggactcactcttgatccgtctgtttcctcactcgatagacgtgacatttgacgtgggattaagccgctatgaagtagtatctgataccagtttctctttctacgtggattataaccaaatcaagaccaacccggcatccttgaaaatcgaaatcgagcgatcccctcgtcacataaaagacctggtattcaccccggaaacagttgagtatcttatcgaaaagaaaaaataatcccatgctaaagattggtttgacaggaggcatcggaagcggaaaatccacgatagctaaaattatcgcaacattaggataccccgtgtatattagcgatttcaaagcatccgagctaatcaaccgggatgaagaaatcaaaaaacatttaatcgaactgttcggtaaagatatttaccagcccgacgggaacctggataaaaaacggctagcaggtatcatatttaatgataaagaagctatcaagcaagtaaatggcattgttcatcctgccgtaacacgagatttcatggagtggtgttcggcacaacgacgcccgcttttattcttcgaatcggctattctgtttgaagcaaaactcgaaaacctcttcgattacatcattcttatcacaacagacttggaaacccgcgtggaacgagtgatctcaagagattctactacacgggaaaaagtgattgaacgcgttaacaatcaaatgcccgatgaaataaaacaaacaaaatcggatttcgtaatttataacaacaatgatgacaaagtgataaaacaaatcctttccatcattcatcaactaaacaatattcattcaaaacaagtataatatggcaaaatacggtaaatggataggagcaggtttaggttttgtcatgggaggtcccataggcgccttgttcggttatttcatcggttccacgttcgacaccgcaacagttgtaacatccggcccggggaatgatccgggtactcgtcccacgggaagaggagatttcctgctaagtcttgttgttctagcaacagccttgatgaaagccgatggaaaagtaacccggaatgaattggattacgtgaaaaagttcttccgggacaatttcggtcaggaaggagaacgtgaagccttggcaatcatcaaggatctattaaacaaagacattgaggtggaacaagtttgtacccaaatccgcatgaacatgaacgtctattcccgcactcaactattatatttcctattcggactagccaaggcagacgggatggtatgtaaatacgagatttctctgttggacaaaatagccaatttattgggaatcgattctaccacgtaccagtcaatcaaagccatgtactatgacgatttgaactctgcttacagtattttaggcattagctccaccgctaccgacgaagaagtaaaaaaagcctatcggaaaatggccatcgaaaaccacccggacaaagtagggtacatgggagaagatattcgcaaggctgccgagaagaaattcatggctatcaacgaggcttacgagaaaatcaaaaaacaacggggaatcaattagccggacaagaaggattgaaataaaaaaaataaatatttcattgcttttacttttaaacattgattcgtacttttgcccaccaataacaaaacacaaaaagaaagcaatatgttgaaagaaattttatccatatcaggaaaacccgggttattcaaattaatcaataacaccgcaaatgccttgattgtagaatcattacttgacgggaaacgctttcctgcatattctaatgctaaaattatcgccctcgaagatatttcaatttacacggaagatgaagacatgcctctgaaaacagtgttcaaacgtatgtatgaaaaagaagagggcaaaccggccatcaatcacaaagaatcatccgcagcgatcacgaactatattgaatctgtcatcccggaatatgatgcggatcgcgtttatgtttcagacatgcgaaaaatgatccaatggtataatttattattagacaaaaaccttctgaacttcgacgagccggaagaagaaaagaaagaagagtaagtttataaagtttgaaagtttataaggtttataaactttcaaactttacaaacctattatccagcatggcaaacgactacttccaattcaaacaattcaccattcgacaagaaaaatgtgccatgaaagtcggcacggatggtgtccttcttggatcttgggcagatttaacccatgcacgacgtttgcttgatattggtacaggcacggggcttatggccatcatggctgcacaacgcaatctcgaattaatcattgatgctattgaaattgatccggcggcttttgaacaggctcgggagaatgccaataattccccctggcgagaacgcatccatctttttcaaggcgaagtgcaagcatttacccccacgtacaaatacgacatcattatttgtaacccgcctttcttcattaattcaactaaaaatccggaacttaaccgcaccctagcccggcattgcgaaacattatcacacgaggacatcctccaagttagcgacaatttattattaccgggaggtaaactttgtgtcatactacctgttaacgaagccaaacattttatagaattaacccaaggcaaaaaatggtttgttaacaaattatcaacagtttaccccacacccgacaaggcacctaaacgtcaactcattgaactctcgaaagttaaaaaatacctcgtagaagattcaataattcttgaaatagagagacatacacttcacgagagttacgcaaacttaaccagagatttttacttgaaactttgattcccgaagttttatctcgtcccacatcttcatcaggatttaaatctccttacagaaaagattaacgatctattaactatcgaatatgggaataccccctatctttgcaaagtagaaaacagatagaagacacagttttttttcataagtttgtatgtttaggttagtagttagtaattaaataagagatcgccccatcggtctcttatttttttttattacttttaaccacgcattaggttgcaattatttttgttgtcaaatttatatattattatgcaaacaactgtctcactaggtattgatattggaggaaccaatatcgcattcggcatcattgataaaagcggtaactgtctggcaaatggctctttacccacaactgcatataacacaccacaagattttgtccaagatctgtacaaaacagtgaagaaagaactggacaacttagacgtgcaacttgtcggaatcggggtcggcgctcctaacgggaattacttcaacgggaccatcgaaaacgcggcaaacttatcttggaaagggactatcccaatggtagaacttctgacaaaacaatttaacgttcctgcttttatcacgaatgacgcgaaagcagccgctatcggagaaatggtatacggcggggcaaaaggaatgaaagacttcgtcgtgatcacgctgggaacaggcttgggaagcggcatcgtggtgaacgggaaattagtatacgggcatgacggtcttgcaggtgaagttgggcacacgctggtttgtggtggggatagatactgtaattgcggacgccggggatgcctggaaacttatgcttctgccaccggaataaaacgtactgcctgcgaattactcgccctggaaaatactcccagcacattaagggatattccttacacggaaatctcggctaaaaaagtatatgacgcagcacaaaaaggtgacccaatcgccttggaagccttccgaatcacgggcgagcagttgggaaaagccctggctaacttggtagctattatcagcccggaagcgatattccttcaaggaggggtagcaaatgccggagaatggctttttaaaaccacgcaggaacaaatggaagctaacatgctgtatatatttaaacaaaaaattaaaatacttcgctcgtctcttcccacgaatgccgccatttatggagcatcagcgcttgtatggactgaattaaacaattagatattaataaccatgagaacacgactccttctactcctgctttattttatcggtcttttgacatcttgccagagagaaaaagaaactcgagtaacggattttgttgatccattcatcggtactgccggtcaaggacattgctttcctggggctaccgtcccatttggcggaattcaacttagtccggataatccaagaagtggctgggaatggtgttctggttatcatcatagcgacagtattatatcctcattttcccactcgcatctaagcggaacgggaatcggggacttacaagacatccgcttgctacctgttacgacccgtccgcaaccaggagaaaaagcaatcgatttcatcatgaaagggtatgccaaattctctcatgccaatgaaacggcagaaccgggatattatagcgtgacctttgacaacgggattaaaacagagttaacggtaacctcacgttgcgggatgcacgcctatcaatatccggtgaattcagtgcacgggctgactcttgacttgacaaccgcacgcaactgggaccgaaccgtgatgacctcgatcaagaaaatcaataaccgaaccatacaagggtaccggaaatcaaccggatgggcaaaggaacataacgtttacttcttcatggaattctcccaagatgtagacatctgggcaggaaatgacaccctgaaattattaaagaacgggcagaagcttgttgccaatcaagggtatgcattcattgactttggaacaacgaccaataaggtacttgtaaaagtaagcctttcgtccgcaaactgcgaaggagccgctgcaaatctagataaagaactgtcccattggagtttcgataaagtaaaacgcgaagcaaaacaacaatggaaacgcattctatccaggattaaagcagaaggtgccaacaaagaagaaatgagagttttttacacggcattataccatgcctacttggctccctatctcttttccgacgcacatgggaactacaaaggaccggacggggagattcacagcgtgggtaaagcaaatcaatacaccgtattttcattgtgggacaccttccgtgccacccaccccctgttcacgattacccagaagaccagggtaaatgacatgataaaatcatttatccgtcattacgaggcacacggtttactcccgaactgggaactcatgggtaacgaaagtcactgcatgatcggaaatcacgccattcccatcatcacggaagcttacttgaaaggcattcgggatttcgatgttgaaaaagcctatgaagccatgaaagaaacgtcattatcgcaagggaatgggctgggactcttcagaacctacaattatattccttgtgacttagaaaaagaatctgtttccaagactctcgaatatgcctacgatgactggtgtatggcacaaatggcaaaagccctgaataaagaagacgactacctgtattttatggaatcttctaaaaactataaaaacgtattcgattcctctaccggattcatgcgagccaaactttccgacgggaactggaaaacaccattttctccgtttgcctcggctcacagggatgatgattacaccgaaggaaacgcatggcaatattcgtggttcgtaccacatgatgtggaggggcttatcgcattacacgggggaaaagtcgctttcgctaataaattggacagcctgttcacccttccctcaatcatcgagggggataatgtttccccagacattagcgggttgattggacaatacgcccaaggaaacgaaccatctcaccacgtggcttacctatataattatacggatacaccctacaaaacacagtattacgtggacagaatcagacgggaactctacacggatcgtcccgacggaatttgcggcaatgaagattgcggacagatgtctgcatggtatatcttttcagccatgggcttctatcccgtgaacccaagcgacgggaaatatcaattgggaacacccatgttcaagaaagtaaccatcaaactgggacaagaccgcaaatttgttatcaaggcaaaccgggagaataaccaatatatctacgtgaaggaagtgttactaaatggagagaaactcgatcgtacctggattactcatgacgacatcatgaatggcggagaattggaattcgtgttaacatctaaaattcctcaaaaataaaaggttaaatcaaaaaaatgaaaaatatcggagtaatcctagccggaggttccggacgacggttaggaagcgagttacccaaacaattcatcgtaattgccgggaaaaccgtattggcacacacgcttcacacgttcgaaaaacaaaaacgtattgatgaaatcatcattgtcgtacacaaagattacatcggggaaacggaagaaattgttcgccttgaaggatttcaaaaagtaaaacacattgttccgggaggcaaagaacgatatcactccacccttgccgctttaaacgtgtacaaggaagagaaatgtaatttgatcatccacgacgccgttcgcctgctagtcacgtctcaaatcatagatgacgtcattaaagcacttgaaagccatgaagcctgtaccacggcaatcccttcaaccgacacgatattgcaaagcgatacttctcgccaattcgtgaacagcattcccgaccgttctactctcttccaagttcagacccctcaaggcttccattccgatatcctaacggaagcctataacaaggctttgacagatcccgagttcttcagcacggatgattgcggagttgtcaaacgatacatgccggagatacccattaaaataaccaaaggtttaccatttaatattaaattaacctataaagaagatatttctatcatagaaaagttacttttgccctagcaaaaataatgacgtgcgtaaaacagcggaatgaaaaaaatatcattattaatattgatctccctaccatttttttactcgcagggacaaaaacgaagtgtcgattacaaaacttcacttacaggattcgtggcaaaccagaaaacattacccttttgggccataaataacaaacacggcttaatccccaatggtaatggggctctactggaaataggtcttttctccgatttcaccaatcgccataaaatccaattcgcttatggaatatcagctgcaggatttttatcccgtcccgacaataacgtcattttagaccaactttatgcaagtgcacgctggcggaatcttcgcctagacctcggaatgattcatcccaaggaagaatataacggtatttcctctacgaacggaaatttcatccgttccggaaactcccgaactttcccgggatataatttgaatagtgactacatgaaagtcccctgtaccaaaggaattttatctattaaatttaactgggcagactacatgatgattgacgatcgttacgtggaagatacccgtctacataacaaatccgctttcttaaaaataaagcctcatcaacgctgggaaatcattgtcggccttgaacattgggctcaatgggcaggaacctctcccgatagaggcaaacaaccttcatcattcaaggattatatccggatcatttgtgccaaagaaggaggaaccggggccagtgtaagcgattcgattaacgcattaggaaatcacctgggaagagaacatttggccattaattatttggcagacaactatattttatctttctaccacgacatcccttttgaagatggttcgggtacggattttcgctctttcccggatggaacttattgtttctattatggttccaagaaaaaggatcaatggattacggacgttatttacgaattctattacacgaaatatcaatccggttcccggcacgaccgtcctgcaactccggaagaaatggaaaagcaagacccgaacagtcatttttatggccgaaaaatccttggtggatgtgataactatttcaacaacggcgaatacagaagcggatggaccttatacgagagagtcatcggtagcccattcatgacacccggcctttccggaggtatcacccgaatcatcaacaaccgggtgatagctcaccacatcgggatgaaaggtatggcatggcaaaccactccctacaaactcatgctctcctattccaggaattacggtacttacgggaatcccatgaaaaagaatcaattctccggggcattggaagtaacattgccattcaaaaatttaccgttcgcggtggaaacaggtatctacggtgatctaggagacttgttcaaagataatttcgggttcacgattaaacttagtcgcaagggtaaacttattaaataacgaaaatccaacacaagccattgtcttcattttaccctattttagggaattaaactctcgtaacaatcccgtttgtagggaagttccctttttatttcttcgatcttgtatttttatcccgaaggctcacccccaccgacgggtggttcgagtatacggtgatctgtccccgtaaaacgagcattttgatgaaatttctatctgatgtaactatcatcttgcaagcaaattgttataatagaccaacccgaatattaacatttactattttaatctaatattttactattacaataggagaggaataggaaaagaatgggagcggaatgggagcggcttacaatatgataacagcattatagcgttttgataaccatatttcacattaattcaaactgacttcttattgaaaatccctaaaacggtgaatatagaaacacgagtttaggggtattttaaggtaacaaatgaactacttaacatgaattcgatataaaacacggtaagttatatcgaactttcgtcaaaaacagatttatcctcagaaaaatcttcaagccgaacaaaaagatccccgtaaaagcaaaacatagccaaaaagagtagcatgaataaccgggaatttgcccaggatagggtgacgcatgtattactcacggtaaagaatacaattaacatcgcaaaaatcaaggaagaaaatttctttcttcgaatcatacgataaaccggggccacaaataaaaagaggactaatgccagtccgaatattccccctgtaatccagtattgcaggaaagcattattcacattattatagtttgcaatattcaaatcagaactttcataccatgctttaatccgatgtttcgtgcagacccctaatccccataccgagaattcatccagatggcgaaaactctcccgaataaaagcaacccggggaacaatcgttgcccccctatattcaccactccgaacactttgaatctctgcttcaatctcttgaattctcttctcgtacatggccaaatccgtcaataacgaaaagccacacacgcaaaccaacaatccggcaataagtccataacgcatacgaagagaaaattttcggaacaaacatacatttaaaatcaagaaaccagttagaaagcctaaaatagacgatttggtaacagtgaaagaaagaaataataccagcatcaaaaacataaagccacaaaacaccttcatcttccaccctttcacactaatcactaacaaataggaagctaaagaggctattgcaatgatcattgcttgtatctctaaccagaacttactacctaatacatcccgatttaccccaaaacgcatattataaatccaacttaatgtatctgctggagctgaaaatagttgtgttcccgtcaatgaaaagaatatatatatatttagtaacacacatcccaaacagaaaaaaaacagaaaccgtttcaacaattctggtgtaatccaattcttaaacgttgaaacatacatcggaacaagtataaaattcaacaataaaacctcaaaagtcccgaaactgggaggcgcaatcggctcgtctttcaaaagaacaaccagtgtatgtaaagagaaataaatcaagaaagccacgttaatcctaatataccaccggacacctcgcaaattctgaagcatctctttcccatttatcccaaacaagaccatcataaaagccaacaggacaaaattaaatacattcccgtacaatggcgctaaacttcccaacaagaaagcgacaagcaggaaaaaatattgttgaaatttcactactagattcataacactcatttataacacaaatataaatgatttgccttatactgccatcaagtacataaaatatgttgtaaatgaattttattacagacacattgaactatcacctctttccagttgccagaaaacatcaccataaaaataaaacatacctaacaaaaataaaatcattaatcttgaattatttaatgctaacaaaatacatgtattattcatcacaaacatcacaacaagtaaagcacatattaaccaagaaattctccgggttctaaacatacgataaaaaggagcgcaaaaaagaaatactatcattgccaagcccaaaattccaccttgaatccaataatgtataaatgaattatgcacattggtaaatgcccctaatccatcttccgaagactgaagccagttatttactctatgtttagcatatatacctaatccccagacaccgaattcatcaacatgcataaaactttctcggatcaaaccgatacgaggggctatcgttcctccttcatatatcccccgttttacattttcaatttctctcacgacctcctctgctcgctcttcatattttccctttaaaccatcaaacacgaaaattccaaatacaggtactaacaacacaattccgataagtattgccgaacgcacccggaacgaactatgtttaaagagataaaagttcatgatcccgaaacctaaaataaaagctaaaataccagctttagttactgtaaacgacaaaaaaatcgtaagcaataaaaacattactcctaaaagaacttttacccctttgtacctacaagtaaaaatcaagaagtaagaaattaatgcggtcaaggctatataaagtgtttggggttccagatacaaattaccccctaaaaaacccagcttatttccacccaaacgatttgtatacaaaaaattaatcgcacatgaagtatctgtaaataaactaatcccgacaagatcaaaaatgacatacatatttaatagcaaacatccagtacaaaacaagaaaagaaaacatataagtaaacggggagtcaaccattcttttaaagaaacaacatatatcggaacaagtataaaattcaacaataaaacctcaaaagtcccaaaactaggaggagttatcgcctcttctttcaaaagaacaaccagtgtatgtaaagagaaataaatcaaaaaagccacgttaatcccaatatatccccgagcatgtcgcaaattctgcaacatctctttcctgtttataccaaacaagaccatcataaaaaccaacaggacaaaattaaatacattcccgtacaatggcgctaaacttcccaacaagaaagcgacaagctggaaaaaatattgttgaaatttcactactagattcataacactcatttacaccataaattgctgatatttccacttacacaaccaaggagcccctatataatcataattcaaggtacaccaatacgtcaactcatcacgaaaaacaaatgcatctatcagaacgatcttccttgttgggtatcatttctatctttctttctattcattaataactccacgttcctataaataatttccggagtaatattctttatataatcagcctcattgatcaggttgttttcaatcttcaagaatacacccgtttggctcctcgggagaatcgtggacgtggggctggttgacaatcccaagagcgcaataaatgcagtttttactgccgccgcaatatgcatggctgccgaatctatcgttatcaatatatccatattcgcaatactcgtcaccaattcccccacagaagtttttccagacaagtctaacacattatcaatcatagcttgtcgcacataagaagactgcacaacagcatcatttgaatcaccaatgaatactaaattataattccgcaacattctcaacagtacaatagcctgttcctccggataacgtcgaaaccttttatttgttccacctagatacaaacctatgacaggattattattcgcaaaatggaaattacattcttgtttataatacaatttcaaggtaggtaaacaagtgaacttatttcccaaccattcattaacaagcattgcatatcgattaatatagtgaacattacgattcaacggacgtttaaaattcaatagaaaccctctcccctcattttcataaccaacaagtcgtttcaccaatgcaagcctcaataacaatgccgtcataaacgtattggtaaacaaaatacccaaatcatacctgtttctcaatataacaaaaatatttctgaaataattcttcttcctcttattcgaaacaattatgtaagaaattctaggatcatactcgaacaattctttcaagaaagaaggtcccaacaaggtaattcgtgcttgaggaaaaacttgcctgattaattcaattgctggaattgtattgattgaatccccgataaaattaggcatacagataataatcctcttcatcttgatttataataaatgttcatttaatcatataaaataacgaatttcatcacgatctcatacaacaagactaaatagctaatgttcaatcagctacgaactacaaaaaagatagagaaaaagattgtgttagccgaaaatgatgtatatttgcatatcaataaacgaacatttattgatagcatatagacattcattaagtgctatgtatcagctaattatttttcaattaacctgtttctaaaaatcacacatgaaaaattatacgatcggtttttatctcgaaaaattatactattctcctcaatttgaacccgttattaaagaaatcatcaaacgcaacatatcgtatgtggtaattattcccaaaaaccgggaacgagacgagttaaatcaacgtggagaatccatcaaacactgccaagaagaaggtttcgtatattgtttcgaagaagacgactgtgaatgtaatatcatgatttttggaaacacgccacgccctattcatacccctttcaagaaatcagctcttatcatgcatggagtatggggagggaaaatggttaattatgcatcgggcctgaatgatgtagatctacgctttttagatggagaattcctggaaaacagtttaactaaactctttcctgaaaagaaatccatttattatgtatccggatattcaaaactggatagttatttcgaattcacagaagaagaccgggtgaaattccttcaacattgtaatttagatataaacaagaaaacgatattgtatgcaccaactttctatccgtcatcaattctgaaaatgagtaagaaattcccggaagatcttgccgattacaatattatcctaaagccacactcgcacctgttcttacggaaaaaatacacgaaagacctgcacagactggaatcgtggacgaaatacccgaacgtttatctagctaaattcgacgaaaccaacattctccctttccttcatgcctccgatctgatgatctcggatatgtcaagtgccgtatttgaattttcgggagtcggtaagccggcaattgtcaatatgtttctaagataccgtttacttcatcgtatattccctcataaaataaccaaacgattagacacgaccaacttttttctctgggaagtaggagacaccccgagaaactatgccgaaatgttacaaaatgccaaggagaaccttacgaatccagataagaacaaggaaaaacgagaaaaattcagccgacatgtagtgggtattgttgacggcaaagtgtccgaaagaattgtagataaactactggagcttaacaataatatccaagcataatactcgtcaagctttcgtcagtatcgtatacctattacgaatcgttttggcccggtttataatctgatcgatctccccattcgagaaagttatattccgttctatctcgtccaatattttcatgcgttcgaaaaagatcatcaacttctcgtaatcattttccggcttacggaaatcccgttccactaacaaatgtccccaagccacttgcaaaccgtgcaaagttgaacgattgggaaacaaatcatcaatggcatgactaatcatatgttccgcaccactggccggtcgtgaactattggcaagcaccatggccaatcccgaaatcactagaccgtttgcgaggtcgccaatgaaacgagaagaccgaatatcattaaaagtgtacggaatcacggaattaccactcaatgaagccaaagccatggcaaaattattaatactttctcctttgtcaatatgtgccagataccaatctttcaccgcactagcattggacacgagatcccctactcctgccaagagtaacttctcgggagaaccttttataatatttacatccgcaataatacccaaaggagcctttactccaaagctctgttttttaccatctttcaatagacgggcaataggggaataaattgcatcattagataacgtcgagggaacggttatataagttaagtccaaggtatttgccattaacttaacagcatcaataatactacctcctccaaaagcaactaaaaggacttccttattcgtgatcgtattcataacctccagagcctcatcgtaagaacctcctttgataaaaagtatatcctcgaaagacaatttatccaatctggatttgtacaaatccctcaattccatggaagtaaccaatattttctccttgaaataaagatgattttccttcaatatatcatccagatgaacaaaaatatcttccccgacttctaaaacgataggaacattgatcgtcttgtaatacattattttgatgcttttattttttcgactagctctgacgtactgattcccttcgtgtaaggcaaataaaccatagaaacatggtgttcttccaaaaattccggagtgacacgaatctgtttcaagtacccttctccatcccaatcatcaccatgcacgatgatgtcaatatcgtattttttaatgtattccttattatcatacccgtgaataataaaggcatcatccacataacgacaagctttcacgacttctagacgatcttgttcagacaaaaacggtcggcgtttatacgaggccaccatttcatccccgttaattgccacgattaaacgatcacctaattctttggcacgtctcaataattcgacatgtccaaaatggaaaaggtcaaaaacccctataacatatacatttttcatactacctaatttgcttgatcacatccggcctccctgtattctcttaccacaaccggaatcacgatgccaaaggtagtaaatatagtttaaagttcagagtttaaatatcaaagtttagcttttcgaataaaagcctcatccatcattggttgcaggcgttcccacacgtatcccacggaaagtagatcaaataactctttttccgttcttccctcgattacctgcccggggaacatatcaaaaggactaacgctctgataacgcgagtcattggaaggcagccatctaggcagttcaacccaaggcgggtaaatagctaatcccggtaagtgacacgcctgcgcgatatgccggggtccaccttcatttccaaaaaagaaatcggctatttccagcatggagaccaatttccgtaacgaatcggcctcgatatcaataaaaatatgctcgtctttccccatatcctcgtacaatgccaaggctgcctccttctctatccgggaataattaaaaatcaactgggcaccataacgctgaatgatacgagacaatatctccttcattttcgccatatcccaagctttccccgccactctagtaaaaggagtacataccacgataaagcgggaaaaattaattcccttttgttccatgtagctcttgaattctgccgtttcctgttcggtcacgtacaaccggaaatcagtggtcattatcaacttcctttctcgctccaaaggccgtaacaataacaaatttcgcacaacctcatccaaatcgtcattcacgtggttacgtacccgataattatgaaaaaaatgattataaaatttagatgttccgatacgatatttcgttcttaaagaaaaggcactgaaccataaagtttttatcgtggcacgagtatcgatgatcacgtcatagcgttccgttttcatcaactgccgaacttttcgcaagtatttaaagaagtgattattttcttcatccgaaaaggtgataatcttatctatatccggatgattttcaaacaaaggagcaatatgatcattcaacacgtaatgaatctccgcctccggaaaactttttcgaatagagctacagatcacgaccgacagtaccgcatctcctattctcctaaagcgaatcaccaatactttttttacactcataatccttgcccttttctatataatacgggattcaattccggatcgttatacatcttcatctgtttatagaccttcatgtatttacgcccagtttctatatcttccaaaagctgattgattgcgagtattaaatcccttctctgttccaacaagacgcttaatttatcatcacactcctttacatgtacttgggcaacctctctacgctgcacctcctgctccatatgataaattttcagacataagatagacaaacggtctatcgcccatgccgggctttccgtgttcacggtggcacaagataaaattttcacgttcttatatttatcccagaaatatccatccaacaattcgaccaaatccgtccgacgttgattcaaccgatctatacgtcgtttgacttccaacgctttctcaggttctatatccggatctcgaatgacatcctccaaatgccactggacggcatctacccaatttttaagaaataaataatattcgattgatttatactcgtatgaattaaccatttctgcatcaacacaatcttccacgtgatagcacaaggtactctcctcaaaaattcgatagcataactctgcaaatgacataatacccgtttttcaatccaattattattacaaaaatagcaaaaagtattccaattataacccttcccggtacaaatcccttgaagaccctatcaatcccaaaagttaaaacaactttatttccgccataaagctttatttcgggatattcctattcgaaaaagttatattttttatctttgttccaaaataaatcggcagtttatgaaaaggtatttattctttgtttcgttatcatacgcttatcctattttaagacccatccaatcagagatttggcgacgaggagatgatgtcgcctggttctttacctccccttgtgatcaatatttacaagaaggggaaaaacaattaaaaacaatcaaagaagtcatagaatataatccgattgctgtctttgccccgggtaacaaggtacatgacttctttcccggagttaaggtccaagtttttcatggtttctcgatagacaaacgtcccggaagaggcgatcatttccgcatccggggattattcgatatattctgcacgcaaggaagtacttccactcctcattttctagaacttgaaaaacaatatcggcatttcaaggtatatgaaaccggttggagtaaaaccgatctgtttttcccgctcgtcccgaaagaaaaaaatccggtaccaactattctatatgcctcaacgtttactcccggcataacttctaccccccatttatacgacgaaatagcacgactagccaaagaaaaaaactggcaatggttaattaccttccatccgaaaatgtctccggaaatcgtggaaaaatacaagaagctggccaatgcattagataatgtcagtttctacgagggagataataacgtggaacttctgcaaaaagcggatgtcctgctatgtgatagctcatccatcattatcgaattcctgttctttgacaaacctgttgtaacttacaaaaacacgtctccggggaattatcttattgatgtagattcccccaagttgattgaacctgctatcgaaaaagccctaacatatcccaaagaactaatggataatattcgaaaatacatcgatagccatcaaccttatagagatgggcgctgttcagcccgcattctcgatgccgtggatgactttatcgccaagtataagggaaaaattaaaagaaaaccgctcaatctttttcgaaaattacagacccgttggcaagtaaagtattttcctttcggaccccgctacacggcctccaaatgaacgattttaagcatacaaattattatataacaaatagatacacaactatttcgtcttcaaattctcatcataaatagaggaaagtttttatctttgcaaagataaaaacaccaataatcactattatctccaaaagatagaaaacagaaaattgataaaattaataaatgatcaatttatgatgggaaagaaaattgcataccttgaccgcaatgaatacaactacggtcccgccccggaaattgaaaaagttttaagaaactttgatccggacaaattatgtttctacacaagaatttacgacgaaggcaaaaagagtattctatccgattacatcgccgaactatatgatattccggaaaaacaagttattttaggatatggtggagaagatatcttaaaacaagtcgttcactacttcctatccggtgaccaaaaacaaaaaacactattaatccctaaattttcatggtggtactacaaatccattgcggacgaggttaacgggcgcactatcttctacccgctattcgaggaggggaacacgttcaaatatgatattcagagcatccgagaaacggtagaacgggaaaacccggaaatcgtgttaatcgcctccccgaacaatccgaccggaaattccttgtcaaaagaagagttacacgaaattctctcctttattccccgggaaacagccattgtcattgacgaggcttacgcgtcttttagcaataaagacacgtcatacataaaaccactcattgaagagtttccgaatttactgatcatccggaccctctccaagttctacggacttcccggattacgtctcggctttgcctttatcggggaaaatttatcctcgttcctgaattacagcacgaaatatttaggttataaccgactttccgaagaaatcggtattgccgtattgaaagcaaacgattattaccaaaacgtggcagacctcatggcagaagaccgaaaaacatatatgctggaaatcagcgccctagaaggattcaaagtgtatcactcagaagcaaactttattctggtgaaatacccgatttcattaaaatcccaattacaggacgcattcaaagcgaaagacctaattatcaaattcatgaacgaggaaaatattaacacgcatatacgaatcacgttgggaactcaaaaacaaaaccgtttggtgatagataccatcaaagaagtcgtgtcaaccccatcctaacccggtaaggtgtatgaaagctataatccttgccgcaggcattgcctcccggttacgaccgctcacaaacgatcggccgaaatgcctgctaaaaataggcgatcgttctttgttggaaagaacgattgatgccttattggaaaataatatccgtgaaattattatcgttaccggatacttgcatgaaatgttggaatccttcgtgcaaactcgctatccttctttaagcgtcaaattcatccacaatgaactttacgccaccaccaataacatatattccttgtggctggcattacccgaagttcaacaggaaaaagaaattattctacttgacagcgacattttatttgatccgctcatgataaaaatattacgggatgcccctcatgctaactgcctagcactggacagtcataaactcggggaggaagagatcaaagtcatcgtaaacgggaaaaatcaaatcacggaactcagcaaaacgtgttccatagaaaaggccattggtgaatccattggcattgaaaaaatatctcatacctatctccttgccctacacgaagaactggaacacatgatcctacacgaaaaactggataatgttttttatgaattagccttcgaacgcttgattgcacgaggacaatatttctatccggtggacacgagcgcctatttctccatggagcttgacactcccgaagattttcacgatgccatcaatcgaatccccaaacacctacaagcatgaaaattgtacttttttgcgaacaaaaatacgcgataaatattttacaacctctcgaagtcgaggccaataaagaaggggaacattccgtgatatggtatgttcaacctaaaaatatcccggactttccgttaaaagacgaggtgaaatggacaaacagcatacaggaaatctacgatttttccccggatgtcctattcgttccctgcaacattgttccctactatttaccgggagtgaaaatacaaatctttcacggctacgctgccgagaaaaaggatcattgggtaatccgccgttattttgacacctattttacccaaggcccattcttcacggaaggctttaaagcacttgccaaaaaatacaaggattttgaagttgtagaaacaggatggcctcgccaagactggatttatgaaaatctccacacttttgacgctgaaaaaaacgcactactccgaaagcaccagaaaagcaaattggccttgtatgccccaaccttttctccatcgttaacttccctgccattcataaaagagggactggaaaaattagcccgggaaaaagatgtcttactcatcctgaaatttcacccgttaacccggagtgaatggatggaagaatacaggcaattggccgaggaacatgaaaatatgctttgggtagaggatcacaatatcacgaaataccagatcatggctgatgtcatgattagcgacacctcttcgaccgtgtacgaattcctgctactcgacaaaccagtcatcacgtacaagaccattgccaaagatatttactggctggatattcaacatccggaagatcttcccgacgccttcgatctcgtacttcaagataccgtactcgcctcaaaacgcaaatggatcatcgacaactacgacccctatctggacgggaaagtttgccaccgtatgcttgacgccgccagagactatatctcccgccacggagtacccaagaaacgaaaattaaatctttggcgtaaatacaccagtatcaagaaattcggtaaagtcaaaagaagataaactaactcttctttttggcttttcgtttgagaacctgttcgtcatgggcatgagtccactctttcagtaaacaggtcatttccatcgcatccgaatgtgtcaatcgggcatattcgtccgcgataatatcaatcatattatcggttgcattcaagcggtaaaaattcctcaagcccaccaacggggggatcgtcataaacttgattcgattcaagtcgaccaacataaaatgaaattgatttccttcccttcggatcaacgtgttccccggagaatgatcgataaaatagatggattgcgagtgaaaatgatacgtgaaccgggtaaactcccgtaaaatagactccagatcagccggacgtttcacccgcagatcccgaaaagtgtaatcatactcttcctgtcgggaaatataaaaactacgggttaccccgaaaacatttcgataaacgatataagcaatcggttccggggtatcaacacccctttctaacaacgtattcgcatactcgaacgagcgttgggcctttcccttccgcacgtaagcataagcgaattgattaacgatattgggttttttaaaggatttcacgttaaaacgttctccttccacatccagtatcttaatcacattccgtttgtcatcaatgacctctccttcctgatcaaaacgacgaggaatatccagaatggccttttccaatgacttatatttcggattaatttggcaatcaatcattttacccgctcgtaatttataaatgtgtaatcacattcatttttctcatccgccttacctacttctctctccacttctttccaaacttctaggtcaacagacgggatcacggtatctccctcgcattcttgatgaacgacagtaagatacaaccgatctgctttatcccacaacttcttgtaaattgttcctcccccagtcacaaatacttcatcttcatttttcgtcaactccaaagcctcctcaacactatgcacaacctcgcatcccgcagcctcgaattccggatttcgggatataacgatatttcttcggttaggcaaagcccgaccgatcgactcaaacgtcttccgtcccattaatatcgtatgccccgtggtcaaagccttaaagcgtttcaaatcagctgaaatcctccatatcaacccgttatcccttccgataacattgttctctgccgctgctactattattgataaaaccatcgaatttattttagatttacgattttagatttacgattggcccctctgacctttggtcatctccactataaacagggaagaaccaaattagtctccgtcttcgggaatcttttcattctaaattttaaactctaaattttacattataccgatatcgccccctttatatgtggatgcgggttataatcgcacaatgtaaaatcttcgtatttaaaatcgaatatacttttcacgtccgggttgatttccatccggggtaaaggacggggttcgcgtgtcaactgcaatttcacctgttcgatatgattcaagtaaatatgcgtgtcacccaacgtatgcacaaattctcctggtttcaaaccgcacacttgcgccatcatcattgtcaacaaagcatacgaggcaatattaaacggcacgcccaaaaaagtatcggcactacgctgatacaattggcaggataatttcccgttagccacgtaaaactgaaataatgcgtgacaagggggcaatgccatattttcaatatccccggcattccatgcactcacgatcaaccgacgggaattcggactatgtttaatgtcatgcaccacttgggaaatctgatccagagaagtcccgtccggcttaggccatgaacgccattggtaaccatagatatgtcctaatctaccatcttcatcagcccattcatcccagatactcaccccatgattgtgcaaatacttcacgttcgtatcgccgttcaggaaccacaacaactcgtatataattgacttcaaatgcaatttcttcgtagtcaacaaagggaaaccttcttccaggttaaaccgcatctggtgaccgaacacgctaatcgttcccgtccccgtccggtcctctttcaccgtcccctccgacaaaatcctatccagtaaatctaaatattgcctcataataattgaaaattgaaaattgaaaattgaaaatgtacgattcaactttcaatagatgatagaacaaagatagcctttaaattttaaattctaaacttttctcacgatcattaacccgtgacgaacaggcaacaggatattctccacccggctatcagcctgtaccatttcattaaaattcaaaatacctttggtttgggcatccaatttcacttgcgggtctgccaccttaccatcccacaacacgtcatccgcaataatcattcctccactccgcaccttatcaaacacgagccgataatattccgaatattctcgcttatcggcatcgataaacaccagatcaaacatttcatccagcgtgggaataatcttgcaagcatcccccacgtgaaaaacgatacgctcctgcaagccgcttttttcaatatattggcgagtgaaatcttccaactcatcattcacgtcgatcgtgtgcagcacaccccctttctccaacccggcagccatcgaaatagcagcataccccgtgtatgtcccgatctccagcacccgacgggcgccaatcatccggcatatcattttcaggaactgcccttgcaaatttccggataacattctcggacgcaatacattcagatgggtcgcccttgacaactcggccaacacctccccctccggctcgctatgcgccagtatatattgttccagttcagcatccatttccaacatgacagattctatttatatagtaatacagattgcttttccacatcgaagacctccttcgccacccggatcagcaactccggtgtaatttcctcgatctgggtataaatatcttcaagactatccaccttatcgtaaatcaagaaactcttcccgatcgacagcatcaagttctcgtaattctccgacgagatcgccagttgccccaccatctgagcctttgcccgtttcaactgcaagggccccaacttttcttcatacaaggcccgcatctccttcttgcacaaattcagacaccattcggcattttccgggtcacaaccgaaataaatcatggatacccccgtgtccgaataaggcgtgtacgacgcctcgatattataagccaaaccgtacttttcacggatattcaaattcaaacgggaattcatccccgtccctcccaacaagttcatcaacagcgataaggccaatcggttatcctccgtgtaatcgtaagcgatattcccgataatacaatgactttggtgcgtgtcccgatccatctccacgaaacggggagtgtaaatctccggcttaatccgagccttcaacggagttccggcctcgtaaggcgaaaaatacttttccaccagacgcaccaacttctcgaacgggatatccccgaccgagctaatcaccatccggttcgggaaataattacgtttcacaaaatccagcaccataccccgggaaatccgttccacggaagcctcgtcacccagaatattccgtccgatcgggtaaccggtataaatcagctcctcgaaatcgtcgaaaatcaactctcccgggttatccttgtacgagtttatctcatccagtaccacgtctttctccttctctatctccttctccgggaacaccgaatgaaacacgatgtcggcaaacaattccaacgtacgctcgtaatcctttgccataaacgtggcatacacgcacgtgtcctccttcgtggtgtaagcattcaactcacccccgacatcttccagacgactcaatatatgataggctttacgtttctccgtacctttaaaaatcacgtgttctataaaatgagccattcccagttcatcctcccgttcatcccgactccccacgtttataatcaacccgcaataagcggctttattcggaacatagttatggattaatcttaatccattagcaaatatatgtgtttgatacattttattgaataaaaagacttcctcccgacaaattcagattcacttttcccgcgtattttttattcccgataaacccggtctccagcacggtattcttatccgtcgtcggtttactctccagcgtcacgccctcgggcaattccaccttcaaatttttattacgtgccaactccagcgtgtaaccgcatccttccatgaaagtcaatcccaccttcgtggaagaacctttcacgtcaacagcagcgaacgagaaattgatattacgcacgttcaactcgccccaacgcatatccatcttgagtgatccgccaatatcctgcacctcgtatttcgtgtagaaagaagtcccgtccatatcctcgaccatccccaggtaacaggtccctcccgatgtcttcaacgaaagtttatccgcctccatcaactgcaaagtcgttgacgtgcaatccagtttcatctctttcccttccccgatcttcaccttacaggatttgaactcggccgtcatgtttcccaatttctccacctcaaattctcccttattctgtttcacggaaaactctccacccgtcactgaattggccttaaaattaccggatacgatctccacgctcatatcccccacgaaatcggccaccgaggcgcctccctccgtgcataccagacgtactttcttacctttcggaaccttaatatgatagtcaacgctcacggtcacccccgcaaacatctgccgcaggctcatatccttctggaacaacgtctccacgttcaacacagccccctgctccttggccgttatggaaatatactctaatatctcgtcaaccttggcttttgtttttgcctccacccacacggaagtcgtgatggaaaactcgtcaccttcctgcttaacatcgatatttccatagcggtttgtaaccgtcaactcgttaatggatgccgcaggaaagctcttcttaaactcctttgatccctcctcagcccaagcgtttaccactccgaacaaaacaattgccaataataataatctcttcatatcgattgatttaatcatgaattactcgacaacaaatcacatcatctcctcgttctcctccacctctttgtaccgcagtgccaggtaagccagcatccggctaaacgtctccattgccattgtcgtttgcgaatttatctcttttttctgtaatcgcaacatcaaacgcccataaagagcatgaagtgccagctcgacatcggaaacctcctccggcaggttcgtcttccggcgataatccagcaaattattcgcggccatcatgaacaactgcttgtacttcatatcctgcacgttatggagtaaatggaaatgcaagtcggtcaattcgttcaccatgttcttcaccacctgcacatgcccactcttcgtcacctcctctttcctcatcatttcgatcaagttatcataccaatcactgatctccttccgtgtcgcatcatcccccccgaagtggctcaccacgttccggttcaccagctcaatatccatctgcatcgccctcaacatatcctccacctgccacatatacaggatatattcggccacattactctttctcttctcgcgtgctatcaacatactaactaatttacaattttagattttaaattttaaattgcctaccggacacatatcaacctaaaatttacaattcgaaattttatagttctttgagtttatcaatcaacctccggtctcgtttcgtgggacgccctgaaccacgatcccggctttcaaattgcatgaaagttccccggagaatatctagtttttcctgcggggtgatctcttccacgaaatcgacggccaactgggcagacatccgcttgtcggtaacctgtttcaccacgtactcccgctcaatcggcggaacccgtactttcacgacatccccgacctttacctcccgggacgctttcacgtgcgcatcaccgatagagacgtgacctttaccacattcctctgcggctaacgagcgggttttgaaaatccgaaccgcccacaaccatttatctattctaaccttctccacggcttattcatttataacttacaatctgtcaaagctaaaacttattctgcaaatgacaaaacaaatgctgacctggaatcacgaacctgaaatcttcattttaaaattcggaatcacgacttcaaaatcacaaatcgtaaatctaaaatcgcaaattattacacaggctcatcgtcttgtccaccccgataaaaataaaattctcgatcacctccccgcaatgctttaacatcactggaaaacgttcctcttcctccgaagaccactctcccaacacgtaatctacctgttttcccttgggaaattcgttcccgataccaaaacgcaaacgggtgtaatcctgtgtccccagcaactggttaatactcttcaaaccgttatgtcccccgtcacttcccttgcctctcaaacggatcgtcccgaaaggtaaggccaagtcatccaccaccacgaaaaggttcgacaactcgattttctctttttgcatccagtaactgaccgccttaccactcaggttcatgtacgtgttcggcttcaacaaaatcagggtacgtcccttcaacttcaccgtggcaaccgcaccataacgcatatcttcaaaaacagcattggacgccttagcaaaggcgtccaatactttaaatccgatgttatgtcgtgtattctggtactcgggacctatgttgcccaatcccacaataagatatttcatctgtctattttttcaaactactattgagcgctttgtgcagctcttgcagctcttgtcaatttaacctgagcaaccacaacgctcttggcattcattaactctacgccttccacgtgaatatcctgtactttaatagccttaccaacacctaaagaagtaacatcaacaaccacttcatccggcatatctttcggaagagcttttactttcaacttacgagtgatgatagccaacttacctccggcttgaactccggcagcgtgtcctgttacccgaacaggaacgtccattacaactggcttattctctgaggtctggtagaaatcaatatgtaaaaccttatccgtcaccgggtggaattgaatatctctcatcacggcaccgtaagatttaccatcaagatccaaatttaccagatatacattaggagtgtaaagaagtttcttcaaatctttatccaaaactgcgaaatgaacgtttgcctctccaccataaagaacgcatggaactttctccgcatatcttacagccttggtagcttttttacctaaatcgtttcttacttctccttttaaatcaaatacttgcataataataacattgcttgtgctactcaaatccagactgatgccccggggttataagccacgtctgcattcccattacacgtttaaaactatccccgtacttttaatgcggcgcaaatgtacgaacaaattatcagaatcacaacacttttttcaaagcgattatcttcatttctccatctcactttttacccactcgtcatatatacccttgatctcttggtaacgaggatgttctttgaaaagcaaaagagaggagcgaaaatcatagtctgcatgatccacaaatgcatcaattttctcaatgtcatgctcacctgtttgacaataccacttttcaaataatcgaaaacgagcattctcctttttatcacaagtctcacaaacaacaataagcgaattttgatttacttgaaaaaaatcactcaaaatcttgacaatcgtgtaacgcaccctcccatcattcacaggtttccccactgcatcaaaagaaaaagtataaacatgatcggccccgaaagcttcactaatatcaataaaataagcggcgtaaacaacaccgctttgcgttataaatttatatgccagatcatctgtctgaacgatatgatacgggagttgcaaatttgatatcacgctctttagctaattttttcaaatcaccattcttctgaatacactcccgaatagcacgcttatcctccaacaatttttggaaaaaacttttcgtttctacttttggtgttttcatttcaatgatttttaagtccttatttataaatacaaagatacaaataacaatccaaactccataacaatgtcacgaattaatatcatttacaatcaatataaataagcattcatcaataccacatcaacacccaaaacaacacactgaaaatcaacaataaacaatcaaaaatccgccattttcaatgacaagttttcacacggaacaaccctttttattctgaaaaagttttttgtttcaattataggtcttatttttgcgtcattattaacaaacaaatttttttagaaatggcttacgtaatatctgatgattgtatttcttgtggagcatgtgaatcagagtgcccggtaggagcaatctctatgggtgatgatcactatcaaatcaatgctgatgaatgtatctcatgcggggcttgcgctggtgtatgtcctgttggagctccgaaagaagcttaatcatcataaaaagaaaagaacaaagctgcctctctcgggcagctttctttttgtacctattcgaaaccattactaccgataactccctcaaatcaacccttctcacggggttgtaaaagcacgatgcctcatgcttgtttgcaagtcgtatccttgttcccgtgaacaaccggaacgtggccaaagttatttttacttatactttgttaaaatggcggcgacaatcgggcgacagcgcctaacagtcacccaattttcaaacttcccccccaaataccccgttaaatcccatgaatcacgagatccattcgcacgtccaactcatcgacaggcacctcttccacgaactggaatccgaaacaaatcccgaccttccgggcaacatgtgtctcttttaaaatcttatcgtaatacccgcgtccgcgccctagacgattcccgtggcgatcaaaagccacgcccggcacgacgatcaagtcaatcgcatcgtaatccgtgtacaattcaccaacaggctccaatatgccgaaagcctctcccggttgcagggattccatgcccttaaacacccgtaattccaacacgtcccctttcacgcaaggtaacaggacggtcttctcccctgcccacttgcagacgtaatcatgcgtgaacacctcgtcgtccatcgaccagtagagcaacacggtccgggcctccttgaaaaaatccgtctgttccaactccttccacaagggacgagacatctccaccttttgttccagagaatactggcttttcaaaactttaacctgttttcgcaattcttttttatccatggtaaacaatcttcctaatctttattcattattttgcgcaaaaatcgtacttttgcagcaataaacaaaacaagctgccaaagagttaccagatttatttggacgcttaccaacaatccatcccgtcaagggatacaacgtgcagaattatgaaaatagcgatacctcaaatcaactaccacatcggagatatttccaaaaataaggatcttattattgctgccataaaaaaggcgaaagccatgaaagcggaactcgttctttttcccgaacacgccatctgtggggcttacccgcaagaccttttcgagaaagaatatttcgtgaacgaatgtcgtgtcagcattgaaaagatcgccgagcaatgtcataatatagcggcattagtgggcggcccgaacctagacttggaagatggcatcctgatgaacgccatgtttttcatgtacgacggggaagtgcgaggcggggtaaacaaaaccatattgagcgactacgacgttttcgatgagagccggtacttcatcccgggagaatccaacacgcccctacgctacaagaaccagaatatccgggtcattttcgacgagtacgaatccaacatgatcgagaagaccgacacgatcatcgtacatgtcggttcgacacctttcaccacggaaagttttgcttaccggaaagaaagtctatcatacatcgcacgcaaacagaaatgcccactcatatcactcaatcacgtgggagcgaacgcctctctgatatttgacggtaactctttcgtggtcaacagtaaagggatttcaacatacaaattagccgcattcaaagaagatttcatggtcatcgacacggaaagactgcttaatgccccggccctcaaagaaaaaggaccggacaacatagctcttattcacgatgcactcatcctagggataaaagatttcttccacaaaaacggattctcgaaagccgtactcggactttccgggggaatcgattctgctctcgtcgccgcattagcaacagaagctcttggaaaagaaaacgtgttgggcatactgatgccttcccgcttctcaacagaccactcggtcacggatgccgtcgacctggcaaaaaacttgggaatctctcacgaaattttacccatcaaagagatatacgacaactttattaccacgttaaaaccagtattcaaggacgcccccttcaacgtggccgaagaaaacctgcaagctcgtatccgtggatcgcttgttatggcaatctccaacaagttcgggaacatccttttaaacacgtcgaacaaaagcgaggctgccgtgggatatggtaccctgtacggggacctgtgcggatcactttccgtgttaggtgatgtatacaagactgacgtgtacaaattatcccgttacatgaaccggaacggggaattgattccagaaaacaccatcacgaaagccccctctgccgaactgcgccccggacaaaaagatcaagactccctgcccgattacgacacgctagatgctattttgaaattatatcttgaagaaaatagttccaaacaagaaatcatcgcaaaaggattcgccccggaaatagttgaaaaaacactatccttggtcaaccgtaacgactacaaacgggcacaatgcccgcctatactgaaagtcagtaaaaaagcgttcggtagcggacgccgcatgccacttgttgccaaactataacccctgttaagagaacaagtttatgagaacgataaaagacaaagagctacacgaaaaatattgcaacatttgcattgatagtcccaactcccttttcgcgaatcttgacgaaagtagtaaaagtattattcgccaaaccagcatttgcaagatgtacaggaaaggggacttgatttacgaagaagggaataaacctttcgggttaatttgtctgattactgggaaagccaaaatcgccaagaaaggcatcgcgggacgagaacaaatcgtgcgcatggcaaaacccgtcgggttcatcggctaccgggctttctttgccgaggaaatgcacatcgcatcagcggaggctcttgaggaatccattgtctgcattatgaaaacagaacttattttcggtatcgtgcgcagtaactcggacgttgccatgaacgtgatccgggcgttggctaccgacctcggattttcgaaccgccggacagtaacactcacgcaaaaacacattcgcggacgtctggcagaagccttgctcgtactgaaagacacttacgggttcgaggacgataacatgaccctgaaaatttgtctctcacgggaagatatggccaatctctcgaacatgaccacctctaatgccatccgcacgctatccaactttgcttcggaaggcatactggaactttccggcaaacaaatcaagatcacgaacatggaagcgctggaaaaagtaagcgagatgggataactcaatcatcctgcaattgatcgatacactggctgatggtttcataatcaaagccacgactcaaagcaaagcggaaaagctttgcttttcgcttatacgggtcctcctcttttaatccccgattcttttgtttcaacagcgccagacacgtggcgtcactttcctcattgggtaaagaagataaagcccgttcgataatacgttccggcacacgcttttgccggagcatctgcatgatcttcaactttccccagcgattaaaacgatgcttatcccgggcatacgcctctgcaaagcgagtatcatccaagaaatgattcttcaccaaaaactccataaccgcagcaatatccttttcctctaactcccacctctgtaactttttaaggatatcaaaactacaatactcctttttactacactgcccggcaacaatattcaacgctttcttcgcatccactttcgatgtaatttagaatttaaaatttccccgggctttcaccattctctcccgttcattaatatccttcctcaattcaacatcctcgtaccccatctcccgaagtaactcgacggtctcttccccaaaagcctcattgatctcgaaaaacagcaacccaccccagttcagatgatcacgaccgaattcggcaatcttccggtaaaacattaacggatcggcatccggcacaaaaagagccctagagggttcataattcaacacccgatcatgcataagagccttttccgactcccgcacataaggcggattactcactatcacgtcgaaactaggccacgcccattcctcgtaacgtaatatatcacgtacctcaaatttcacctccacaccattcctccgggcattattggcagcttgttccacagcctccggggaaatatccaccccacaaagccgtactcctttcaacaacttacccaacgacacaatgatacacccactccccgttccaatatccaaaacacttgtacccggctgcactcccgattccacgatccacatcaccagctcttccgtctccggccggggaatcaaggtttcgctatttagctggaaatcaataccggcaaattccgtttctcccaatatatactggatcggtttatccgtttttaactcttccacgatttgaacaaatttatcgacaaaggtttttgccaaaaattcgtgtttattaagatggatttctatatttgtacaatgcaataatttgcaaaaggcaagagagcataaaacttttatttcatgctcggtataagtatcctttagctcctgtaatgcgtattgttgtaaatcaaacatcgtattcatggaacaaagatacggtttaattgaaaactgaaaattgaaaattgaaattttaattgcgtgaactggacaagtattgcgattaacattggcattgtactgtatattctcaccatcttggcgatcatatacacgatcatactggaaaacaggaatccggtacgtacactcgcatggatactcgtgctcgtgctagtccccggtatcgggctgttcttttacatctatttcggcatgaattaccggaagatcaagatgttctccatgaaaggcttgggcgacttcaagtggttgcaatacatgagtgaagaccaaaagcaacgtatcaagaaagccgaattactgaaaaaagaagatatggaagcggtgaaaccgttgatgacattacttctgaataacagcaaagcccttctctcccgtaacaacacgatcgaaatcctcaacaacggggaggccaccttcggttcgatcttcaaagccatcgccaaagccaaaaaatacattcacctcgaatactacatcattgataaaggagaactcggagagaaactaaaagaactacttatcaccaaagccaaggaaggcgtggaagttcgtgtgatctatgatgacgtggggtcgtggaaattacccaaacgttacatcaaagagatgaaggccgccgggattcagatcttcccgtttcttcccgtgcgtttccccttgttcacgaacaaggtgaactaccgaaaccaccgaaaaattgttgtcgtggacggggacaccgggttcattggcgggttgaacttcgccgaccgttacctgcacggattacccggcatcggcatctggcgcgacactcacttaaaagtgaaaggggaagcagtcacctcgttacaagtggttttcctgtttgactggtactttgttcgtcaggaacttctactgaacaagactgaataccttcccaacaagaaagtcgatggcaacgtggttgtccaaaccgtggcatccggtcccgatagcgactggacctccatccaacaagcctacttcacgctgatcaatatggccaagaagtacgtttttatctcgaccccctatttcatgccgggagagaccacgatcaactcgctgaaaaccgctgccatgagcggcgtggacgtgcgtatcatgatcccgtataaatccgattcgctactcactcactggtgtacacgctcctacgtagaagaactactggaagccggagttcgagtatttcaatatcgtaaaggattcaaccacagcaaagtaatcgtcatggacggactggtatcttccgtgggtactgccaacatggacatacgtagtttcgaacagaacttcgaagtcaacctcatcatctacgaccgcaacgtcagtcgccaactcggttccgattttctggacgacttgaaaggcagttccgaaatcagcatccaccgctggaaattccgcccgaaacgggataaaattcgggaatctctagcccgactttttgccccgttgctctaaccctacacttcaacccctgtccagccagagtttagcgggaaattggcatccactccctcatcccccaaactcaccccacacaacaaacacagttaccaaacggctttgcaacccaggggatacgtctatcttgcgtttatcgtggcttatttccccctaaactcccaacaaactcctacctaacatcaaaattttcttcagcaagcaagtaaaacaaacccttaaaatccgtagctttgcagttacaagaacaacaccattgaaaattgcaaatccctcattttcaattttcaattttcaattttcaattattatgaacgagatcgccgaaatcattaacggtactttacatagcggaatacccgtggaaatcatggaatacagcatagacagccgttctgttgttactcccgaacataccctgttttttgccttaaccggaaacaatcataacggacacgattacatccgtacactatattccgatggaatgcgagcctttgtcatcagtgaatttcgagaagaattcaaccaactgacaggcgccaacttcatcgtcgttgaaaatgttttgactgctttacaacaattagccgcccaccatcgacaacacacgcaagccgaggtcatcgggatcaccggaagtaacgggaagactgtcgtaaaggaatggctctaccaactcctggtaaacgatcatgccgtgtaccgcagtcctcggagttacaattcgcaagtaggagttcctctatctctactgggaattgatccaaaaacagaaattgccattatcgaagccggaatatccctaaaaggagaaatgcagcacttgcaacagatgatacagccaactatcggtattttcacacatctcggggatgcacacggtgaaaactttgcctccaaagaagaaaaactagccgagaaagcacaactattcacgtcttgccaatgggtaatcgggcaaacaggagaggctctggaatatatcaaaacacgagtaccttctaccacctcgtttcttctttggggggaagacccgaaggctgacattcatgtaaaaacaatgaacatcgcactcggacacagggaagtgcaggtaaccttcggtaataagcactttatccttgatattccattcccggacattgcctcctacgaaaattgtatgaacgccgtcagcatattgttattaaaacaatattcccccaacgtgatcatctcacgagtacaacagctttccgccatcgccatgcgtatggaaatcaaggacggcatcaataactgtacactcgtgaacgattactataattcggacccgtcctcttttcaactggcgttgaacattctagcaacgcaggatgcctcgaaagaacgggttgttatcctctccgatttcatggacacgggaaaatccggtgatgacttatacccttctattgccgagactctccgccaagcaaatatatccctgtttatcggaatcggcaaacacttgagtgaacatcgtcatgattttgccgctaattcccgattctatgaagacacggagcattttctccgtcaggaagaacgggataatttcaataaccaaatcatcctgatcaaaggcgcccgggcgtttcaacttgaatacatcgccggattcctgcaaaaacaatcacatagcaccatattggaagttgacttggatgccatggttcataacctgaatcatttccggtcattgactgatgcacacattgccgtcatggtcaaagccttctcgtacggtagcggctcccgggaaatagcctcgttactacaataccaccgggtagattacctcatggtcgcttttgccgacgaggggattgaactgcgggccgcgggaattaccatcccgattgcagtcatgaatcccgaacgggaagcttttgacaacatgatcatgtttaacttggaaccggaaatttacgcgttggacattctagaagatttcaaccaagcactaaataaacacgggatcaaacgttttcccgtacacatcaagctgaataccggcatgaatcgttccggtttcgacgaacaggatattccgcaattgttggaatttttcgaagccgaacgttccgtgtatattcgttccatattttctcacctcgcaggaagtgacgaagccaaacatgatgatttcacactgaaacaaatccacttgtttgaacgcatgaccgaatgcatccaatcccgattcaattataaaatttggcgacatatcttaaactctgccggaattgaacggttccctcaataccatttcgacctggttcgtctcggtatcggattacacgggatcagtgctacaaacgcccaacttcaagccgtaagcagttttaaaacctatatttcctctatacgcaatgtacccgaaggtcagtccatcggatacggacgtaaaagctacacgacacgcccttcccggattgccgtgatccccgtgggatacgcagacggactaaaccgtcacctaagcaaccgggtcggcaatgtatttgtcaaaggtaaacgagttccgattataggtaacatctgcatggatacctgcatgattgacatcacagataccgatgcaaccaccggggatgaggttgagattttcgggaaacatattccggtcaccgaactggcagaacaactaggaaccatcccttacgaaatcctcacgggtatctctttccgcgtgaaacgggtatattataaagagtaaaatttgataaaaaacacaaggcaattaaaagaggctatctcaaagtgagactgcctcttttcactgtgtataatttacgagaagctatttactcttcataacgatcccccaataaatctatcaacaccaaatccaattccgatcctctcaccccgtgatctattatacgtccttctttatccaaaattaaacagaaaggaactccttgaatcttgtatttattgattacctcacctttccaacccttcagatcacataattggatccatttcatattttcctctttcaaagcttttttccaatcgctttctttatcatcaatagaaacgctaatcatattaaaagcattctcaccctttccgtaagcctcatacacgtgacgcaaatgaggaatctcaccccggcagggaccgcaccaagaagcccaaaactctaccatattatattgccccggtttcacgtaatcagctaaatgtacggtctttccctcctcgttaaccacttctatatccttgaatttttcccctatcgctaccggataagactcttccatactcttttgcaatcccttgtaagccggagcgttatgcaaagacggatcaattgcttgtaaaagtttatccatttccgctttcgacaatttagaagaatacatcatattctgagctatatcaatagacaccggagaggtcgggtttcccgttataaaatcccactgaatttttttcatctctttttgagcctcctgcatctcccgggccaaagcaagcccttcacgggtattaaataccccgtcaagtgcaggaatatgataaactttcaaatattcattccaagcctcactacttctgttactataaggtctgattttctctttatatttcaaatacaaatcatgcacgggagaaccagtgatcaaaacttccccttttacctctttccgatggaaactcatccgagaagctaaagaatcgatagaaggcgtctcgtagcgtatatccgtgttatccacgaaaatatccgaaccacgcatatctttctcgtattccatattcttatccggtgataaatccacccacagttggtaacgcacgggtacatctacttttcccgtcaacacaaattttccccctttcaccactccggaatccacgggtgtattccaattatacaaatacactttcatcccatcgggagtaccgggaacagacccggtgattttataaccgggttctcgctgacaggccactaaaactcctaaaaaaatagctccatacaataaatttctcataccttctaatattttttaattttcacctacaaacgtttcatttattccacggtgacatttgtccagaacttacaaaactcttccaagtctactttcaagtactttttgtaaaattccaacgtcaactcatactttttctttaccaacggataagtatctaaaacttcctgccgctccgacaaaggatgacaggcaatccatgtcgcataagtggccaaatcctcctgttgatacatctctgttgtagccatcataaaaggataaggatgaataaatcctttcttcatcagataatccatgtcaacttctcctgtctcccaatccattaccgccatcatcgcatcaaattgctccgattccggaagctctcccaaatacattcccttcgaaacctgggaaaattcggtaggaacaggaacatccaacacgaaataaggagtagtccgggtactgaaaaaactcaaacagatactatacttccacacatctggctgaggtccgatcatatcatccatttctccccaatacacgataccttgttgggcttccattgtgcaagcaatggaataaacctccggaatccagaaaccataataattcaacaattcatcattccacaaattcgccttcaccagcacttgacgtttaatcacggaagttttaaccgtttcgaccggcaacgccccgtaaaacgaacgcaataacctcaaaaagacttcagaagtagcctcatccgccgcttccaacggaaatatactttccggaagataccaaaaaccgttgacttgagtctctcccaaattcgttcgcaacgcctcatccccgctcaatgtataataaacatgatggtcatatttctggtacaactcataacaaatcttttgagcctccgaaggtccgtctgcaatagccggaatcggaccattatactcgtattcgggagacaaactatcctcgctacatgctgtcccggctgcgagcaagccaaataataccaatattctatatatcgttttcatatccatttcattttatctggggttagcaccaatttcaggattcacattcaactccttttgaggtatttgcaacacgtaccggggatcatccttttgtaaggtcgcactaccgttcaaaccgctatgcacgatagaaggtcgtgtcgtgcgtcgtaaatcaaaccaccgatgttcctcgaaacaaaattcccgtcttctctcattccaaatggtctccaacaatgattgcggggtaaaatcctctgcatgtaaacgtccgtaggtctcaaaatcctctgccctaaattttacctcacgtagcgtgttcaaatatcccacggcagcacttaaaccgtcgggcttatgggcatacgcttccgccaagatcaaatacatctcttcagttcggatcacccgagaataaccgtaatcggaagtgatctgaggaacaaaattgagataagtttctgcataatacctatttttcatgtaacgaacccgccctttggaatttcgtctcataaaataatattttcggacatcccctttttcatacgtgttatacaaagtttcactcggataaaaaacagattgtgcggtatttcccccgaatatcatatataactcattgataccattgacaaacaaaacattcgaatttttctcactcagataaccaataccgggaatcgtttcttcattccattccgttatgggggcttctgtatatattaccgaattttcacctgccgcacgcagatcaaacaaggctgaattactttcaatcacctctttagcctgttctatcgccaaatcccattcttgcatatacaaatacacccgagctaataatgctttagctgcaagagcagaaaaacgtgtttttcccgtttccatcaaattctcttccaataaaggaatcgcatttttcaaatcatccacgatctgcccgtagactttttccaaagaaacccgccgatacgccttgtcgtcagccgtggtttccaaattaaccggaatacccggagtcgtggcacaagtagccggatcataaggagccgcatacatattcaccaaatagaaataacggaaagccctcaaagcataagcctcccccttgatatgcttacgtgttctttcaacctctgtcatatccaataccgccccgacagcctcatcaatattatcaataacaacatttgtgttataagcactattataaaattttgcaaaaacttcatccccattcggcatggtcgtttcgatactattatcccacaaatgagccccaagataagtatctgcagaattagcaaaattaggtctccgatctgccacgatatagtccatatcatccgttaaaacatctatataaggcagtacagcttgagttaaataagcgttattcaacaactggtcgtaatcatctgttgtcgataatttttgcttgttctgaggtatctcttccaaataaccgttacaggcccccaacacggcacacatacacacgaacaagaatttatataaatatctcttttccatagttcttcatttaaaaattgatattcaatcccaaggtaaaagttctagccaacggcaatgaaccataagaagttgtcgtataattaatcgtctcaggatcatatcctttcaaacgcttatctgcaagcacgaacaaattttgcgcctgaaacttcaaggaaacattccccagtttacgtcccccaacaatcacgttatcaacccaacgtcccggtagttggtattccaccatcaagttccggaatcggagataatcgccgggtacaacagtttcatcggatgaattataccaatccgtggcataaaaattaccatcggcagttgcaatatagccatccccagaagacaaggcgggtatggtcttccccgtgttatcctttcccggccgccaacgatcttttatactgctgttggcattcgcatcatcagcaggtgccgtgacataagcccgtgcaggcaaacgcaccacatttttcaaaccaaaagcaaataacatggataaggatacatttttataggctatcctcgtatttaatcccccggacaaaataggatccctagtaccttcatatttcaaattggcaatatcatagggaaaattcactatttcttcgctagaaaccccaagcacctttccatctttatcataaaacatgggcatcccgatatcatccaacccggcaaatcgataagaaaacatcccgtttaccggtttcccctcgtacacttctcccggcgtgtaaacactttgcaccaaatattttgtttgagccgtactgttggcttttgtcaccttgtttttgacatatcccatattaaaagctgtcgtccaacgccaatccttattcttaattattgtcccgctcaaagaaatgtcaagcccctggttacttacatccgcatagttcacgtatttcccggaaaaaccggatacagaagatacacctttgtaagcgatcaagtccttactcttatccagataataatccacatccaatgacagacgattgtcaaacaacccgacttccaatcccacgttaaatgaagccgttgtttcccactttaaatcaggattgggagcttgttgtatttccatttcaaacaaaccggttaccgcattgggtggtaatgccgccgcaatgatcgaaggactgctatcctccacgatatttccccgcaacccataagaggcccgaagtgccaagttgtcgatcatttcattgtcggacaggaaggattcattacttataatccaccgtccggaaacagaccacaaaggcaagtaacgatatttaggattcgaaccgaaaagattcgaaccgtcaaaacgaatattcgcattcagcacgtaacggttgtcatacatggcagaaaccaccccgtaataagaaatattggaacgatcaactagactacgggttgtcttgttacgcttcaaatgacctgttgattcccctaatgccggttcataaaacgtgtttccgcgatcatgaaaatacccgtaaacattcgatgttaaccctttataattcgtatttctaaactcttgtcctaataaaacatcaatagacaaattctccaccaaactacctttataggttaatccgttacgaatcaatgacgaacgctgttcataagttgtttcattatacactcccccgtaaggtagcggagattttttcatatcatcttccgatccttctccatactcgtaccctctaatatctgcaacataagcactttgttccgtggcataatcccgtgcagtcgaatgagaagaggcgtaactgaataacccctcgtatttcaaccctttatacagattcaccgtaagattgacaattcccttcatatcggtttgcgtactctcattactggtattcgctaattcattcaatatattaaatttatgtgcacgtccggttactgttcccatgtaataatatagctccccgttatcttcacgcaaaggaatagccctagaaacacgaaccgcataattgaacaaatcaatcgaagaatgatacatctcccgatcacgacgatccacttgaacaatggcacccatatttaccccttgaaataactgcgtgttgacttttaccattcccccgtaattcttatactcacttgctttatcaaccccctcttccccgttataattcaaagaaatataataattggttttctccgttcccccggaaacactcaaattgtgggtctgcgtgtacgcattccgaaacaaaatcttaaaccaatcggtatttaacccttccaacttattggccatcgtattcaattgctcttttgtaatttgcccgagggcatagctattcagtaacccctctatacccgggccaccattcgcataagtactgctccaaatagataaaccgtcttcataattctcccatgccaaagcaacacgctcttttgaatttaataaatcaaaattatcgtaaaaaggacgaatactcacggtcgacgtgtgttgatacgaaatattaaagctattggcctttcctttcttcgtggttacaacaataacaccgttagcggcacgggttccgtaaatggctgttgcagatgcatctttcaacaccgtaatactttcaatatcattaggattaattcctccaatcacggaattaaacatattcatcacgtccggactattcaaatcggcagccgtaaccggcacggaattctctaagataaccccatccagaacccacaatggatcggcattcccggaaattgttgcagtaccccgaatacgaattttcggtgccgcccccggagaggctgaagtattcaccacagaaagccccggaacaaccccttgcaacatctgttcgatactggatgctcctatcgtttgcaattcactggtttttaccgtcacgacagaacttgtcaggtttctcttttcgatctgttgataccctgtcacaacaatctcctctatgttttcagaatcttcttccatcacgaccgtcaacggtttctgtccctttttaaacacaagctcctgcgttttcatccccacgaaagaaaaatgcaaagccacactctcctgttcgggaactttcaaaaggaattcccctttcgcatccgtggccgttcccaaagtggttccaccgacaagtaccgtcactcccggtaaaggttctccatttttatctttcaccacaccccggatttccatctctttctctgcttgccgtaccgttttttctccttcaaaccgcaccatgataatatcatcccggaacgtataggtaaaacctgttccctcgaaaatccggtccaaaacagatttcacagtttcatccgttgcttttaccgtcaatttatccaaacgattcgcctgctcgctactaaaaataaaatgtaatttggtctgacgctgaatctcactaaataatgtcttgatcgacacatcccgcaaatccagattaactttttcctgctgggcaaaactatttgccgaaagggaaaatgtgaaacaacacatcaaaaaaataaaaagcttcatagttttccaaaatttttgcccatgaggtcggtaaaccctaaggcataatagaattttttccatacctttgtagttagaatgttagtatttacaactaggcattgctcgtaacattagcctatttgtcctattatcattgatggcggaaaatgctcgtaacatcttccgctatttctttattccatcactataattgttcttcctttcaccgaaaatttcacttgagttactcctgatatggcatcaagaatatgggaaacctcctcgtaacgtcccaaatgtccggtaaaatgcagttgttttaaacttgctgtctggaagaatacatccacgtcataccataaagacaacgtgttcatgatctcctccaagctttcatcatcaaacataaactcatgctccttccacgccacgtaaggccgcacatccacgtcccgaatttccatagtgccttcctccctgttataaagagccaactgtcccggtttcaccgtgtattccgcattgtttccctgaatgccaatcttcccctcgaccaaaacagtctcaacatttgctatattgtacgtgtttacgttaaaagaagtaccataaacctggatctttaatttatccacgttcacaaaaaaaggccgttttgcatctttcgccacttcaaaatatccttccccggaaagaaacacgtcccgtcgttctgacccgaaagccacggggtaacgcaattcactgcccgaattcaggtaaacaaccgtcccgtcagacaaggtaaccgtgtattctcctccacgaggaacttccaacacgttatattctgtctttcccgttgccacctgctccgggtaaaccattcctaatgagttattgatagccgcaataccttctgccacatcaaaacgagtttcttgttctctcgtgatttcaatcactcgattatcagccaaccgaagaatagccttactcttcccgggctctatactagccaattccgtacccttttgttcagtacccggtttcgtttctcttataaaatatcccgctgccaccaccatcaagggaatcatcacggcagccacgaatttataccatcctaaacgacggggatgattcttctgtttgatgtttcccttcacaatgaccttttcccatgcagaatctttattcaccttctcgtaaataccaaaatcggaggcgacactcttttcattacaaatctctttaaaaagcttctctcgcgaaggatcttgagtaacccactcctccaacttcactttttcttccccggataaatctcccacgagataaagttggattaattgtataatatattcatcgtaatgtttcatcatccttgttattttacaccaaagacgacaagagtataaaaaaggagtataaaaaaatcgactttttatagaaaatatttttcaattacatgaaacccactttaaacaagacatatagcatatatacacgacctaatcttttccgtaaataaacaatagcatttcgtttttgagtcttcacggttaactcggatatttgaaggatttccgcaatttcgctattcttttttccttccagacaatatttaaatacttcctgacaccgcttgggcaattcatccaatacctggtataaacggcgatacacctcatctttcataacctccaattctggtacttcacctgtctctgacgtccgaagcgtgtaacgcacgtactttccttccacttccttgtgtttcaaataatccaacgaggcattcttcaccgagttatacaagaaattcttaaaaccatagtatgaactgtaaatcgtatcccgttcccacacctgcacgaataagtcctgcacgacatcctccgcaatctcttgtctctctacccatttcatggcatatagcacgagataacgataaaatcggtcaaacaatattttaaaagctcccacctgcttttgattcaactgctctattaataactcatcttgaaccattttccctaaggattattatacagatttattcgtgtataaaaatagtaaaaaactatctttgcacaaagataaacacataataaaacagatttatgaaacgaatcatagcactcttgccctgcatcatgttattattacaagcaaatcaatcctgggcccaattcgacaaacactttcacaacaaaacattacgtatggattacgcccattgcggggatagccagcatgacgaaatttatttcgaggaattgctggaagaaccttactggggcggttcgaagaccaacctcatcgataccatgttctatgggaattattatctcaacgtgtacgacgtggcctctaaccagctcatttattcccggggatattgcactcttttctgggaatggcaaaccaccaatgaagccaaaacaacccaacgttattgctcagaaacagtagtcatgcctttcccgaaaaatgacgtacgcattgaaatatccgcccggaacaagaaaggtaaattcgtgaagaaatttgaatatacagtggatgttgatagctattttatcaagaaggatcgtcggatgcagtacccgacttatgacatacattataccggaaacccgtcacgccgggtggacatcgtcctgctccccgaaggttacacggcagatgaaatggacaaatttaaagccgattgcaaacttttcgcagaaggcttgttcagcctttctccctacaaagaaaatcaaggtttatttaacatccgagctgttcttgccccttcacaagaatccggtgtcgatattcccggtgaatacatttggaagaataccatactgaattcttccttttatatgttcgattccgaacgttacatcatgacttacgacaataaaagtttacgggatttatccgctaacgtcccctacgatttcatctacattattgccaacacgcaaaaatatggtggtggagccatctataaccattacggtatcagcatttccggtaacctccatgcagccaaggtttatgttcacgagttcggacacctatttctcggccttggagacgaatacgtggaagtcggtagcagttacaacgatatgtacccgaccaacgtggaaccctgggaggctaatcttaccacgctgacaaactttaagaagaaatggaaagatatgcttgataaagatactcccgttcccaccacctacgatccccaaaatcccaagaaactcggagcttatgaaggaggtggttacgtatccaagggtgtttaccgtcctcgttacgattgtttgatgaacaccctatccggtaatgacttctgccccgtttgtgcccgggctatcaagaaacaaatcgatttctatacccgataaataagaaaaacgtaccgttgaaggtacgtttttcagcataaattgtaccacagaaggtacaatgtcgacttacaaaacctagaatcgagtccttacactacacacaaacatcaatttcctcccgtaaaagcccaatcagatttataagcccaacgagagggacattgttgcaaaaccattcttaaacgtttcacttgatcgatagaaagagaatttttgtaactgtacatatccatcacattgaacgaagtgaaatactccaaaggacgagttggatcattttccggttggccgtccaaattattagccttaaacacggaaggataaaaaccataatcaaaactataagtatccggacaataatcactatcaccatcttcattcaaataatcatacatatcacacctcgtttgaagaataccaaaatattcagccataggggtagccaaactgaattcatttgatccctgtactgccgttggcgtgtaaagagcatccaaattcaccatgtaaccaacttctcgacagtcctcaacatcatctaaagtaaaagactccttatgttccaaatccaagcccggaatagaagccaagtcataatccggatgcatcaccatagggggccacatctgatacgacgtagaagttcccgttagggaagtagatgtggtaaactttgctaaccagatattcaagtatttattggggtcccaaataaggcgtttccactttgtcaatatatatgacaaataaggtttagtcttatttgaagaagttcccatatttgtaaaatctgatgctgaaatattctctatattctttcccggctcctgcatttttaatccattttgatcataagttgccaacttaaacacaactttagcgtttccagcattaggatcagttgttatcttacgattaaaggcatcagaaactcgctgaagttgttcttccaaaaattctacgcttaaatcataggcaggagccgctgttgccggaggaacgagtacatgaaagactacaggaaccacaatctcctcgtaatcctcttcaggcaactcccttatcgtaacttccaaacgattactttccaagtttcctccttttgcataaaattgcaaaatcgttccgggagtatcactcgtcgttgcatagtaaccaccttccaccacatttccgttctggtcatacactttcacataatcaactgggacctgatccgctggaactaaaaactcctcttcaatctctttgccataaaattcatctgtctcttcatccctaccgtaagacatcacatttcttttagcatatacaaaagtatggaatcccattttacaaacaccattaggaactaacgttttatgatctgcacgcaattcaatccttgaaatctcatccggagaaatattcaaatcaagaattacactcttctctttttcacacgaacttaacatgagtagtgtgataaaaataacaattatatatctcataatatatatttttacatttgttttacttccaaccaggattctgggggacattattatacatcaattcataatctgcaggaagagggaatgtataacgataatcattaccttccaagatataagttttgatttcatcagttgcctcatcttttgccttacgagaaacactagctccagttcgtttcatatccaaccaattcatctgttcctcgtaaacaaattctttacgacgttcttttaatatctccccaatgacatcactccccgtataaccggaatatccagggatcttactactcttgaattcattcaacaaatccaaagccccgtctttaccctgccgggctaaagcttctgcctcgatcaacaacaaatctgaaaaacgaaaaagaatatgtacatcattaacatcatgttcgtctgtacattgccatttggtaacatacagcttaccatctatctctttaaaataaacttctcgacgaatatcattttcatcataaaggttatataattcgcttgaaggacattgaactaacatttgttccggttttccccacggagcataatcatttccgccataagcatacagagagaaacgcaacaaagcaaatctatgaggttttgtcgtagatttcgtcaatggcaccgttgtcaattcagcttgctcatcaatagtactttccacacgtgcgccattccttgcttcttttgcataaaactcggccttgctccaatcatcctcttctgcagcacaagacccagctttaaattgataagtctgagctaaaatcgcatacataattcttttattaaaaaagatattccaagaatcctcaggaacggtttcatattcaagaacatccataatctccccaatcaacttctggtacaaatctgtttgtttccatctttttcctccttgtacaatatcagcatcaaaattaaacggaataccataatcatttttattataaggagcaaataactgattcaatctcaacaaataataagcacgcatcactctcccctctcccgcaatccgttcataatctgttttattataatctggtacattttccaaatctttcaataccatattaatataaccaatcgatacaaatacttctttccacagatcacttgggaataaatatccttcccaattttttatctctccatactctttaataaagttttgtccccctcgagacggattcgcaaaatcatcaaacaagaaattttccaaatctaaatcattcgtgtacaaaatagaagaaacattgttacgtcttgtaaaaggatattgcacgtactcaccgttaaacataaccggactacttacgtatcctttacaataacttgatgaagtagttgcaaacaacaaggtagacattgctcctcgtacatcttccatcgtataaacaaccttcgtatttttaggaggcatattcaaaaagtccgaacatgccccgcataaaaatacaacaagcactaataatatattctttttcataattcctaacttaaatacctattgataaagaaaatgtatatgaacgagcactcggataagtgaaggctcctttcgtttcaggatctattcctctgaacttcgtcaacgtgaaaacatttgccatattgaaattcaagcgagcccgagtgatatgtaatttatcacaaatactttgctctaaattgtatcctaatgaaatattattacatttcaaataatctcctttttcaaaacggaaatcaaataattgatacaaatattcagtccgtcccgtatcatacctaggaatatccgttagatctccgggttttctccaacgatttgcctcaatcttcagtacatttttagcagccgcgtaagctgttcccccggaataatattggaaagaacgagccaaatgacctgtcatgtaagtaaactgagcaaaaagactaaaccgtttataattaaattgtgtcgtaaaacctccagtgataggtggatcactccgtcctaaatagctccgggaagcattagccagctggacagtcaaatcattatccatattataaacatattttccttcagcattcaacatccctaatcgattcccgtcatcatcaaacccatctacataagccaatgtatttccagtatacggatcaacacctgcaaatttatacccataaaaagctcttaccggttgtccttgaatatacagactatataaagattcaaatgtagaattggtacttgctgaaatttcacttaagtcttgatagtacgtttccgtaaccttatccttatttttagtaaaattgactgaagtcacccaactaaaatcatccgtgcgaatattcaatgtccgtaaactgatctcccaacctttattattaacagatgcgacattcgctgtaacagcaagacgacctgttgatgccgcaattttcttttcatccaacaaattacgagtatcattattatagtaattgacaaccaaattaacccgattgttaaataacgaggcatcaaaaccaatattccgattctcttgacgttgccacttgatcgaaggattcgaaggatcataacgatccatgattttctcaccatcatatgttaaattaccgactttcctcagaacagagaaaggaagggcattacggtcaatacttccaacaaaaccataagaagctcttattgccaattggcttataaaaccgaatcgagtcataaaaggctcattatgcagattccattttccactcacattccaaagaggagagaaacgattctttgttccgataatatcaacaccatccaaacgagcacttccttgcaccacgtaacgatctttataactataagagcctgttacaaaaagagaaacacttctatcttgagattcagaatgtcctcccaaacttgacaacgagcttttaaaagccgattttatcgtcattcccgttaaatcaggataactcgcaacaccataaacatcactccattcaggaatcatacttgaaaaaccatatccttttgttgaagaaacttcctgtcccaaataagcattgatataatgatctccatcagaaaatccacgggcaaactctaattgattacgaattgtccattgttgagaacgcgaagtagattctttcatcattccattgttcatttcatccgggacttctccctctgaatagattcctcccaaccaagaattatatttagaagcgaaagatcctggaaccaattcctgcattgaatgattgtttgaattcgaaaaagttcccatagaagaaagcatcaacccctcaataatcttgaattctaatttcaagctcacttgattacttaagtatctcgatttcgctgtattattattcaaatcttctaaaatattaaaatcatattcataaccgtcttttatcgaactcttggttgaataagaactacgatcataaacataattcccattatcatcatacggacgttcataaggattagcgtaagtagcataatccaaaggattgaccggagaagcagaactacggtcgtttctcaacgtgctacgtacatcaaaatgaactcgtaaaaatctattgaaatcatgggtcaactttatagaagctcccatactttcatacttattatttggcataactccttcttgagaaaggtaagaaagactaccataatattgtgttctttcatctcctccggaaagagaaatactataattttgtgtttgagccactcggaaaatttcatcaaaccaattcgtgttgatcttacttaaccgatcaatttcagcgtcagcctctactttggatattttaccattatcaacatccttcaataactggtaaacccgtcctccgatattcagtccagggaaatcctcataaataccacgctcaaaggcgattttttccttagtattcatcattttcaaacgattaccaggagcttcactcaagccataggaagcttgaatgtttatatatgaacgcccaacagctcctctcttcgtggtaacaacaataactccattagcagcacgggaaccataaattgcagttgccgcagcatcttttagtacggtaatactttcaatatcatctggaggaatattaccaatcccactagtcaatactgtctcttgaaattcagtaccacccatactaatttccggaacatctcccgaaagaggcattccatcgatgatccagataggatctgtatctcctgtcaacgaatttatacctcgaatccggattgtagcttgagctcctggtcgcccagacaaattcataacagcaactcccgccatctgaccttttaacacatcttctatacttgtataccccttattggctatatctttagaagtcacgacctcaacagaacctgtcattcttgttttcttaatttcctggtaaccagttaccacaacttcatccatctcggtaacattatcttcaagtattacaacgattggtttctcttgctttttatactctattgtttttgttttcattccaataaaagtaaacatcagcatgatcttctcctgttccgggatgactaatgtaaactcacctttcacatcagtagcaacacctatcacagtccctttcaataaaacggaaacgcccggcaacaattctccctttttatccttcaccacaccctttatcgtaactttcttcacctcatccggtgtgcttacctttttttctgaaataagaacatagttatctttaacttgatactcgtactttttgcccaacacctgtgccagaatctcatctaaagtcccgctggtagaagtcaacatcacgttctgtttcacatccaagattgccgtgttgtaaaaaaactcatagtcactctgtttcttaatttgtttgaagatcgactcaatagtcccactcttcacgctaaacatctcctgcgcaccctgagaataaacatctctcgcccaaacgctggaggctgaaatcaataatagaaaaaatagatttcgcatgtaccttaaaaattttaccgatccattttttttcatacatttgtaattaaagttaatgactcactcacgaacatcgtctggtaaactttttcgtgaatgttgttatccatagatacagggaaggtgagatttccctgtattttattttcgggtaattaatatatgtttcccgtctacttgaaatttcacttccgtaatcatctcgatcaattccagtaaataactagcagaacgatccttttctgccgccccggtgaaacgtaaatcccgcaaagcgtcgtcagaataagacaccgtacaatcgtaccaacgattcaacgtgaccataatgtcttccaaacgcatatcttcgaaccggaactttcccttcatccaagagatataaagttccgggtctacctcagtcatctttacttgatgattctctcgattatactcgaatcgcatccccggagtaatattgaaatcctgctgtaactggtgattatgcacggtgacttccccactgaccaacgtcaccgaaacatcttgattcgtcgtgtaaccggaaagattaaaagaagttcccaacacacgtacgtcaatatctgccattttcacgatgaaaggtttatccgatttcgtcacgtcaaaataagcctcgcccgttaatttcacctctcgcacgtccccggtgaaaggcacagggtaagtcaaagcagaacaggaattcaagcacacacttgacccgtcagataagagtactcgaaactctccccctgccggaaccgtaatcgtattatatagtggttccgatttagcagtagccaacgtatagtccagcacatgggaagaatcattttttatgaccacgccttcttgctcctgaataatggtcgtactatttaaaggcacttcccgaccatcactcaattgcaatacagcaacaccttgcgcaggcaggatatcctgctgagtcagttcctgccgttccggttcatccgatccacgaaaataaatcactccacttcccagcattgctaaaataataatagccacggcataacgatagaacacaaccactcgccaagtccaaggcacatatatcttgcgtttgataaaaaaccataattgttctagtttaccttcaggaacttccggtaaattctcaacttcatcatcaaattgctcgtaccaccgggcaattcgctcttcctcttccggggtacatcgatgttcccggtacttctttaaaagatcgtatatttcatttatccccatattcgccgtatttaccttaaagacaattccggggaataaaaggtactatatgaaaaataaaaaatttttacgactcacctcgcatcggagcctacgtgtaatatcacctaactgattcttaacggtttgttcggatacggccaacttctcggcaatttcttttatcgataaattttgttcttgacggagcatatacacgcattgcaaacgaggtggaaatccttccacaatccgccgaatattttcatccaagtccttggccacgatcttcacccacgtgtaatcgtcctcttcatccgaagcatatatatcctgatatttatcacgaatctgctcttgtttgattgaattcaatatatgattcctcaaccaaattaagagatatcctttcacggaagacgaaacctgaaaagaatcttttttctcccacacctgaataaaaaagtcttggaaaatatcatccgcatcaaaggaactattcacacgtgcaaggatattccgatagacaatatctgcataccgggagtacaactcttgaaaagcagagacactcccgttctttatatcatgtacaatttcgatatctgatttttccgacacggtctaaactttaaagataaatattcgaacgtttaatgctatttaggaaaggtggatatccttttttagctttaaaggtgaaattcttgattattaatagaaaaaaatattaggattcttggtacgtatcgtaaaattggataattttgaaatatcattaaacgttcatttaatgattctttcaaaaaaaacaattgaacaactagaaaagtactatcacaacacgaattattcttcataaagcggttccaagtgcaacgggtggcaaaccacgaaacgggctccttccttataatccccatccacccatatatctccacccatcatcgtgatcgtcaacttacatatggccaatcccaaaccggttccctgcacgtattcatccagtttctcgaaacgttcgaacaccttcttctgtttatcctctggaattccccgtcccgtatcggtcacgctaaaataaacacaatcctgctctttatggatctcaattcctagcgtgatacttccctgttctgtgaacttattggcattcgacaacaaattaatcaatatctgttgcaaacgctgcacgtccgtctccagcataaattcttcacacggagtctgaaacatgtactccaccgcatcccgtttcccgtaactggtcgtagccagcacactctggcacaaagaaacaatctcaacctcttcataagacaacttcaatcgtcccgtctctaagcgggatatatccagaatatcattaatcaagcgaagcaataaatctgaattcttttgaatgattgccacgtactccttacgactttctgcatcacaatcgtccgaagtcagaaccccggaaaatcccacaatagcattcaacggggtacggatctcgtgactcatgttagccaaaaatgcagacttcaaccgatcagactcctcggccttttcttttgccttccgcaactccaattccgcctgcttttgcttggtcatatcctccatacgcaccacgacacccaataaattattatcatcatcaaaaacaggattcgccaacatatacacgtaataatccccatatttcacaacaacatcagccacttttcccgttttcatggccactaccgccggacagcaagaacaaggttcatccagtcctctcaaaaccttataacaaacttgccccttggaacctttaattttttccggatcgatatcataatcaatcccgttatgccattttatcgtgaaatccggatgaataaacttgatcccggaattaacattattcagtattaagatattatctttctgggcctgccacaaagcatctttaaaacgtttggttctaaaatagaaatataaggctagtaagaaaccgaacagtagaactaaaaaagccaaaactacccctataatctggtatttatattcctcgaaataggacaacttcttgttgtaaagaacagcattcttgacctccgctttattcaagaatccctctgaacataacttggtataatcaaaacaatactcattcggaatgatctgcatacccgccagcacggtcgaatcatgttgtctctctaacgccagagcttgtttggccatatcttttccgacagtcctatactgcggtacacatcccccgacagcccaatgccccatcccgatagaagtaatcgtgaaagctggaattttaggattcgccatcatcatcgaatacgtggcattccgcataaaataaccatcatttttatctactcgccacgtccccaacaagataaccgttttctccggtaaccgggcaatagcatcactgatcgaataaatcgtatgtttccggccatccaaaagaatcaaatccagccccgggaatttctccttcatctctttctttaccagagcctgcaaagagactcccccataactattatccgtgataaaagcgatatgcttggtttccggataaaaatccagaattaaccgaagattcgccaccacatcatactcgtaagcaaacccaaaaacctccaattcccgaatattatcactcatcacgtccacgctctccgcctcccagttctccaaatcagtacccacctccggtaacaaaacagcattccgactcaccattcctcccatgatcgggacatcccgggtaatcagtgaatcctgagaccaataagccgtccatgcctcctgccccaacagaataatgagcttcggtaaacctttttcgatattcttatccagtaattctttcatccgcccttcccacatacaagcctcggaaaaacttttacaattcatattctctatgtcaatcgaaaattttccgccaagtagaccatattcttctataaaatccgatatattcttggccgtctgggaagtttccgggttgtaggaactgataattaatatccgggaatcgggctcaccggcccctcctttcgttgtccaagaaacgaacaacaaaacaagtaacatccccgtgtacctaagattcctatatagctttacaaaaaactccaacatcttctatttgtaacttcgcaaagatatttattttcacataaaatacgccaaaattcatacactttctacaaaaagatatatctttggcttaaaccttaaatttgtaatttatgtctattatttcttgtatcatttcccggctaaaaagggacgaacagacagatacctacgtgcattttgaacaaactgccacgttacgggaaatcgttaccacgatagattcaccctatgtctttttctacacgaaatacccgactccccggctaggcgaacacgcacaaaaacgttttcttcaagtagcacaagccacgggagccgtcatgctttactctgattattacacggaacaaaatggttcgcaaactgcacacccaactattgactatcaattggggagcgtcagggatgattttgatttcggatcaattcttttattcagaacagacgttttaaaaaaagtgatcagcgaaatggacacggagtacaattttgccgcactctacgatctgcgcctgcgtctttctcgggaaggattgattttccggattcccgaattcctgtattcggaaaaagaacacgattcccgacgttccggtgaaaagcaatttgattacgtgaaccctcgtaaccgggaagtacaaattgaaatggaacaggctttcacggctcacttgaaggccatcggcgcctatttgcctcccgtattcaaaaccatcccgttccaagacgagtattttgaaactgaagtctcggttattattcccgtccgcaaccgggaaaagaccattgcagaagcgatacgatccgtcttttcacaacaaaccaatttcaagtataatattcttgttatcgacaatcattccaccgacgacacgactgctattgttaaaaagatggcccaaaagcactcgcaaataatccacatcattccccctcgcaccgaccttggaatcgggggatgctggacacatgccatcatgagcgaacattgcggacgattcgccatccagttggatagtgatgatttgtacatcaatcgacacgtcctccaacgcattgtcgacacgttccacaaacgtcaatgtgccatgattatcggtagttacaagatggttaatttcaagctggaagaaatacctcccggcatcattgaccacaaggaatggacgccggacaacgggcgtaacaacgccttacgtatcaacgggctgggggcgccccgagcattttacacgccattactccggcaaatcagaatcccgaacgtcagttacggggaggattatgccacggcactcgcaatctcccgtgaataccagatcgaacgcatttatgaaccgctatatttatgtcgtcgctgggaaggtaattccgacgcagacttgaacatccaacgtgtaaacgcaaataattactataaagataaaattcgtatgattgaaatattggcaagacaacgggaaattgaaaatgaagaaaaatcaaaaatcttaaatcctaaatcctaaatccattctctgtcatgtttttcgacgaatttacgaaatcacaactagcctattggcccttggcccgaaataattacgaacacttacggaatgtcatttatcgtacgattgatttcgaggggttccagattcgtatccagcacaacccggaccggattcaatcggccgtggctaaaatagacgagcaatcgatcaaggcaagagcctgttttctgtgtaaaggaaacattccgccggaacaagctagtttcgattataaccccacgctggatatacgagtaaacccttatcccatattcgaccgccattacacagttccggcaaaacaacacattccccagctcatcaagggacatttccaagacatgctggccattgcacaaacttattcggagtacacgatcttttataatggtccccgtagcggagcctccgccccggatcattttcatttccaactggcagcccgtcacatcatgcccctagaaaccgatgtaaactcctgcccgaaagaaatcttgtggatttccgaatcacgggaagccacaatcgaaagtatccatcactaccttcgcaagaatatcatacttcattcaaacaaccgggagcaattaatggatattttcgagcaattagtgtcactcgtgggccaaatcaccccgaacgacccggaacccatgatgaacctttttgcctggtacgaaaacaacgaatggtgggtggtcatattcccccgtcgtcaacaccgcccgtggcaattcttcgcggaagaagatgaaaacatactgttcagtcccggctgtgtcgactttgccggtctgatcatctcaccccgggaaaaagatttcaaccgtctggacgcccccttgttggaagaacttttttcccagttaacccttaccgatgagcaattcaagaatttgcgatttatgattaaaaaagacattaaaaataggtaattcagaaatggtagccttgtgtggctgaaatttaaaatctaaaatcatgaaatctaaaatcaactcgccgaaggcaatcactctttccattggcatccttttcgctcccgccatcaccttccgtctgaatggaacctactggaacaaggatcaaaaatattccggagaatataccatttccaaagaagggaagaacttgattctacattcatcttcaggaacacagatcgtaccggatcatttcacccttacaccggaaaacgaagaaacggcaaacttcgatttgctcaatgtcatgatcgggatcaattttcactggcaacgcacggaagaccagaagttcaaaggtacattgaaaatcatggacgagggaaagcatctgacagcaatcaacatattacccctagaagattatttactaagcgtgatctcttccgaaatgagtgccacctcatctttggaactcctgaaagcccacgcggtcatttcccgcagttggctgatcgcacaaaaaataaagagcgagaaactaaccgatgcctaccactcctgcatacaggatgaacaacaatatatccgttggtacgaccgggaagaccacgagaatttcgacgtatgcgcagacgatcattgtcaacgctatcaaggcattagcaaagcttacatgccatttgtccgacaagccatcgaggccacccgaggggaaattctcgtgtatgatggtgaaatttgtgatgctcgattctcgaaatgctgcgggggagtaaccgaacattttgaaaacacctgggaacccgtgaagcatccttatctgacaaaagtggttgatagcgatacccagtcttcaactcccgacctatcccaagaagagaacgcccgaaaatggattctctccatcccggatgtattctgtaatacccgggacaaagccgttctgtcaaatgttctcaacgattatgatcaagaaacccaagactttttccgttggcaagtgtcttacactccccctgaactatctgcattaataacatcccgtatcgggatagacttcggggacattcaatccatagaacccgtggaaagaggtgtctccgggcgcatcatccgtctccgtatccaaggttcaaaacaagacatgattatcgggaaagaactcgtcatccgcaaggctctctcccaatctcatttatacagctcggcctttatcgtggaaacagagaaagatacctccggagctattacccgtttcaccttgaaaggtgcaggatggggacacggtgtcggtctctgtcaaatcggagccgcagtcatgagtgccaaaggttatgattacaagcaaatcctctcacactatttcccaaacacgcaactacaaacaattgaaaatggagaattgaaaatgaaaaaagtgtgagaattgtgcggctggaatttaaaatctaaaatctaaaattatgaaatccccttggtcctggatccccactctatatttcgcacaaggtctaccttacgtcgttgtcatgacacttgccgtcatcatgttcaaacggttgggaataaacaacacggacatagctctctacacgagctggctttatttaccctgggtgattaaacccctatggagtccgctggtagacatcgtgaagaccaaacgctggtgggtcatctccatgcagttagtgatcggtggaggattagccggaatagcactgactcttcccggacctcacgccttccgctactcgttagcattcatgtggttattagccttcagttccgccacccatgacattgcagcagacgggttctacatgctgggacttgacaccaagaaacaagccttcttcgttggtatccgtaacacagcctaccgcctcgctatgctcacgggacaaggccttatcgtcatgctcgccggttggcttgaaaagacctattcttccacgctcccggaagagatagccgttccccgggcatggtctgtaaccttctacctgttagcagtcattttcgtactgctcttcctctatcaccaattcattcttcccaaaccaaaaaatgatgttcccgtgaaaaacggtaacccgctgaatgcctttttccaaacctttatcaccttcttccaaaagaagggaattattgctgccttagcctttattctgctcttccgttttgcggaatcacaacttgtaaaaattgcctcccctttcctactcgacaatcccgaaattggcggtttaggcctaagcaccatgcaagtcggtactatctatggtgttgtcggactgattgccctcacgataggtggaatcctaggcggaatcctcatggccaaaaatggtctaaaacattggatttggtggatgactgccgcaatgaatctacccaacctcgtgtatgtctatctggcatttactcatccatccaacatttggctaatctcctccgctgtcgccatcgaacaattcggttacggattcggtttcacggccctcacctacttcatgatgctcttcagtaaaggcccgcaacaaaccgcccactacgccatttgcaccggattcatggccctcggcatgatgctccccggcatgatctctggctatatccaagaactgatcggctaccaatacttctttctctggatcatgctttgtaccatccccagttttattgccgtgaaatacattaaattaacgtaatttcgatataacctagaacaatttcagttacgggggtgtgtcaaattttgacacacctcttatcacatcctctaatctaaatgtaaatagtgggacaactcctcccaatgtatcaaaattacctgtcagtaacaatagaattgtattaccaaacaactatattccaagtgttacatttacttaaatcccccccaaaatggcggttaaatgcgagctaggtcgcccaacaatagcctaacaagtgcccaacaatcattcaacacagctacatatcttaaatccgaccctattatttccttattatctgagaattgtcatcaccttataaaaacatgaatatcaatctactaaacctctattcttttatcagtttcaattcttttacaccaatccgggctgccaaccacgcagagaactgatactcttctttttcagttagtcgttgctcaaaagccacgatagcaacatacaaggtgtcagcacgcaaagaatccacttgattacgaatcaccctggatattgcaagacttttcacggaaggataaagaatcttcacctcgggagtaacctgatgtccgatcgtatcatataacaaataagagttcaacctctcgcgcaacacggaaatttcttcctcttgtgaggcaatccgctgtttattctgcatatagtaatcctgtaacaacatattactaacgtcattttgcatctcggtatcctctttcccgaatccctgatgaatcaccagaggaacatcatgcaacccgtaatgcaacatcttttctttcaacgacacgatcacttcctctgatatttccttaccaatcaatgatacttcaatccgacgttccggattctctgttttcacgtaacgatccaccaccaacgtattcggaaaattaaattcatttttgataaatcgactggcattcgtctcaaagatattcgtcttcaccatattgtaggtgatatacacactcggaaccatcgtcaggaaaatgattgagtacacgatacggtgtactttcttttcccgttccttatccatgaatttctttttcgaaaaatgcatcaaccgtacccctaaagtcgtggcaaccgcgataaataccgaattgatcgtgaacaaatagaatgccccgaagaaataactcaggttgccgctcgctagcccgaacccggccgtacacaacggcggcattaaagcggtagcaatagccactcccggaatcacgtttccttttaacttcgtcgaagacgccacgattcccgccatcccaccaaagaaagcgatcaacacgtcatagatcgtgggggttgtccgtgccagcaattccgaacgagcttcgttcaaaggcgataacaaaaaatataaagtagacgttaacacgctgaatatcgttgcgatcagcaaattacggaaagccttcttgatcagttcaaaatcgttgatcccaactcccagaccgattcccataatcggccccatcagcggggaaattaacatggctccgataatcacggccgtcgaattcgtgttcaatcccaaagatgcgataaacgtggcaaaaatcaatacccacaaatttgtcccccggaacacaattcccttacggatagcctccaccgtatcttcttcccgctcttgttcatctgacgggtccaagatttgacgcaaatacacccgaaaacgctgtaataatatcatcatactctaaatctatactacaaaaagctgaaaattgctcatatttttaaatcttcgcaaaagtataaaatctattacatattcttccatttcccccatatataaaagaactaacaataaatgaaacgcccccaagagcttattatcaaatttcttgggggcgactccatacaagaacaaactggttcttataccataatgagctgttattttatgatctcaacaagaacgcaacgattccactcatccttgtcataacgagaactaacacctttatgatctttcacgatacggtctttatttattccgtatttactaataaacatatcagcaaccgcattcacgcgtctttccgaaataatcatatttgctttttctgttcctcgtttatcagcaaaaccggttaaacgaacacgcacatcggggttttctttcataaattgaaccaagttgtaaaccccaacctcctgagtaggatcaatttttgaactgttgaaagcaaagtttatcgttgtcggtaaagccttaaatatcacgctattttcagctgctggagcctcctgtcttaccactttaaccacggtgtccggggtacgacgaagcaattctttgatttgtgcctcttgcgcttttgtcagactctgaaggtctgcatactgtttctggctaacagcctttttaaatgaacggtttttgaatctgaaagtaaccccgacactcaaattactaatcccgtcattagggaacccgcctctggtcacgagatcatcatccaaaatcatcccaccatattccaaattcaaatcaaaacgttgagataaccggaaacgagcttgaatacctgcattaattgtaaaagactgatcactaccgataaaagcaccacctattccagcaaaaggtaccaaatcaaagcaacgattctcgttgtaacgaccgaagaagtttaacaaaccaaacataaagtctccatgaacagctccgtaatgcttgtgtaacatcgtttttccgttattttgaaatccatgtagagcacctcctaaaccttgaactctcactccccaccaaggtgtaaaccatttaccaacagacaaggccggcataaaggttaatcgatcaccgaactttgcatcagtagacccctcagcatagagggtttgagcccctaaattcaatgaaataaaccaattatcccaaaatttgttagtttcaaatgatgttttataacccggcagtttcttttcctgattattctgcgcaaacgtagaaatgtgtaatactaccaatagtactaaaaatacgatttttttcatttcgaaatagttaaagtttatattgcaacctttctcaaataaaattggagaaaaacgccgcaaatgtataaaaaaacaattactgtattttattatacacaaaataactacatctttatcgctaataatcttagaacgtgatcttcaagttcaccgaaaaagtacgtccgaaaccatagaaaaccttagctgtatctttattatgcccagcaccatcctccgcatcagcgatatactctttatccaaaagattattcacgttcgcgaaaaccatcacgccaaacatcttactcaacgggaaccgatagttgatattagcatccagaacaccatatgccggcattctccaaggagattcaaatgctttttcagctcccaaatcataccctaaagaaggagtaaactttgcataattacgggcaaaatgagaataatccacttccacatgtacccctttcaaaaactgataacttccccccaaagtaaaagtcgtctgtgcggaattacccacacgcacatccttcattttcacaacattctgagcatgattctctcccccgacctggtttaccggatctccattcttatcaaccggttctccggatgaattataagcatatcctttaccgtctccattccaatgccaatcacccatggaaaacatcccggtaaccttcagatctttcaacggacgtaacacgaaatcaacctcaatcccttgatgtaacgcatccaacccggtcaaattcacccgcacccgttccccgttcttctcaaagaaattggccaacgtcttatccatccatgaagtacgatacaaattcacgttggcatccaaccaagatgaacgaaaaccgtaccccaactcaaaagtaaacaccttctcgttcacggcatccggattcgtctcgttactcacatcctgctgcaaaaatactccaccttgcatgtaaggagcccgggaaaaatacccaatatttgcaaatacattatgatgatccgtcaaattataattcgccccggcttttaccgttccacccaagaaactctccttatccgatttcgcctcatttttcgaataataaaaacgatctttccgccaataagttatatttgaaagagacccggcaacaaacatgctcaaagcatcccggttatattccccttgcgcaaagaaaccttcctgcatcatataaccatcataatcacggtaaacaatatcccctttcttcaattccttgttttgccatgtataatcgtcagccttatattttacattcatccgactatcatcaataaaatattttcccccatacaaatccacgatctcattataatgctttcctttataatagcgtaaatcaattcccccgtatacatcaaaatattgtcccagtttggtcgtatatgtagaaatcaatccataccaattatgctcgttccggctcatagccatgatcatttccgaaccggtcacacttatcgaattcaaattataaacagccgtataattaaatgtcccatcggctgctctgaaatcacccgtcgtaggctcccccttcgaagttccataccaatcatatttatgagctttattagagcgtcctccatatccgcctcctcgccctaaagacaagtaaagcacgctagacaaacttgacttatcgttaatctcccaaaggtgattcaatgaaatttgaggcttgtgatatttattatatgccgaaactttccgcaccttctctcctttccaatctgcaaaaccgtaagatggattatacttcgtatcatccaacttctcccaagccttgataagcatcttatcattcctattacgttgattatgccattgcggagcaccaagagcagttagggacaattcatgattctctcctaatctcttggaaacattaataaaataagagtatcccacgaaatctgttccttgtatatacccgtccccccaagttcttgctcccaaaatagacatggcccatccattttttaacaaaccggtagagaggctaaaagccactttgttataaccatcattccccactccgtacgaaacagaacctccgacctctgcattcgtcgtattcgtcacgatattaatagaaccgccaacagacggcactgcaatctttgatgcccctaatcctcgttgtacttgaataaaacgggtcacatctgacaaacctgcccagttggaccaatagattccaccccattccatctcgttcacgggtaccccgttcaccatcacggctatattctccgtctcgaatccccgcaaattaatccgtccgtctccaaatgcccccccctctttcgtggcataaacgctcggcaaagatttcaatatctccggaaattcctgtgttgaaagcttctcttcgatctctttcgcagtcaccaccgacaaggctaccggagtcttccggtccacggccaaagaacctttcaccaccacatctgccaaattaatatattccggcaacattcccactgtccccagatccatctttttatcatccacaacaacactttttttcacttccgaataacctacactccgaaataccaacaccaccgttcccaagttttctatctccaattcaaaatatccatccgcatccgtggcacacccgactgtcgtaccctccacgttcacggtagccccaaccaacacctcttttgactgagaatcaacaactctccccttaattaccccttttgccatgatattccacgacatacctaacaggaacatagtcccacaaatcacctttaataacatgctcatatcacccttattttaactcaacaaacaaagtacctactatttagcacaaatcatgcttgcgaaggtaagtatttatttacaacactcctaatcatttattagttttattatgcagttgcgatgagatgttcataatcagaaaaaaaggtattcttccaaacaaattatcgaaaaaaatctagcaaattttgcatataaaaaagaggtgcccatatcgtcaacattcactcctttaacctccatcagcttcgccgccaagagagtacggcgaagccggaaggaatctgaatatgactttcagggcttcctcttcaaaagcacaccatcaattcaatcgatccgataaaatcaaaaattcctatcttcccctcctccttaacaaaataaagactgcagcaaccagcatcaaacaaggcaaaatccaagacaggaatatatcccagaaacgcacaagagaaccgccaactttataatcatcatccaaaagtgccggtctacgaacatcaataggtacctcgccatccgacaaccaataaaatccccccataatcaaagtgtaattggcagaacgaattcccgcacgtcccatactcaactctccattgctaatacaatcggcatcccccaagattatgattcgctgttcacgttcccccacctgacgagtcaacgccaccgaagtgatatatttctgttgaacctccccgctggcaacatccaagcttacagaatcatctacaaaatctgttgtctgcaactcattccataccaacgaatccgtctcaaacaacggggtcagcttaaatcctttatcttccccgtatgtcaaagcagaagcagaaggcattgtcacacaatacccttgatccaatatggctccaaaataatatatttgttcacaagcctcccgagttggtaaagtctgaattaattccggggcaaaatcctttgtcggtttaaccagaatacccggcaccatctgtaccccaaaatctgccaaaacaggccccataacatccctcctgttcggttcactcaggatgatcaaattccctccccgggcaacatatttttcccaattcacccgttgttccggtgtaaacggactacgcatttccgcaagcagcaaaatattaatctcttccgatatttcattatccaaagaaacctcttttacatcaaacccttgattcatcaacgcataacgaaaatgccgatcttccccgaaagccgtgtaatttcgatctccggtctgatggatattccgttctccatgtccggttacaactcccacggtcggcaatttcatggccagcctcttcatcgctgccgtaatctcggcctccttcggcatccggtccattcctctgaatatgcgtaaaaatgtcttttccccactttcccgttccaacactctcacaaaccaattatcctctctcactaaatcaattttcgctcttatttgttccggagtcaacacctttgtcgaatccaacccgtaaattgtcattgcctcatgcgcccgttctttcaacgatttagtctgcatataccgactcggttccaccccaagaagcgtatcataataatacacgtatttcatctcaatttccggtttgaaacgagtataatgacggaaattctgctggtcagacttgtaagcgctaggtactccccaatagatattattatcatccaacaaatttacgtaggtcgtaatagtcaatcctccttttaattgggagatcacttcctgactatgctccgttaaagtatttcttttggtagcggtggcatcatagtaggtcatcaaagacggacgagaagtaaaataccctaataccacaataaccatgatcacccctagatactgtccagatgtttttgtccaccgttgtttctgccgagcggcttgcaaacggatcgtcgctaaagtcagaaacatagctgtcacgatgataaaatacagtaaatcttcactacaaatcaatccccgaataaactcattcgcccgtccggaaatagaaagccaataagtgatttcccgtacgaactcaacatcctgccacatacttcccacgtaatttaacacgcccaaaatcgtcaaggtcagcatggccgccaccacttgatacgaagtcaggctagacatgaacaacccgaccgccgcataaacacaaagcagcaaatacaaccccagtaatccggtaaacaccatcggatagtcaaaatccttaatggaacaccaggccacgacaatataaattaacaacacgaacatcatcaccaatccgtatatcatcatagacaaatacttaccaaaaataatctgtctgttcgtcacgggtgaagaatacaacaatttgatggaaccactgctcaactcccggctcatcactcccatggtcaacagaggaatgtacaaatacaaatatccctgaattactggaaatattccaccgctccattgatccacaaaaagtttgtatgtcaaatccgacaaagagtatcccaactccttacccataaccattcctgccagatgtcccccgaaaattccggcactctggaacgtgaaaataatcaatatcaaccacgcaatgggagaataaaacaaagattgtaactccgcacgtgctatatcatatatatttctcatactatcctattttattatttcttgattttagacaattcggcaaaaatatcatccaaagaacttttctccagccggacttcagtcagtcgccaatctttcgcaacactggtctgcaccactctctcgatcatttcttgaggtgagtcagaaaaccgtaaccgataattcgatcctcccaattcatccacgtcaaccaccccggggagctgctttaattcctctatcggtggagctgctaccaacgtggcaaacaccgtgttcggtaaaatatagttatcaaactcatccactgtaccggaaaaaaccaaagtcccctgcccgatcatccgtatataattacaggttgcctgtacctccgaaagaatatgagtagacaaaacgaccgtacattcttcggcaatcgctttaatcaagtgccggatctctaaaatctgattcgggtccaacccgtttgtcggctcatccagtaccacgaaatccggacgatggataatcgcttgagcaatacccacccgctgctggtaaccaccagacaaattatgaatcagcctttttctaaaatgagaaataccgcaacgtgccagtacctcatccacgacctttccttcctccgcccgggcaatctggcgtaaccgggcacaataagtcaggtattcctccaccgtcaaatccgtgtgtaaaggaggtttttgaggcaagaaaccgatatgccttttcgcttccaccggattatcccgcatatcaattcccttgataaacacgttaccttcagtttgtttcaacactccgcaaataatattcatggtggtagatttaccggccccgttagagccgagtaaaccgtaaacaccattttgagtaatttcaaaattaatatcccgtatcgcccactgcacactatagcgatgcgacaggttttccacctttaaaattgattgttccatacaatgatttatataatagtttacccgacgaatagacttatccgtcaacatcctttcaataattttgaattaacaatcagttttcgttatagctacgattcctgggtttatacaacatttccacgatctccccggcaactctttcttctttccatttcaaccctttcgtctcaacatcataacaataaacagctcctcgatactctccgttcggggcatctactgccacatacaattctgatttatcctcatttaatatcatttttttgatcaaactaccggaaactcccacggtataatccgattgcgtcgggaaatttcccgcagacaaataattatagcgataaatctcgtttccaaccgaataatacaaaatattctctttcgtgcttgatgcaaacacactttggccatttatttccgctgccgccggatataccgatttaaattcaaaaaccgtaacttttgaccaattaacatattgctcggatatattcagatataccacctgattttgtccattcttatcttccaacagaataagtatatcttcttcgcttaccccaagaagcattccatatattctatccacttcaaccacttcatctccgtccttgatcggatgaggcaagacatcattcgcactaaataaaacttgattcttcatgtcaaatgccaacaaatacctatgatacttttctccataaacaaccactcgatcagacaactcagcatccgggaaacttccatattttcccgttaacccctgttgaaaattattccggaaataagcgttatgacaatcataatccaatgtttttccatcagtcataatatacaaattatgatctttttccagtatccgatccaccccctcttccgggtaagcgatctcttccagcacctgcatcgtataataatccaatttcaaaaaacggaaaggattctctgtaacaagataaatataaggggtataatattccgttggagagcaaactatagctaccggctcagttcccaaaggtatccccgcattattcaacgcatacacatctttttcaaaccctctctccggccagttatcattacggaaagaaattatcgaatgcccgtcatatttactgaaaagcaaaagaccttcgtcataaggattaggtactcgcaatttaaactccttgaaaatagctccatcctcattataaaccttcaaacggcaaggaaaaagtccgcaactatcataagcatacgtcaaaactcgctctgttgaaactacctcataattgatctgccattcatacgacaaagctttatcttgactttcctgcttcatttcgggagcttcaatcataaattctacgtttctctccgcataatacaaggtatccaactccatcttaaacgataagtaagaaatggcattttcacccattttcgtctggtcatccaaacaaccgatcaacgaaaacaaaactacaacgattgatattaattgtttcatctgctctgctttttaattcattaaaaatctactactcgtaaggccacggtgttgcttcgggaaactccataccaaactccggatgtaacttaaaataatcatacatttttttcccacacaaaatcacttgaatcatgcgactaacatactcctcataactgattggtccaccccagtattccatcattttctgatacttttccggacgataagccccccagtacacgaactccaaagcataccaccaatccggttcctgcaaataattactaaacaccaccttactctgcaacttttcctttacacccaacccgaactcatcatttacctccaaatccaacacgatccgatacacagtgtctaccatcgggtctattttacttctcaacaattcgatcgggatataagcattcacggaatccttatccatcacaaattccccaggcaacaaggtataaacatcttccggagctgtcgttaagtctttatttacattaaccttaaacttcctactctctccaagaggttcccccaatactttcaccggaacctgcaccgtgtaggtttccacatccatcagcatctctcccaaacgacagataagactgtcctttacaaaataaacacggtctatatcctcgtaatacccgctttctccattttcatcacaccctgccaataaacaggccgcaaacacgattaacaatatatataactttctcatctttttatatttattggttagtaactccatattcctgctcggacttaggccatggaagaacaaaaatatccttggagggaactatatctactttatcttgaaaatcccggaaacctaagttatgacacttgtaaaaaccaaacatctggccttccccgtaaaattctctcatgcgttccctcgtcatctccttcataaatttatcccgcgaatcaaccaaggacacctctatatcggctaatcctctactccctcgaactgcatttaaataatcgagtgccttctctttatctttcgaataatttacctctgccaagatatagtacatttcaggcaaacgcaccaaacaacttcctctaaaatagagggttggtttattacttgccatctccgtcgaattcaaaagtcgaataaaaagatgcccgtcataccccttatcctggaaaaagcttgtatatcgcaaatccttactatctgccgtaaattgtgccacctcgtacaaagcttttatatctgtccgttgagatgcattcaatgtaacagcattattcaagaacaattctttataatccgtgtacattttattggtaaataccccccaaagcaactccgtgtgcttcccgtaacgttttacatgatcgaaattctgccgttctgtcaatcccacttccggagaagcaaccactttatccgcataataagcggcactatccaaatcccctttggtataaaataccctggccttaatcgcccatgcggcgtacaaattacaatgtgaataacgtttcttatgataagaatcttctgcaaaatcattataaatatcaccatccccagccaaattacgtgtagccacattcaaatctgccaacacattatcgtaacactgtgccaacgtgtagactttcttattactcaaatcaaacgtataggcataaggaattcctcccgcctccggattcgttcggtaattatcacaaaacaaacgcattacctcgaaatgtaaaaaagctcttaccgcataggcctcacccttgattaatttcaagtctggatccttatttaaagcctcatgatctacattgacaatcacattattcacataagaaatacactcatacaacttcgtccagatagattctatctgcttttccatccgctgatccttataattataaaccgaggcatacttaatataagcatatttactagcggtccacccctcgctcgcatcagcaaacaacccgtattcatctccgaactgctgggcaagaacatctaccaatccccaattcatcatcatcccgaataactccccttgggccatcgacgcataaatcccgtacatcgcatcccgatatccttgcacgtctttaaactgctcatcctgaattaactccccctccggcttgatatccaaaaagctgttgcaactacccaacgaaagtagcatcagcatcaccatccaaatatatcctctatttttcatatcatctgttttagtagttcgtatcaaaatgctgcactaagcgaaaattcaaaactccgggcgaaaggatacgaaaaccctcgttcctgcttgatcgttgaagcccggaacacgtcattcatcaagaactccacccgcaaacggctcaaataaagtttttgacaaatctccggggtaaaatcgtatgaaaggctcaaactctgcatattaaccatatactcgtcccgaacaaaacggctggtaatatcaggagttgtctgatctgcaatattcttgtatttcacccgatcacccacctttttccaacgactatggaacactcgtttatccgcattacgttgcggattggctccttccacccgggtaaccaacgtctggttataaaccgttgcccccaactcgtaattaaacaacatattcaacgaaaatcctttaaacgtcaagtaagtaccgaacgttccggataacgtcggatctgaatccccgtacgtccgtttatcccagtaattataaacaaaagttggattaccgaaacgatcaataaaaacttcctgtccggtagccggatcaatccccccggacttcacggctttcacggcactcaaggattcaccttccacgtaaacaggcggcggcaacaacgtcccctctgccgtgttcaactcctcgttcatcttttccaacgcattactgatctttttaattttattctcgttatgctgcatatttaacgataatgaccaattcaagtatttattggaaattgccacgacccgagtttgaagctcaataccggtatttaataatttacccatattttcctttgccgtcgtcgttcccacggaaggagcctttgccacatccaacaacaaattatctgttgtcttgttataatactccagcgtaaaatccaatcggttcttaaataaaactacatccaatccgacattataagtcaaggctctttcccactttaggtccggattaccgatagccatgggaatcgcaccaatccctttgtcataatccaacccggcatcatacttataggttgtcattgcctgatagggagaaaaagaagcgttaccggtatatcccaagctcccgcgtaatttaatcctatccgttcctgacatattcaaaaatttctctttatgaatattccatcctaatcccaaactccagaaaggagtgaaacgctgatcctctccgaatttggaagacccctcgtatcgaatagaagcatcagcaaaataacggtcatcataaattacgttagcattcaaaaataatcccatagaacgctccaatccttgacttccttgcggagttgcaccttccggataccttgtcgcaaaagcgggatgtcccaatttatccgaataaagcccaactgccgtataaccattaccattgttttccgaagattgtatgttcgcacctcccatagcgttcaacaatgttcccgttccaaacatcttattataagacaaggttacacgtccttcataagtcatcgatttcttattagatatttcaatcctcccggattcggaagcctctttgttattaaattcatgtgcttccggagaagtaaatttttccgtatcatcttttgacttattcaatgagaaaaaaccttccacccggaaacccggcaaaacctccacacgtaaatccaacacgttatttaaataaaactgctcgcttcggtcataacttcccaaagtcgcctcgaataacggattgggaacattaaaactcaacaccttatttaacgagccatccaaattataagcccggtcataagggttcaactcaacatacttattaaaagttccataaggagactcctcactattcaccgaggttattgttgttgaattggaaacataaaccttatcctgtttgttatatgacaatctgaaattcaaagaataacgatcacgttttgacttttccattaccccttgttccgaaccgtaacgagctcctaaactataacgaatatactcatctcccccggctatattcaaattatgattctgtgaaacagaattacgcaacggcttggacaaccaatccgtatccactccttcccgtacccgcttgaatttttcattatattcagtatctttttcatattgaaattttccattgtcatcatataccccggccaatcgttcgtactccaatttttctgccgcattcaacaaatcataatcccgcacgtctggaattgatgtccgtaaagttccgctataggaaacccgcaactttccggcacgtaaaggttttgttgtgatcaccacaacccctttggccgctttggaaccgtacaaggctgaagccgaagcatccttcaacacggtcaccgtctccacgtcattcatatccatatcaaaaacataatccaaatcgacttctgccccatccactataaaagtcggtacattggatgatccctcgaaactactccgaccgcggatcaaaatttccggccgcgtgttcggatcggatcccatctcgttgtttttcacaatctgcaaacctggaacaaaagcaaccaaactctgcaaaagactttttgtgcctacgctcatcaactgttgtcgactcaccacagtcgctgaccccgtaaaactattttttgatttatttcccatcccggtaacgataacttcatccaatttctcctcctcggaatgcatcacaatttcaagattctcctttatgaaatcctttaccaccacttcctgcgaaatcattccgataaaagagaacaccaaagtcactgtttcattttcatctataaagtgcatcttaaactttccacttgcatctgtggccgttccggtagaagaacctttcaatataatcgtcacccccggcaacggaaccccatgctgatcctttacaatcccggagacacgccagactcctttctcctgagcctgctcatccttttgcggactaatgacaatcacatgatccacgatttgatacttgagcgccgttccttgcaacacgtgatccaaaatttccgataccgttgcatctttcacggacacggaaactttcactcccttcacttcattgtcattgtagaaaaactcgtaatcagacttttcactcaattcattcagtacttcaataagacttacagattttttctccatagacaacttggcattctgagccatacttcctgccgacacggagaaaactgcaaacaacgatagaataagacaaagtttcataatcgtacagattttttttaaggcagaccatccccctgcccttacattcggtttttttttcataactttgtagggttaaattgtttatatcagaatcaatttttcaatgaaacgggaagtggtacgaacacctcctgttttttattgtattattattgtgtttcctttcacctgaaatttaatatctgttgtcatctctatcatcctcaaaacttgggatatatctgaatatttcggtaaagaccccgtgaaacgtttttgcttcatcgaagtgttcgagaagaagaaatccacattataccagcgggacaacttccggatgaccccctccatatcctcactggaaaatgtaaatcgatccaacctccacatggaatacaatttggtgtttacctctcggacaatcatctcttttccttgtaacaacgcctgtttaccgggtgtcaacgtcaccttttccccgttaatcttatcatccacctcaacccgaccttccacaagagtcgcatgactattctcctcatcttcatatgccgacacgttaaaggatgttcccaacaccttcacatccatatcccgcgtttccacaataaacggagccacttcattccggaccacttgaaaataagcctcgcccgtcaagtaaacccgcctttcattaccgacaaagtgagcaggatacctcaattcagaagcactattcaaccaaatttccgtcccatcatccagcacgatcttgtactcccctcctttaggaatccgcaacgtgtgccattccggcatccgcgaaagcgcagataaggaatatttcaaactaccgtcctcgtttatttttaaagtctcattctctgcaaaattcaaacaagtatctttcaatccttgtaataacaattgttgtcccttccccgtgatcaacaccgcctgagttctacccggctcaattcgggcaacaataacttgttcctctcccgatcgaaatgaatccgttatttgcctgtacaacaatcctcctacggcagcgaccaccaacacggctgccacacttctccatatgctccacgacaaacgggatcttcgggaagttttatccatcacctcctttaactgactccaacatcgagaagtatcaaacgaagcatacgttccgatttcccgccgtaaaacttctttatcccgaagctcctccatcaactttcggtgccgctcgttttctgccaaccacccctgaagtcggatcatctccttctccgaaatgtcttcccgcaaataagcaaggagcaactcatatatctcttttcccattttcatgtatcttatttcacacctcaaacacactcaactaggaaataggtgacaagagcattaaaaaaaatcatacatttttatataaacaccaccgatccactatatcaaagccacggataccctatcatttattctcatccgctcataacttcacgtataacaaatatacacgtatatccctgccagctgcaaacaaaattgattcaaacacctattttatggaagatgaatgcaagataaatgcaggatgaatgctctatggtctaaatgaactataaataaaataccaatcggatcacaccgaaagatagggaaaccttagagtaatcccctcgaatcataagcccgggaaaaacatacccgcataaacgaacaaatctcccaaccttccccgcaagtaagactttgctcgctgcttttgagtttttatcgtgttcaaggatatattcaactcttcggcaatcttccgttcctcttggccatccacgtatgaacgcttaaagatttccttgcatctatccggtaactcatcaatcgcatcaaaaagttccgccaccacatcagctcgaatttgctgacaaagaaaatagtcttcatccaactcttccttgttcaaattcttataattccgatcccgaatttccaaatcccgaagataattcaagcaccgatgctgcacactattataaagaaaagtttttatcgtttttacgttaggaaaaccaccccggtccattttccaaaaggaaagaaaaacatcctgtacaatatcctctgcctccgaatgatcccgcacgatacgagccgcaaagaaacataacgctttatggtacgtctcgaacaactgttggaatgcttcccgttctccccgttccagatatttcataaactccggagactgaatatcaatactatacatcaaattcctatacttaattttgctctccaccccctctcggaaactcccgtccacaggattacttacaaaaataagtattattttaccaaatcaaaataaatattccaaatatcaaaaagagctgtcttccattcggccgacagctctcttctctttacttattcttagttgataacctgatcttatatcacgtgatttacttttctcttcacattcactttcacctcaggaagactaaccggtccgaagatcgtatcttgacttgctactttctgcaccggagcaaccgcggtagcgttttccactttctcgtgatcggcaaaagcacatacgattttttcagctttagcttggtttaaactacgtccaccgataaacactgtaattacagccacgaatactattataatatacttcatcattttattttatatttaaaaattagacaactatttttatgaactctctttatttcgttgttgttatctttcaacaatacaaaagtacgacacttccctctaccgggaaaattatccaagttatactttagttgtcacaaggttaaatatatgttaggcctaaaaaaagcaatccacccttttataattattaaccaagatggttcccccacacagtaaagggtttaacgggcatttcacgctaaaagccacgcgttaacgaaatcataattcaccctcttaaagctcatttttttaagagatacaatttatcgggaaatcttgattttatgctgatatttataaaaacaggcataaaaaaagaatgtaacgaagatcattttagtatcattcgttacactccgtaataatcctatcgggttaacccgtgtaaatagtcgttatcgaacttccgatcccggtttcacctctttatccggtgaaacaaaggaaagcgttccatcggcattctcggccatcaaaatcattccttgtgacacgatgccttttaacggtttcggttccaagttaaccaacacgctgacttgacgaccgatcacctcttccggcgtgtaatgctcggctatacccgaaacaatcgtacgttcgtcaattcccgtgtccacggtcaatttcatcaactttttggtcttagccactttctcggcagcaatgatcgtacctacccgaatatccattttcatgaaatcctcatactggatattctccttggcaggggcggccttcacggaagccatctcgtttgctttcttggtagctaacaatttatcgatctgggcttgaatcgttgcatcctcgatcttctcgaacaacaatccggcctctcccaattcatgcccggcaggaatcacgccatcacccattttaccccaatcaatcacgtcaatattcatgaactcacgtaatttctgagaagagaacggcatgaacggttccatcaacgtggaaaggttggcagaaatctgtaaacagatattcagaatcgtcttcacccgtccctcgtccgtcttgatcactttccaaggttcggtatccgccaagtatttattacccaaacgagccagattcatcgcctctttcaacgcatcacggaaatggaaggtttccagactcttctctacacgttccacgatttgcggaatttcagccagaacttctttatcgtaatccgtcaactcaccccgttccggtacccggttggcaaaatacttttgcgtcaacaccagcgtacggttaatgaagtttccatagatagccaccaactcgctattattccgagtttggaaatctttccaggtaaagtcgttatctttagtttcaggagcgtttgccgtcagcacgtaacgtaacacatcttgtttaccggggaactccacgagatactcgtgcaaccacaccgcccagttccgggaagtggaaatcttatctccttccaaattcaagaactcgttggccggcacgttatccggtaatatataagaaccatcggctttcaacatagccgggaaaatgatacaatggaaaacaatattatccttcccgataaaatgaatcatccgggtctccgggtctttccagtatttttcccattccggggtcaaatctttcgtggcagaaatatacccgatcggggcatcaaaccacacgtaaagcacttttccctcggcaccctcgatcggaacaggtaccccccaatccaaatcacgggtcaccgcacgaggttgcaaaccgttgtccaaccaagatttacattgcccgtatacattcggtttccactctttatgttcttctagaatccactctttcaaccagccttcatactgatccaaaggcaaataccagtgctttgtctctttcagttccggtttgtttcccgtgatcgcggacaccggatcaatcaaatcggtcgcattcaagctagtcccacaagcctcacattgatccccatatgctcgttcattaccgcaatgaggacattttcccacgatataacggtccgccaagaattgtccggccttctcgtcgtagaattgcatcgaggtcttctcgataaatttcccctcgtcatacaacttcttgaaaaaagcggaagataactcgtgatgcgttttcgaactcgttcgggaatatatatcaaacgaaatacccaattcttcgaaagaatccttgataatcttgtgataacgatcgacaatatcctgcggggtcacaccctctttctgagccttgatcgtgatcggtaccccgtgttcatccgatcccccgataaaagccacatcctcaccctttttcctcagatatctcacgtaaatatcggcaggcacatatacccccgccaagtgtccgatatgcacgggtccattcgcatagggcaaagccgtggtaatcaaatttctcttgaacttactcatatatccagtttataaacttttgaactctagtggcgcaaagttagaaaaatattagttaccttcgtactataataacaaaacttcaacttttatgttacgacctatatacctgcagccgggagataaggtggctttaatttcaccctctggcgttgcaacaaaagaacagttggatgcggcctgttcactcctgacctcttgggagttggaacctgtacccggacaacacgttctttcccgacacgggagattggcaggcacggatgaagaacgattgcatgatttacaaacagctctcgatgccgaagacattcgggcgatctggtgcatggtgggagattacgggatgttacgtatcgtacaagaggcggattattccatatttcaaggaaaccccaaatgggtgatcgggatgaacgacatcacggtgttacactccaaactccattccctcggaatcgagagtttacacgccttcatgccttccgattacaacacaacctccccggaagtggtcacgcaattacggaatttccttttcgggatcatctcctcatacgccatacccgcccacccattcaaccgaccgggaatcgtggaaacagaaatgatcggtggaatgttgcaatgggtgcataacctgcatgacacttgcatcgaacggaacacgagagggacgatccttttcatcgaggacccgtctaacgatctgtacgaaattgaccggaacgtgaaatgtatgaaatacactggaaaattccagcacttagccggattgatcgtcggggaattcgggaaagactcgaccccggaatttaaagaagaagtgtataaattgattcatgacgccgtggaagattacacgtaccccgtgtgtttcggtcttccggccggacacgtgcgcaacaatttccccttgattctgggagcaaacgtggaattaatcgttcacccgaaaggagcggaactacatttcccctgatcacgtacataccatgaacagaattttattggtaatcctatttttaatttacaccacaatgaataatattgtttatccggcaaagctggacaccctataccgggcgattgactatcgccagtcacaacacgatttgcccttgatcggcatttctgccaatttcgaaaacgggaactcgtgtatcgaacactcgtacgtgatctcgatcctgcaagcgggagccatacccgtgctacttcccgtgcataacgatatcgaaacactccggaagaccatcgaaacactcgatggattgatgcttaccggaggtggggatattaatccgctgtacgggaacgaggagcctctccccccgctcggaagtattgatgccgccagagatcaattcgatttcacgctggtaaaactggcagccgaccgacaaatccccatcttcggaatctgccgcggacaccaaatcattaacatggctttcggggggacaaactatcaggacatctattcccagcatgaacagcaactactgaaacacagccagtccatcagccgggaattcggttcccacacggtaaacattgtcaacaacaccgtactccattctgttctcggaacagactccttgatcgtgaattcataccatcatcaagcagtcaaagacgtggctcccggattccgggtaagtgccacctctcccgacgggatcgtggaggccatggaagggatgcccggacaccgcatattcagcgtgcaatggcacccggagaaaatggcagttcgcccggatgagcaaatgatgaagttatttcattattttgtcgacgaagctgctttgttcagaaaagccaaggaaattcaccgcaagagcctaatcatcgattcacactgcgataccccgatgaaattcacggaaggcttcaacttcggggagcgacacgaagaggttaaagttgatctccccaaaatgcaggaaggacaggaagatgccgttttcatggtagcctacctgcatcaagatgcccgggatgacgaatccttacaggcagccacacagaaagccgtggatattctttaccaaatatccgaacaggtgaagctgaatgaaaaacaggtaggcgttgcctataacgtcgatgacctgatctatttaaagaatgccgggaagaaagctatctttctcgccatcgagaacgggtatgccataggcaaagacctcggcaatctttccatgttcaaagacatggggatcacgtacatcaccttatgccataacgggagtaatgatatttgtgattccgccaaaggagaaccggaacacaatggcttgagcccgttcggtcgcaaagtcgtgaaagagatgaaccgcctcggtatcatcatcgacatttcgcataccagcgtaaaaacggtacaggatgtactggaactcagcacggcacccatcattgcttcccactcatcctcccgggctttatgcgatcacccgcggaatcttacggatgatcagatcaaagcaatcgcagccaaaggaggagtagtacaggtatgcctctacaactggtttttaaataaacaaccaaacccgacgattctggacgccgtggcacatatcaatcatatcgtgcaacttgtcggcattgaccacgtgggtatcggcacggactttgacggtgatgacacggaaaaactaatcggttgccgggctgccaacgaagtaatcaacctcacggttgaacttctccggcaaggatacaccgccgaggaactgcataaattatggggagataatttattgagagtgttaaataccgtgcaaaattaaaatacaagcttgcaacttcagttgatgctaaattctacattttaaaccatgacgatcgaagcgttacaccagaaattcatacacgaactacccggagaagcagcacaagaccggatgtctccccggccaaaacacgtggaaggggaagagggaattcaccaaggtcatcccatccatagtgccgtcatgctactccttgttccctaccaaagcgatctggcgatacctttcatcaaaagaacaaatgtcgggaaatatcatggaggacagatggccttacccggtggtaaaagcgaaccggaagacgggaacagcctgaacacggcattacgggaatgcaaggaagaaatcggagtaacacccaaggaagtcacggttatcggaaaattaagtgacgtgtatattccattaagtaactttaatataacaccctttgttggaactatcccgaaaatgcctaattttgtgctctcgaaaaatgaggtagaaaaagtgattattatcccgttaaaagacttactggacgataggaataaaacaagtcaggtattgtaccgacaggagcaaaaaattattgccccggggtacaagatcggagaaaatttcatttggggagccacggccatgataatcgcagaactggaagccatgattaaaaacgaacaataacgactgaacgcaagatgaagaacaaactttgtatatacattctcttcctgttactcggctgcatggcttgtaacttttccaccacacaggaaaaatacaaaacacttggcagcgaaacatgggaacgagacagcaattacaaattcgaattcgacatcacgcaacccggcaattaccatgtcagcacctgcatccgtcactctaccgactacaaacaaagaaatatcagttgctacttgatcatccgacatcaaggagcagaagttgataaagagaattcagacattattattgtcgacaataacggcaggtgggtcggtcaaggactctcgggactaaaaacagtcgtacaaccgattgaacggattttccattttgactccgcgggcatttataccgtggaaatcaaacaccggatgaaagataaacaactgaaagggattaaaaatataggaattaaaataaaatccataacttattatggcgaagaataaactggcgaaatttgccgaaatggaaaccttggaaaacgtgttccaacccacccatgaagaagtattccgcacggattacaagttaaagggaaaatggggagaacaagttttcggcaatgatcacccgatcgttttagaagtgggatgcggcaaaggagagtactccgtgggattaggcgaactttatcccgaaaagaattttatcggattggacatcaaaggagctcgcatgtggacaggggcgaaagcggcaaaagaaaaaggcatgaaaaacgttgttttcctacgtacacacgcggaagaactggaatccattttcgctcccggagaagtttccgagatatggattacctttcccgacccgcaaatgacaaaagcccgcaagcgtctcacgggaacccgttttctctccctgtaccgaaagtttctgaaggaagacggccttatccatttgaaaacagacagccctttcctctatcaatacacggcagaactggtcaaggcgaaccgcctccccgtgaacgtcaacacggatgatctttacggggttggactggatgataaaattttaggcatcaagactttttatgaacggcagtggctgtcacgaggtaaaaccattaaatatatccaattttcactagctggaccgatccaactcatggaacccgaaatcgacattgaaaaggatgattatcacagtgaaacacaattcatgacgagataattgaaagttgaaaattgaaaattgaaaataacgaaatgaaagaacctgtaacctgtaaccagccaatttgtaactcgccgaaggcgaatccccgagtattaatggccatgagcggcggaattgatagtacggtagcagccatgttactacaagaccaagggtacgagctggtaggggttacttatcgggtatatgatcagatctcccaggcttgcatggagaaagaaaaagggtgttgcagcgtgaacgccattttcgaggccaaacacatggccctacaaatgggattcgaacatcatattctcgatattcgtaaagattttaatgatctggtgatccggaatttcatcgatgaatacctgcaaggacacacgcccaatccttgcgtactctgcaattccacgatcaagtggggaaaattgattgccatggccgacgagctaggatgtgattatattgccacgggacactatgcccgcatcggtcaacaggacggacgctattttctgcgcaaaggagtagacgagaccaaagaccagacttatttcctctggacgttaacccaggaaaatcttgcccgcacgatctttcctctaggggaattaacaaaacccgaagtacgacaaatcgccctggaaagaggatacgagaaactctccaagaaaagcgagagccaggaaatttgctttatcccggataatgattaccgtaccttccttgcggagaacgtggaaaactttgcagagaaatatggtcccgggttatttgttgacacttccggcaaacgtctgggagaacaccggggattccccaactacacgatcggacaacgtaaaggactcggtatcgccttgggacatcccatgttcgtggtcgacattcgaccgggaagcaatgaagtcgtactgggtacccgggaagaattacaagggaaaacgttccgggcaaagaacgttaacctaatgaaatacgcctccctacccgatggttttgaagtaaatgctaaaattcgttatcgcaatcggggagcacaggcctccgtctaccatgaaaacgacttgctccgggtagaatttcacgaaggtatggactccatcaccccgggacaaagtgccgtcctatatgaaggccccgatgtcgtggggggaggtatcattatctgaacattaaaattattttattccaatacccaaaaacttcacggaaaaagaatcgaacaggtcaacaatttccggctgacgagccactgcctccgtcaccccttccaacgcgtataaacgagaatatttcaatattttctcggacattgattttatttcggttgtcccaagaaacttctcggcagcccaaacaatatcatcatacgcttccggctggcgggcaatcgaggaaaaacaagccgccagacattttccccgtgctgttccacgttccacctctgcctctttatccaatggagcgatagcagtaatcgtgtcatattgagctagttttgccgtagcccgcatcaactcctttaccatttccggctgacgggcaatattttcatataacgaaagggttgaaaacatttgactcgccttataatcagacgtgaatgtatcaccattatatatagttacaacatctccctcatccgaacaagcgacaaaaaataaaaggcaggtagccatcaacgtggtagcaattcgtctcatttgtaattcaaatttattagtttaacttattatcaatgatcttcgtcaatacctcccgaagcgttcctcccatggcacgtaccatcttcggcacgaaactattggaagtcattcccggagtagtgttcacctccaacataaaaatctcgtcatcccgcacgatataatccacccgaatgatcccttcacaccttaatatatcgtagatcatcgaagacaatgtcttgatccggttagtcagctcgggtgagatacgagccggaataatttcatccgattttgtcgggtcatattttgcctcgaaatcaaagaattcgttctttggaatcacctcggcaatcggcatggcaatatccatatccccggccttcacgaccccacaagtcagttccgtcccgtctataaatgtctcgatcaacacttcccgacagagagcaaaagccttcttcaaagcatcttccaactgggcagcctctttcactttcgtcaccccgaaactagatccctcggcattcggtttcacgaaacaaggcaaccccacctcgttgataatctcgttcacgtcgtatgtcattccccgaatcaacatcacggaatcagccacgtttaccccgtaactcttcaaataagtattacacgtatgtttatcgaaagtcaaggcagaggccaacacgttacagcacccgtaaggcacacccatcatatccagatacccctgcaacaaaccgttctcccccggaacaccgtgtatcgtgatataggcaaaatcaaacaggatcttctccccatcccgggtaaacgaaaaatcattcctatccacgggatactttttctccccgatctccacgtgccaatcccgtcctttcaagataacgagatatttattgtacctgttttcatcaacctcatcatatatattcttcccagatttcatggaaacctcatattctgaggaatttccaccggcaataattgcaatatttttcattttgaattcatcttttataacacaacaaaaatacaaaaaagagaataggagatgataaaaagtttatatttttgcaagcctcaataacacaaggaaatgacaaagataaacgacctgacacaaggaagcatcagcaagggaatatggagcatggcaatccctcttatcacggcctctttcgttcaaatggcatataatatgaccgacatgatctggctgggacatttgggtagcgaaagcgtggcagccgtcggcgtggcaggattcttcacgtggttaggtaacgctttgtcgtttatcagtaaagtcggggctgaagtcacgatttcccaatccctgggggcacgtgccggcagaagggcccgggcatacgccaatcaatcagccatgctgtcaaccatcattgccttgggatacgcttgctttatttatatcgcagcccccatgctggtcgggttatttcatctggaagagaacatctcggaattggccatcatgtatatgcgcctggtcacccctggcctgttcttcacgttcaataacaacacgtatagcgggctatataacgggcaaggaaacagtaaaaccccgttgaaaattgtcgccaccggattaatattcaacattgtcctcgacccactattaatatacgggtacggttttgttcccgcaatgggaacggcaggggcagccattgccaccacgttctcccagttagtcgtgttttctattttcatttggaacctttatttccgtaattcatctatcggaaaactatattttatcacccggttaagagcccggttcgtgaaacgtatcgtctcgctcggcttacccgtgagtatgcaaagtgctttattcgccatgttctccttgacattggctaccgtggccgcacaatggggacatatcggggtagccgtgcagagcgtaggcgcacaaatcgaggccatcacctggatgacagccgccggtttttccactgccctagcagccttcacgggacaaaacttcggggcccgcaacttgggccgtatacgcttgggataccattacacgttgaaactcgccgggggaatcgccttgatcgcctgcctggccttcttgttctttagtaaagaaatattcagcgtatttatcaacgaaccgcagacacttgttgcaggaagcgcatacctgaaaattctcgctatttcccagatattttcggccatagaacaggtcactgccggggctttcaacggatgcggacgtaccaccccgcctgctatcgtgggcatcattcttacaggtgcccgaatccccctggcctactacctggttacgttcccctcactcgggctaaacggtatctggtggagcatttcactctccagcgtgatgaagggtatcgtactggctatctggtatcaatcttttcagaaacgtctggaaaacggacaatacaaacctgtcggtattctgggaaaaatgcatgccgtggcaagtcgtctttggcagcaatttaattgaaaattgaaagtataaaccgggattcaataagaatctcgttcttttcgtgtcaaaacgacatgaaattattacagaaaaaattctgtaatttttcggcataaagattgttgatgtaaaaaataaggcttacatttgacggcgttaaaaagcaacaaatagccatttaagaaacgtataacaataaaaaaattacagaaatgaaagtaacagttgtaggagcaggaaacgttggtgcaacttgcgcaaactgcatcgctgaaaaggacatcgtgaatgaagttgttcttctggacattaaagaaggcgttgctgagggtaaatcattggatatgtggcaaaccgccccgatcaatctttatgacacccgtatcaaaggtgtaactaacgattacgaggctaccaataattcagaagttgtggtaatcacttcaggtcttccccgtaaaccgggaatgagccgtgatgacttaatcgcaacaaacgccggtattgtaaaatcagttactgaaaatattatcaaacattctccgaatgccaaaattattatcgtgtctaacccgcttgacgtaatgtgctactgcgcttacttgactgccaaagtcgattcaagccgtgtattcggtatggctggtattctggataccgctcgttacagagcattcctagctgaagcattgaatgtttccccgaaagatattcaagccttgttattaggtggacacggggacacgatggtcccgctcccaagatacaccacggtttcaggtattcctgtaacagacttgattgaccatgacacgttgaatgccatcatcgaaagaacgaaagttggcggtggcgagctggttaaattgatgggtacttcagcatggtacgctcccggtgcagccgctgctcaaatggttgaggcaatcgtgtgcaaccacagaagagtattcccggtttgcgctttgttgaatggcgaatacggaatgaacaacatctatttaggagttccggtaatcttgggtaagaatggtatcgagaaaattatcgaggtaaaacttgacaaggacgaacaagaattattggctcaatcagctaaagctgttagatcagtaatggatgtacttgacaacatgaaattattttaactaacaatagtacttcacgatcattctttaagaaaccgttccggggcgccgggacggtttttattttaatcttccttgttgtgaaaaaatcctttcataacatatcatctattccaagcaatctaaccgtaaatgaatggtaatactaccgtttagatctcctaccttcctttcatcgccctttcatcaccctttcatagcccttccccattatccgagtaacggttgatctccggggatgtaacgcaagagagagattattaccctagtatatcagtagcattacagtggattcaaggatgtattatcctaaaaagctactgtaaactagggtaaacctatgtcagtatttagttttctagttccaacccggattctgttccagtttggcatctatatttgcgtcaatcgctttctgcgggatcgggaataatttccactcgattgttcccgtgtaagtcgggtaatcagcaatataatacgcatgagcccgaagttgatcctccatgacagagccttgcatacgtaataacgtacaccatcttctttcctccatgaacaactctcttgctctctcgtccaagataaaagctaaagaaatatctcccgctgttgccatgcggctgcattgcgcccgaccgcgtaactggtttatgtcattagcggcactaccggcatcccccatacggaaataagcctccgcccgtaacaaataagtttcagctaaacgacaagcatactcgtcccggaaagtattcgtacgatttcccccgtatactaaatcctcgtatccccaatcatccacgggagcgaatttggtccataccgggtaataatggtccatgtttgattcatccaacatatcagctgtcacgatctgaccgtacttactgtgtttggtatcgatacacacgaattcccgacggatattcgcttttgaattccgaatatccgtggcaaaatcacccgcccaaatatcattgatcatgtagtttgtcggggcattaaaagacacaccccggccaccaacgtaggcacagaggtttcccccgggatagattgattcatcaatattcgtgttccacgggccatacccggcatccgattccgaatattcgcttttccaacgcatctccctcaacacgggagaaaaacttccggcataaggcaaaaaatgatttcccccgaagtcatgccagaccgtcacatcattttgcaacgtccacaaagcctcggtatttccctcggcataatccaagtttccccgttgaaaaagatcaaaaaagacatcaccgtccgggtaataagcctcgactccattcatggcctcaccggaacccggctttgcccgggaaccgaatcgctcggtcatcaaagagtgtaactcggtaaccttggtcgcataaaaaatggattgcagcaacaaatcccgatcatctcccagctcggtagccaaggccagataagcctctgccaaataatgataggctgcacctttcgccacgtaccccgcctctcccggataatcaggcaaagtatccgccgcattcttcaaatcttgaatggcgaaccgatacgtttcctcccgggtcatccgggtgaaatcataccggggttcctgatagaatttcgttacctcgggaactcccccgaacaactcccccaaagtgagataagcaaatccccgaaagaaattagcctgtgcccgtacctgcgcccggtcattctcgctatcccagttcaaggtctttacttctgtcccctccaaagtctggttggcataactcactagctgataataagcctcgtaaatattcttcacttcattcttatctgtggaccaagaagagaagttagacatcccgttaccacttgaccgccacatcggggtatcaaacatatcagttccagccccttttaaaaacacgtcattctgtaaccaataacgagcgtgggcatacatattcgtcacgcaagcttttacctgatccacggtcttaaaagcatcttcagccgtgtaaaacgtgtcgggatgttcttccagaaaaagatcatcgttacatccggaaattcccattaccatagcggcaaaaataaccgcaatatattttctagttttcatcatcacgctccaaatttaaaatgtcaaattaactccaaatgaatacatggctgccaacggataaccgtaacttcctcctaacgtttgtttgatttccggatcacccccaacccaattggttatcgtaaacacgttcttcgctgcaaaaaagactttcaacccggcaatctgcaaacgactcaaccaatcctgatggaaagtataagaaaggcttaaatcctgcaaacgcacgaacccataactttgcagcggggtaaaacgactgtctgcataatccacacggggatatttgttacttctgttttccggggtccaccaaccatgattcaagttattatcccacacggttcctgttgccgtttggtaagcatacgtgttctggctcaatccgtaaccatttcccccaaatacgcccgcaaacaagaaatacaattccaaattcttgtatttaagcgtgctactcaaactcatccggaagttttccttgttatatcccaagatcgtacgatcgtctgccgtaatcttaccatcctcacttccgtccaaattagcaaatttcacatcaccaggagctgcgttatttgcctcgatgtattcaatatcttcttcctgtacaattcctatcgacttataaccgtaaatggcccccaaagatttcccgataaacagactattggaaatatcatctttcccgtcaccgtataaatctttcaatttattccggtttagatagaacgtgacagccgtactccaattccagtctttcgtccggacattctgcgtggtcaacgtggcctctatcccccagttatcaatctgccccatcgtggctttcatacttgtcaacccgttattcatcacgggtaacaatcgatcaaaaatctgatcggtcgtcttcgagaaataaccgtcaaattccaaataaatccggctacccaataaaccgaggtcaaacccatagttaaatgcctccgttgtctcccaacccagatcggcatttcctaacttatcatagcgttggccccagctaatcgtcgattcattcccgaaaggataactgataccgccttgttgtcctaattttatccgagacaatgtcatgtacgggtccaaagattgattaccattcttaccccacgatcccttcaactttaaataatcgatgaacgacacccgtttcataaaacgttcattcgaaaccgtccatgccaccccgactgccgggaaaacaccccatttcgagttcttcccgaacacggacgatccgtcccgacgcacggaaacacttaaatgatacgtgtcgttataattatagctgattcgccccagatacccgatattattatgctttgtcttatctatattggtaattttctgtgttttagcatataccagtccatctgctcccaacacggtattcccttgatccgaaaaatcacttccggtcatcttccggtagtcataccgtttggaatccctcgtgtaaacgtaggttgcatcaataaaatgtttcccaaattgacgattaaaattcacgatatgatccattacccagtacgtgttcttcgtgcgggcactatacccgttcgccttacttaagaaaccggataatgccgaggctgaataccgatcttcagaagttccttctgccacaaaatacccctcatgttcgaaataatcccgttccacattctcccaggaataagcggcatttacccggtaagtcagtccttccagccaaggacatctcacaagcacatgccccttaattaaagtcgtggcataagtatcatgatcatccaccgtaccactattcaccaaccacaagggatttgtcaacccgccccccaattctctcgggtacttctccagttcaccgttcggacgagtcacacggccgtaaggagtcaaacgcaaggcctgtaccaaattgtaagtcgtgggaccggagtaatcattaaaagtatatcccatttgtgtcccaacttgcaaccaagaagccacgtcactctgcaaacgaagcgacaaagcctcccgtttataatcatctccaataatcacaccctcctgatcaacgtgagaagcggataggaaataattcaatttttccgtcgcaccggatacggatgccgaataactctgcatcagtcccacccggctcacgtaatctaaccaatccgtagtcttgccgtttttataattctctagctcgaatccactcatccaagctgaaggatcggcatcctccgctagatgctgggttgcattaatttttttaatataattctccggcctcagcacctccggacgattcgccatctctgacaacgtccacgatgcattaaaattcagcacgggttttcctaattttccctgtttcgttgtgatcatcaccaccccgttggcagcctgtgatccataagcagccaaagatgtcgcatctttcaacacactcatgctttcgatgatattggggtctatatcccgcaaactccccataaaaattactccatccatcacgatcaacgggttagatgtcgatcccccgatcgatttttgcccccgtacttgtaaagaaggcgcctgtcctgctccttgttgttgcgacacggtaatacccgttaccgttccccgcaacacatccatcgagttcgtattcggtaacaatgccaaaggagattccgcggtgttaatcacgctcacggaccccgtaaaattcttccgggccacggaaccatatcccacgacaaccacctcctccaactcttcattatccacccgcaaccggacatttcgcatcccttccttttttaacactatttcccgggtaacatacccgacaaaagaaacccgaagtacggctccagcctttaccgttaacttgtaattacccaaagtatcggtcacgcatccatttgttgttccttgttccaagattgcagccccgataattggttctccttgttcatcaattactcgaccaaatattttccactttgtcactcgcgtcgaatcgacttcgcccgcaacacttcgagaaattgttcccatcatacacaggccaccaagcaataaaatcattccgaacttgataacacctttctgaaataaatctagattcttcattttatatcacgtatatgcattaattatccttcagaaattcacgtaatttttcctccacaacaaacacgccaaaacacaaggaagaaaatatcgaattgattttctgcaaaaaagatctctaggtttcatcatggggtaataggaaagtgtggaatttttacacataccaaacaccaatattccacaccgtttaaatttatgtaaatttcaacaacaatatcctctacaaaataattcacctttttattgatttaataaaaaatccatcttaactttgcaatgcaaagaacttttaaaacatgaaaaataaagaagcactcgatacattacacgacatcaaagaactcatggaaaaatccacgaaattcatgtcgataagcggaatttccgctattctcgttggcatttatgcttgcatcggaactggcttagtctactttattctaaacaaacaagactcttttgacaccttatttaatattccattattaaatatcaacactacttaccagctcgcatcaatttgcttgatcgcactgggagtactcgtactttcccttcttaccaccttcacgatgagctaccaaaaagccaaaaaaggatgtagaaacatctttaaagataaatccgttcaccgtttgctttggaatttttttcttcccttgctgactggcgggattctttgtttctctttaatatggcagcaatattacggattgacttcttccataatgctcattttttacgggttatctctcgtgaattgttccaagtacacctattcgaacatacgttacttgggttacgcagagattctgttaggcctcgttgacagcttcacaatcacccatgcccttttattctgggttaccggtttcggattacttcacattgtagcaggaatatacttttattgtaaagttgaacacaaacagcatccggcaaaaccgtaaccaagtgtaaatcgcaatccatgaaagaatatctggaaaatataaacaaggcttttgaaagtaaggcacgcttggggatcatgtccatcttgattgtcaacgaatcggtagatttcgtaaccctcaagaatttactcgatctcacggacgggaacctagccagccacaccaggagtcttgaggaattgggatatatccaatgccagaaacaattcatcggacgacgtcccaacacgacgttctccgtcacgcagaaaggccgggaggcttttgcaaagcacttaaacgctttggaagagtttttaaggaatcagaatatataattttttttacttattacactttgaatttcaaagttcttttcaaataacattaaatacaatacaccatggacgaacaaacagcaaaaaatcaaaaagagaacagcacacgaaaaagtctcaacaaacaagactctttagttctaaagattgtactcattgccttcctaatcctcctgtctttcattcccatgagcatgattcgaggactcatcaatgaaagggaaatgactgcaaatgccgccgcacaagaggttcaacaaaaatggagtaagtctcaaaccctcattggcccgatattaaccatcccttatttttaccagaacgaaaaaggagagaaccaaaagggatatatcaattatctccccgaacaactgaacatcaccggagacgtcaacacgcaggaactcaaacgaggattatatgaaattatcgtttacaattccacgctggagattaccgggacattctcggccaaagacttgaaagaaagcaatctattcccctacgacaagtggattgaaaccgccacaatcaaccttggaatcagcgatctgcgaggaatcaatgaacaaatctcacttgaatgggacaaccggaaactgaatttcacacccggggttgatccccacagcctcgtcgtttccggcatatcatcgaaaatcacgccacaacaactgtttgcaaacgattcgatcgttcatttcacgataaaacttaaactgaaaggctccgaatccattcaatttacccctcttggcagaacaacaaaagtcgccattcgttcaaattgtcaaaccccaagcttcaatggagcctttttacccactgaacgagaggtctcgtcagaaggttttacgagcaaatgggaagtactggaattcaaccggaactattcacagattctcaaagagagtccctatcgtgccaccacgaacgaatacagggacatgacggatgacaatttgggattccaatacacgaactacgccatcacggaatccacattcggggtaaatctcctgttcccggtagaccaataccagaaatccacacgctccgctaaatacgcctttttaatcatcatattgactttcgttgtcagttttttcgtggaaatattccagaaaaagaacattcacccggttcaatatctacttatcggactggccctatgcttgttctacacgctattagtctccacgtccgaacatatcggtttcacccccgcctatatcatctccgccctcatgaccactttactcatcacgttctacatggtcggcattttaaaaataaagaaaacagcattcacgatcggaggacttctggcttgtctttacgcctatattttcttcctgatccaactggaaacctacgctctactggtggggagtatcggattattcgttatcctggcgatcatcatgtatttctctcaaaaaataaattggtacaataaccaataacaactttttcctctttccggaatcaaccgaaaagaggaaaaataaaaatcaacaacatcatgaaaaaattttggatacacaatttatccatcacactatccctactcgttgttttcctagtcaccttgtactcaataggaatatacgacaaccgtttcggtcattatcttgccctagcgatcttcgggatttccggattgcaatccatagccagtttgatcataggcctttacaatatcaagctccaaaccgtcaatatgattttactgggaattttatccgtagcattttcctctctaataaccatttacacgttcaattgtttattcatatcgtgctaagaacaacatacacgaggattaacgaattgtaattattagctttattccttgatttctttccgaaattaacattcctcttttttggatttcaccgaaaatgcgtaagtttgtgcaaactttaaaatatggagataaagattccgatagagatcgttgaactggaagataacagctttcacatcatcgtctctctgcaaatcggtagcattgagggagatttcattatagacacgggagcatccgtgacggtcatagacaaacttacaccgtttagttatgaaccgctggatgatgtttccgaaattaactccggaggggtgtgcggagaaattaatgaggtacagcttgtgaatatcacggctctacaaatcggcgaccacacaatcgagaacgtacatgcggcagtcatcgacttgcagtacgtgaattctctatacgacaaacacctgcaacgcagggttgccggattgttggggagcgattttctcgtcaggcatgaggcgatcattgattatggaaataaggagttaacattaaaagtatctgcctaattgtatagcaattttgaaaaaattgttatacttttgcgcactaaatatgtgttaaaagaagaattgaagcttaagtaattataaattcattaaacagatgcagaataaaggagcgattacactactcgctgttgctttggcattggtgagtctttatcagttgttttttacttataaaaccaaccaggtagagaacgcggcgaaggagttcgccaacggtaaccctattaaagagaaagagtatttagattcggtcgcaaaccaacccgtctacaatttcctcggtttagccaaattcacttacaaggaatgtaaggaattagaactgaacctcggtttggatttgaagggtggtatgaacgtgaccatggaagttgacgttgtagacgtagtaaagagcttggcaaaccacagcacggaccccgctttcaatcaagcaatcgaggaggcagtgaagatgagagtttccagcccaaaagacttcgtgacccttttcggtgaggctttcgaaaaaattgccccgggagcacaactggcatccccagctattttcggtactcacgaaatgaaagaaaagatcaaagtcggagctactaataaagaagttctcgacgtgatccgcaaagaggctgacggagcaattgacaacacgtttaacattcttcgtactcgtatcgaccgttttggtgttgctcaacccaatatccgtaaagctgacatctccggaagaatcgttatcgagttaccgggtatcaaggaaccgcaacgtgtgagagagttgttacaaggaactgccgctttggaattctatgaaacattcgacaacgcaaaaggacaagatgccggagaagatgcattcttcaactatttggttgccgcagatcaaaaactaaaagaggttcttgacgcccaagcatccaatgtaacaaatgaagaaacaactacacaagttgcagacacgacaaaagtacaagataaagaatcagccatcctagacgcaatcaaaggagaatccgattcattgaaaacggtaaccagtatggctgaatacgagaaagaacatccacttcttgccatattatcacctaacatgactcaacaggggcaacctatgggtggttctacaattggatatgccaacattaaagatacggctaaaatcaacgcttatttaagattaccgcaggtaaaagcagctttccccagaaacgcacgtttattgtgggaaatgaaagctgtaaacggtatggttcctttacacgccatcaaaattaccacgcgtaatggtaaagctccgcttgaaggagacgctgtaattgatgcaagacaagactatgatcaacaaggtcgaccggttgtttccatgcagatgaatggagagggaaccaaaacatgggctcgtttgacaaaagataatatcggacgttgtatcgctattgtacttgacggtatggttgcatcctctcctaacgtaaacgacgagatcaagggcggtagctcccagatttccggacgttttgacgtgaaagaggcaggtgaccttgcaaacatcttgaaatccggtaaattacccgcacccgcacgtatcatcgctgatgaggtggttggagcatcactgggacaagaggctattcaatccggtatgtggtcattcatcatcgcattcgtattagtattagcctatatgctattcttttatagcaagaatgccggtttggctgccgacatcgcattactcgccaacttgttcttcttgtttggtattctggcatccattggagccgttttgaccttacccggtattgccggtatcgtattgaccatgggtatggctgtcgatgccaacgtgttgatctacgaacgtatccaagaggaaatcagagctggtaagggactgaaacttgctatcaaagaaggttacaataatgcatactcggctattatcgacggtcagttgaccacgttattaaccggatttatcctgtactacttcggagaaggcccaatcaaaggtttcgcaaccacattgatcatcggtatcctttcttcattattcacggctatcttcatcactcgtttgatccttgaaagagctgcatccaagagtgacaatgttaccttcacaaccccattaactgcaaactggttgagaaataccaagttcccgttcttaaaaaaacggaagatcagttacacaatttccggtatcgtgattgtactttgtttcatatccttgttcaccagaggtttggataaaggtatcgacttcgtgggaggtagaacttataccgtgactttcgcacaagacgtacaagtgggtgatgttgccgaaaaactggcaggtgtttacggaagcgctccagaagtaaagaccgtgggaactgcaaataacgtgaagatcaccacgaaataccggattgctgaaaccggagccgatgttgatgcgaacgtagactcattattatatatcggattacaagagattcttcccgctggaacagattacgagacattccgtaacgtgcatttgcaacagactcaaaagatcggacctgccgtggctgaagacatgacaagagctgctgtttggtcggtattgtttgccttgattggtatctttatctacatcatggtacgattctcaagatggcaatatggtgccggagctgttgtcggtttggctcacaacacgatcatcgtaatcggagcattctccttgtttgcaggtctgttaccgttctctttggaggttgaccaatcctttatcgctgccgtattgacggttgtgggttacaccatcaacgataccgtggttgtattcgaccgtatccgagagtaccgtaaactatacccgaaacgggatgatgagcaagttgtaaacgacgcattgaactccacgttacgtcgtacgttcagtacttcattatcaaccatcgtcgtgttgttagcgatattcattttcggtggtgcgtctatcaagggattcatttttgccttgttagtaggtatcattgttggtacatactcatcactgttcatcgcaactcctatttctttcgacttgaccagaagattcaaaaagaaagtagaagagaagaaataaaaaaaatatttcaaatttatacaaaatagctcctttttacaggagctatttttttgcacacgagataaaggtacacactccggtattgcagtatacatacgccggtgtctcgcaatctcctttcaataacatcaaaaaagttacaaattgaaagtaaaaatgatatatcaatattaaagttgcaatataattgggtttataacaataaatatcctacttttgtagcgtagaaagcagcaacaggataatcgaacaattacaagtatgtcaaagcgtcagatcagaatctgtttaggaagttcttgtttttcccggggaaacaacacaaacctcggcgcaatcaagaaatatctaagtgaaaacaacttggaagcagagatcgatttctgcgggcatttgtgcgaggaattgtgtagtaagggtcctattatccggatcgatgacaaagtgtatgaagaagtaaatctatcgcgtttgtacaaaatcttacaagaagaattcccatgcaactaagacccatctatacagaaccggacaattgtcaggattgctataaatgtatccgggaatgccccgtgaaggcaatccggatggaaaacaatcaggcatccatcattgaagaccgttgtatctattgcgggcattgcacgcaagtatgcccaacaggggctaaaaaaattcgtgacgggttaacccgtgcgaaattaactttgacacaaaacccgaaagtcattctatccttggcaccctcgtacgtaagtgaattcgagggagttcattccagcgtgctgattgctgctatcaagcgtttaggttttacaagtgtgtcggaaactgctctaggagctgaaatcgtcacggatcggaccgaaaaatttctggaagaagccgagagtggcgtgtacatctcttcggcttgtccggtggtcgttgaatatatccgaaaatattccccggatcatgtgcgttttatcactccgattatttctcccatgctggctcacgccaagattctgaaccaactgtacggggaggacgtgaaaattgtttttgcaggtccttgtatctgcaaaaaactggaagcagactactttaataacctcgttgacgtggtgatcacgttcaaggacctgaaaaaatggttcgaacaatccgacatcaacttgaaaaatatcgcaccgaatcagcctgaagcccgttttgttccttaccgttccgggatgggcgcttactaccccattgaaggtgggatgttaaaaggaatgcaagagggcaaaaaacaaatacatcacatggctttctcggaactttctaccgtgaaagacgtgttgaaagagctggattcacaccgggaggacgattccatcttcttggaattactggcttgcaagggcggatgcattaatggtcctgccaaattaagccatatatccccggccttaaaaagatacgagattatccaccaatcggaattgggaaatcccaaagatgatttcaaaaatattgatttgcagatcttgttctgcaaagacccccacgtacaagatcacacctacacggaagaggagatcaaacaggccatggccgtcgtgggtaaaaccggaccagaggatgaattaaattgtagtggctgcggttatgactcgtgccgtgatttcgccattgccatgctggaaggacgggccgaagaaaatatgtgtgtatcttacatgagaaaaatcgcacatgacaaggccaccgtactcctccaaaagattccggccggagtattactcgtcaactcggaattgaaagtcgtggatatgaatcaatcctgcgccacactcatgggagaggacattgcttccatttacgaagttgatcccggactaaacggagtggcattgaaaaatatctgttcctacgaagacttgttccgtgccgtgttgacaaccggaaaggaaattatcgaacgacaggtacgggaagaagaccggacatggattatatccatctataacatacaacctcaccgattagttttcgggctattgcaagatttacgcgaaccttacgtccgtaaagaatggatgcttgaaaagacccaggaggtaatcaagaaacacatgaaaaccgtccagcaagtagcttgtttgctcggggaaaatgccgcgttcacggatgccacgttgcgcactgtaatggaggcttacaagaaaaatgaccaaaagaaaccactctaatttcatttgtcttgagaaacaacggtaatttcatcgaggttgacttcttccagaagaataaagcgggcaatgttgtctgcggggattgtttcatgtctcaaaaactaaaaggtgaaggacgtgtcatcagcgtgctatcggatggtttgggaagcgggatcaaagcctgtgtcctatccacgatgacggcaaccatggccatgaactttaccgccatgaatgaaagcatcctacgtacttctacctcgatcatgaataccttgccgaaagacatggtgagaaagatcagttactcgaccttttgtatttgtgacattgattgtttcggtaacgtgaaaattatcgaatatgaaactccctcctactatttataccggaacgggcgtttcgtcaacatatccaaggaaaaaatcccagtggaacgggaagaccttgagaatacatttctgtggatttccgagttcacgctggaaaaagaagaccggattatcttcttcagtgacggggtaagccaatccggtatgggaacggctaaaatgccctttggttgggaagacggggcaaaggaatatattgctaatctagtaaatcaatataatgatatatctgccaaggaattggcacataaaatagtaaatcaagcagaaaagaacgatggttactcgctgaaagacgacacgagttgttgtgtcatctacatgcggaaaccccgtaacttgcttgtgtgtacaggtcctccctatgacgagaagaacgataaatacctggccaaccgggttcgggaatttcaagggaaaaaaatcctgtgtgggggaaccacggcaaccattatctcccgtgaactgggtgcgaaaatggtggtcgacatgaatatcgtggacaaggagctccctcccatctccaagatggaaggcgttgatcttgtcaccgagggaatcttgacgttaggtaaggtggaacgcatcctgacggaaggagatattgaccgccgtcgggaagccggaccggctgaactgatggtgagaatgttgttgaatagtgataaaatcacgttactcgtgggaacccgtatcaacacggcgcaccaagatcccaatcttcccgtggagttggagatccggagaaacgtggtcaaaaaaataaaatttttattggagacaaagtatttgaaagatgtagagattatgtatatttaggggataaaatctaaaacaaaaccgactcacaacattatggaaaaaataaatgtaaaaatatgcgtgggcaccatgtgctatgtcatgggtggcgcagagttgagagatgtgattgaatctcttccccagaatatcctcgaacatcttaatgtaagctattctccatgtttagggtgtggcaaaggtgaacaagccccaccgtttattgaagtaaatggaaaacgtattgctggcgttagtaaaaatagtttaatacaaattgttaaagaggaagtaagaaatgttatatgacaattttgcgatgctcacgaagcgtgagttactgattagaattgtaaaacttttaaaggaagaaaatctagtagatggggtgaagtacattccagtggaaatgcgcccaaaaaataaaagaccgatcaagtgttgcgtgcataaagatcgctacatcttgaagcataagattatttcaatcttgggctttgaaatcacggacgaggaaatcgacctgatccccttgtctgagttcgcacagaaagcacttgataacaagaatacgaaagagaatattctttctgtggttcacgaggcttgtagtgcttgtatgcaatcccagtatttcgtgactaatatgtgtcgcggttgcgaaggacgtccttgtttgatgaactgcccgaaagcagctatctctttcaaggggggtaaagcttgcatcacgcaggaagactgcgtgggttgcggactatgttctaaagtttgtccttaccacgcgatcgtgtacactcctgtcccttgcgaggatgtttgcccggtgaaagcgatcaccaaaggcgaagacggaaccgagcatatagataaagataaatgtatctattgcgggaaatgtatgcaaacttgtccctacggagctatcatggaacgttctaaagtaatcgacgtgtacaagagcattaccgccccggacaagaaaatcatagcgatcccggctccggctatctacggacagttcaacgcaactccgggacaaattctttccgccatcaaggccatcggttttgacgacgtggtagaagtggctttgggtgcagaagatacttcccgcaacgaggctgccgagttcctggaacgcatggaagaagggaaacctttcatgaccacctcctgttgcccggcgtacgtgggttgggtggacaaacacgcccccatggtaaaaccgtttgtttccgatacccgtagcccaatggtttacgccgctcgccgggtaaaagaacaatatccggatgccgaagtcgtatttatcggcccgtgtctggctaaacgttacgaagctgaaatgtacgttccggaagtggactacgtgatgagctttgaagaattgggagcattcatggtggcttatgacatcaatccggaaacttgtgaagaattaccattggatccggaagttacgaaattcgcccgcggatacgctcaagccggtggagttcgcaatgctattgtagaagctgttgggaacggttacacaaccctttctctcgaaggacttgacaaaaagaaccagactttactgaaaactatggtaaaaaaaccggaagcccagtttgtcgaagtgatggcttgtgatggtggttgcgtgaacggaccttgttcactagctccgcttacattagccaaacggcagatcaagaaagcgttagaaaaataaaataaggcagttaaaaataacggccctcttcttttcagagggctgttatttttatatttcaaatcgtgatttatttcaccatcgcatgacgataccctttcgtcttgttccaccctccgcgggtgaaatcgggaattgccacgggagtactgttattctctaaagaaagagccgtcagctcacccaaacaacaccattctgccaaatcatacacgtccatatctaacggtaatccatttcgcaagcaatataccaaacggtaatccatgataaaatccattccaccatgtccccccactttcttggcttgctcttccaactcgatctgaatcgggtgtttatatttttccatcaaagccttcttcacatcctccggaacaaaaccgtgagaattcagatcctcgtgatcgggagccacatccgaggaaatttgtgtcgatttcaaagcatatcccgaaaccggatatttattagcaaatcctttggttcccgtcaactggtacatccggctatacggacgaggagataccacgtcatgctgaatctggatagtcttcccgttttccgtgcgaatcagcgtgatcgtgtgatccccattcttgaaatctttcacctcttccccagtcttgtttttcaaatactcgggagccgaaacggccttcgtatccatacataccaagtaattcatcttgtccccccggtgaatatccaataactgacaagccggtcccattccgtgagtagcataaatatcccctctatgtttccggttataatccatacgccagttattccagtaataaggccagaattcctccaagttatgaatataagccccttccacgtgcaaaacttcaccaaacacaccttgttgagccatattcaacgttgtcaattcaaagaaatcatacacgcaattctctaacatcatgcaatgtaactgtttcttctctgccatattaatcaatgcccaaatttcctccatattcatggcagcaggcacctcaatcgccacatgtttcccgtgttccattgcatataaagccatcggagcatgatgtaaccaatcggtagcaatatacactaaattaatatcatcccgttcacaaagttgtttccaagcatcctcgctcccggaataaccgacagcctccggaactcccgctttcttcaaaataccttgacatttctctacttgttccgggcgaatgtcacacagagcaaccacctttgttccaggaatatgtaagaatcgttccactgcaccgggtccccgcatccccaaaccgataaacccaacccgcactgtatccagtttcggtgttaccagatttactacatccttttgtccagcaggacgttcaggcacagggacctcgatcattaaactttttttcgtctctttttcagatactccatttgtacaagaacaaatcatcccgcacaaaacaatagccacgacaaatataaatgtcatttttctcataaattgttaaattagaattttacacaaaacacaactttttcaaaattcacgtcctaaaataataaataaatttgaactttatttctaattgataaaataacactccctcgtcgacaaaaaacactcattcatcgacaaaaaaaatctcaatatctaaattaattgtattcgttttcaataccttatatttttgtaaaaagcaaaaaaagaaaacaagatgaatatacaaacaaacattgcaaccatcctttttataatcattccgtccttagtgggcttttctcaggaaaagcccacttcttcctggaatttaaaggattgtattgattatgcccggaaaaataacatccaggtacaatcggcaaaagtaacgcaacaaaatgcttacatagatttattacaagcaaaagcacagctttttccatcattaacattcagcagttcgcaaaactggggacaccagaaaacagaacaatcggatggtaaattcaagtctcagagtgcttacacgggtaattacaccctaaacgggggattgacaatctacaacgggggtaaattaactcgttcaatccgtcagcaacaaatgacgaactcggcacaggagtatcaagtaaacatggccgagaacgacatcgaaattgctgtcaccgaggcctacctgcaaatactttacgcaaacgaatcgctaaaaaccaaccgtcaaacgttggaaacttctgccgcccagctggcacgttccaaagaactattggcagccggttcaattgccgccagcgattatgctcagattgaggcacagtacagcaacgatctgtacaacgtgacgatggctgaaaacacgctcaccttgaacaaattgcaattgaaacaattgttagaactggaaccgacagatagtttcgacgtctatttcccggaattagaggacacgcaagttctcacccccgctccttccctcttggaagtttatcagatagccctagaaaccatgccggaaatgaagaatagtcagttgaacgtggaatcagcccaactggaagaaaagatcgcggcaggtgatcgtttgcccagcatctcactcagcgcatccgtggccacgaatcatgattcggaatcaaaccactctttttcaaaacaactaaataatcgattaaacgagaatgtggggatcaatattagtatccccatctctaaaaatcgccaaatcaaatcagccgttgaaaaagcaaaattacaaacagaaacagcccgattggaagagttgaacacccgcaaagaattatggaaaacggtagaaacactccaccagaacgtcctctccgcacaaagtagatacgttgccgccacgaacagcgtgaaatcagcctcgatgagttataacctcgttcaagaacaattcaacgccggtatgaaaaacacggtagaactactcacggaaaagaacaattatctttctgccttacaagaacagattcaagcaaagttcgaggcgattctctcactcaaactgctcaacttctaccgtaatcaacctatcgaaatctaatgtaaaatattaattatagaacaacatgaaaaagattgttaccataatcatcgccatcgccgttatcgtcggagcctttttcttcttccgttcgggagataagaaagtgacgacgtacgagactgtcgaactgaaaaaaggctctattaataatacagtgaccgccacgggaacgatagaaccaattaccaaagtcgacgtgggtacccaggtttccggaacgatttcacacatttacgtggactacaattccgtcgtgacaaaaggacaattacttgcggaactcgatagaaaactactggaagccgaactgaaatctgaaatggcaaatctaaaatcaagcaaaagtgaattcgagtatcaagataaaaatttcaagcgcttgcaccagttacacgaaaaaaatttaatcagcgaaacagaatacgaagaagcactataccagtacgagaaagcgcaacaagcctacgaaaaagcacaagccacactggtaaaagcacaatcaaatcttgattatgccacgatttactcgccaatcgacggggtagttttatccagagaggtggaagagggacaaacagttgccgccagtttcgaaaccccgaccatgttcactatcgccaacgatttgcgcaagatgcaagtgatcgctgacgtggacgaggctgatatcggtcaggtactcgaaggacaacgcgtgacgttcacggtcgacgctttcccggatgacacgttcgagggagacgtgactcaagtacgattgaacccgaccacggaatctaacgtggtaacttacgaggtagttattgatgccccgaatcccgagttaaaactgaaaccgggactgaccgcaaatatcacggtttacacgatggagaaaaacgacattctgctggccccgttgaaagctttccgttttaccccggaaactgacccggaaaacccgcagaccacactagctccacaaacaggaaaaggagaaaaagtagtttggttgcaaacggcagaaggcatcgttcccaaagtgatcaaagtgggggtcagtgatggaatatacacagaagtaaaagagggaataaaggaaggttctcgcctaattgtaggagttcaacgcaacaaaaaaatggcccctcaaggaggcaacgagggatccaacccgttcatgccaccacgtccgggacaaaagaagaaataattatcgtataagattgaaatcatggcaaatgatattataaaaatagaaaacctgaggagggattttaaggtcggatctgaaaccgtccatgctttgcgcggtatatcattctcgatccgtgccggagagttcgtgacgataatgggtacgagtggttccgggaaatccaccctgctcaatatcctcggatgcctcgacactccctcctcaggggactattacctcgatggtatcgcggttagggatatggggaaaaatgacagggcttcactgagaaatcgtaaaatcggattcgtgttccaatcatataacctgttacccaaaacaacagctgtggaaaacgtggaattaccgttactttataatccatccttttcatcccgggaacgccgagaaaaagcgctggaggctttgaaggccgtgggattaagcgaccggatcaaccatcgttccaaccagatgtccggcggacagcaacaacgtgtcgccatcgcccgggctatcgtgaacgatccggtaatcctacttgccgacgaggctacgggcaacctagattcccgtacttcatttgaaattctcacgctctttcaacgtctccatgcggaaggaagaaccattatattcgtaacccataatcccgaaattgcccagttcagcagtcgaaatatcgttctacgggacggtcatattacggaagacacggttaacccaaacgtagcctcggctaaagaagtactggatgcactaccgaaagaaaacgattaaataaatgtagaatttaaaatttagaatgaaatattacctgaaagtgggaggtggttcaatctaaaatctaacatcataaatctaaaattaacacatgaactacgcaaatttaatacgaatagctttacgagccttggctaacaacaagttccggggattcctgactatgttgggaatcattatcggggttgggtccgtgatttccatgctggctatcgggcaaggctcaaaacgtagcattcgtgaccaaatatcagagatgggttccaacatgatcatgatccatcccgggaacgggaagttcgggggagtccgtcaaagtgccagcagtatgcaaacgctgaagctggaggattacgaggcgatcgttcgtgacgtggatttgatcgacaaatgtaccccttccgtcaattcaagcggtcaagttatatatggagccaataatgccccgacaaccatctacggagtaaaccaggattatcttgacattcggaagttcagcgtgggggaaggcgagatgttcacggatcacgacatcaaaacttccgcaaaagtatgtatcgtgggacaaaccgtcgttgataacctattcacgaagggagaagaaccactgggaaagaccatccggttcaacaaaacccccttccgcatcatcggagtattgacacccaaaggatataactccatgggacaggaccaagatgatatgattatcgccccctataccactatacagaaacgtctgttggccatcacctacattcaaggaatattcgcctcggccgtcacggaagacgattccgaagaagcaatcgaggaaatatccgctaccctacgccagaatcataaaatagccacgggagatgaagacgatttccacgtgcgctcgcaagaagaactcagttccatgatgagtacgacgaccgacttaatgaccgttctgttggcttgtatcgccggcatatcattacttgtcggcggcatcggaatcatgaacatcatgtatgtatccgtcaccgaacgaacacgggagatcggtctccgtatgtccatcggggcaaaaggacgacacatcctattccaattccttatcgaagcggtcattatcagcgtcacgggaggtattatcggggtaattcttggaatcggttcatcacttattattaaatacgctatcggctggcccatatacatccagatgtattctgtcgtgctttccttcctggtctgcacgattaccggaatattctttggctggtatccggcacaaaaggcatcccagttaaacccaatcgatgctatacgatacgaatagattgccgggaaactcggcagttacaggttgcaagttttcaaattaccggttcgacagaacttcttccataaacttgtaacttgcaaccctgtaacttgtaactttttttatacctttgcaagtggagaaagacgatataatgcaaaagacacagaacaagaagatattaacgggagccatccacgtgcttggatggggaatattctttgcccttccctttttcttctatcgcggagaaggtgtttcaattaccctaaacagatatttggggtactgtttcgtcccgttaagttgtcttattatattttacacgaattttctctggctaatcgaacgacagcttttccgccgaaaagtatcagcattcattttaagtaatatcgttctcgtgatgcttttgggtgccagccttcatttctggcaggactttcaccggaaacatttgtcagaacccactccgaaagccttgaaagagttacaagagtccctacctagaccaccccggtacgtgtttatcgcccgggacatgatgctcatggcattgactgtcgccctcagcgtggcaatcaaaatgaccgggggatggtatgaaaccgagaacgagaaacaagaactaaaaaaagctcaggccgaggcggaacttcaaaacttgaaaagccagttgaacccgcactttttattcaacacgttaaataatatctactcgcttatcgctatcaaccaagacaaggcccagtatgctgttcacgatcttagccgcatgttacgtcacgtcctatacgagaataaccagcatttcgtgtcggtagacaaagaattcgagttcatgaaaagctatatcgagctaatgagccttcgcttacccaaaagtacacggctggaagtttccattccggaaagaggcaacagggccatgatagccccgctattgtttatcccactgattgaaaatgcgtttaaacacggggtcagtagcacgcaggaatcatttatcaatatcaaactcgaattacaggaaaacaaccgactcaactgtctcgtggagaacagtaactatcctaaaaaagataacgaccggagtggttccggtatcgggttaacgaacttaaaacgccgtctggaattactctatccgggaaaatatatctttaaggcagaaacccttaacaaccgatttatcacggaactacttattcaactttaaaacgaaaggacatgacactgaattgcctcatcgtggatgatgaaccgttagctttggatttgctagagagttacgtgagccggacaccgttcctacaccttgtcgcacaatgtgatagtgccgtgaaagcactttccgtcatagaggaagaaccgatagatctggtttttctggatattcagatgcccgaactcaacggactggaactgtcccgcctcgtgggcaacaaagtgaaaatcatattcaccaccgctttcgagcaatacgctctggaaggctttcgggttgatgcgctagactacctgctgaaaccgttcaactacacggaatttctccgggcggccacgaaagctttacgatggagcgaaatgagccgggtggaaaacgtttctgccaacgtaccggattctattttcgtgaaaagcgattacaaattgatccaaatccagttgaaagacattctttacatcgagggtctaaaagattacattcgcatccaaaccgaggacaaggagggaggtattctcacgctgatgagcatgaagagtatcgaggaccatctccccggagacatattcatccgggtacaccgttcctatatcgtcaatatcaacaaaattaaaaccatcgaacggaaccgaatcgtgttcggtaaactctatatccccatttccgattcctacaaagaacgattcatggaattactggataaacgagcaattaattgaaaattgaaaattgaaaattgaaaattatatctacctttgcgtggagataataagtcagtgctaacatcaagataatttgaatccttgaagatggattttcatgagaaacattcattttcaactttcaattttcaattttcaattgttatgagaaaagacgaaagatataaccagcgaggagtgtccgcatctaaagaagatgtgcataatgccataaagaacatcgacaaaggtattttcccgaaagctttctgtaagattatccccgattatttaggcgggcagaaaagttattgtaacatcatgcatgccgatggagccggtacaaagtcttcacttgcctatatgtattggaaggaaaccggagatttatccgtgtggaaagggatcgcacaagatgctctaatcatgaacatcgatgacttactctgcgtgggtgccgtggataatatcctgctctcttccacgatcggaagaaacaagaaactgataccgggagaagttatcgcagccatcatcaacggaacggaagagttgatcgaggaataccggaagttgggagtcaatatctattccaccggaggagaaaccgcagacgtgggagacctggtaagaactattatcgtggactccacggtaacttgccggatgaaacgttcggacgtaatttcaaacgaccggatcaaagcgggagacgtgataatcggattatcctcttacggacaagcgagttatgaaacagaatataatggtggaatgggttctaacggactgacatctgcccgacatgacgtgtttaccaaatatttggcagagaaatacccggaaagctatgacaactccgtaccggaagaactcgtttattccgggaaatgtaaactaacagacgaaattgccggattgggcattgatgccgggaaactggtattgtctccgacccgtacgtatatcccggtaatcaagcaggtgcttgacaagtaccggaaacaaattcacggcatggtacactgctccggtggtgcccagaccaaagtgatgaatttcgtggagaatatgcacatcgtgaaggataatatgttccccgttcctcccttgttcaagttgattcaagaacaatcggggaccccatgggaagagatgtacaaggtgttcaacatgggacaccgcatggagatctacgtgggtgaagagatcgccgatgacattatcgccatttccaaaagctttaacattgacgcccaaatcgttggtcgttgctacgataacgacgagggaaaaggtaataagctcacgattatcagcgaactcgggaagttcatatactgaaccgtgggtttgattcttaaaacctatatataaaatgaaaggatgcttttagg

SEQ ID NO: 10707 - DNA, 39260 bp, Unknown
  gut microbiota DNA sequence
caaagccttttcttcgatatacacgttccagtttccatcgtaatcctcggtcaaggcagagagagattccatccagtctcccgaattcaagtaaagcacgttcccgatcatcttcttctccggatagtggatatgcccgcaaatcaccccttgacaacctttcttcccggcaatatccacgatgtgtttttcgaaatcgctgatatatgaaaccgaagctttcactttcaacttgatttcccgggcaatcgaataatagggcaaacctttcttcaatcgacggcgattgtaaatcttgttcgcccacaacaagaaagaatatcccacatccccgactttcgccaaccaactcatagaggaagtcactttatcaaacacgtccccatgcagcacgtaataacgtttatccccactcgtgtagatgtaatccttcaccactgaaatattcgaaaaggtcaaggggatcacccgatccaggaaatcatcatgatttccccgcacgtaaataatcttcgtgtcatgagagatatctagtaacaccttgataaaattcgtgtggcgccgccgccatttactgtttttccctcgcataagcgaccacccgtcgataatatcaccacataagataagggtatcgcaagagtgttgttttaaaaaatgggtaacctctttcgtcttcgaccatttagaaccgaggtggatgtccgaaagaacgattgttttgtaatgttgctgtttcttaggcatatattcattcctaaattacttatacaaaggaagaattgtattgttaagaaacgattaccaaaatatgaaataaatgtttcgacatttcccgtccattcccgtataaatatttaaaagagttttataacttgctactcgattaaataaaaaaagtatgtacaattttgatcagataatagaccgtcggaacacgagttgcgtgaagtatgacaatcttgcaaacgtgtttggtagcacggatattctacccatgtgggtagcggatatggattttcaggtagcccccgaaattctcgatgccgctcgtgaatgttgtgaaaaaggagttttcggatacacgttccgaagtgataaagccaaacaggcattcgccgattgggtggcacgtcgccacggttggcaagtggacacccgctggctattaagtagtcccggtatcgtcacggccctggcattaggggttcgagtttacacggaagaacatgataaggtcatgatttttactcctgtctatcctccattctatgccgtggtgaaagataacaaccgggaactcgtatgcagtaccttgaaagtagaaaacggacattaccagattgactgggaagatgttgaaaagaaactaaaaaacggagtaaaattactgataatgagcaattctcacaacccagtgggaagagtatggaccaaggaagaacttactcgaatcggaatgttatgcttgcaacacggggtcacgattctctctgacgaaatccattccgaccttgctcttttcggacacaagcacgtggtaatggcctccctctcaccggagattgccgcgatcaccgtgaccatgatggctccgagtaaaacattcaatatcgccgggatgatgaattccgttgtcgtgatctcgaacccggaattacgtcgccccttcgagaaagaacttctatgccttcacttggatttgggcaatatcttcgggcacgtcactctagaggctgcctacaagcacggggacgcctggttggacgaaatggttcgttacctcgaaaagaacatcctgtttaccgaccaatttctccaagaagagttgcccacgataaaaatgatactcccggaaggctctttcttactttggcttaattttcgggcgacaggattatcccacgaacaaatccaggaaaaactactccacgaggcgaaagtcggtttaaatagcggcatggatttcggccctgatggagaaggcttttttcgtatgaacatcggttgcccacttgaaacggtaaaagaaggattcgaacgcttgaaaaaaacattcaaataggacttttccacagtaatatagccttgctatcaaggctatattaccttatattacatatcatactctcaaggtaagatttataaacaattattcttgttttttaaataccgtctgtaatattcattacaaagttcccctgttttcacgtatatctttgtcctagaacaaaaaacaactgactatgaaacggacaattataaaaatagacgaggaaaaatgtaacggttgcgggctatgcgtgcaaggttgtcacgagggagctttacaattaatagacggaaaagccgtcatgataagtgatttatattgcgacgggctgggtgcttgcattggagaatgtcccgtcggcgccatcaaattagaggaacgagaagcggaaccgtatagcgaagaggctgttatggaacgtattgcccccaaaggagaacacgtgatcttggcccatctgcgtcacttgaaagaccacgatgaaaaagaattggtgaaacagggagtggactatctaaaacgccataacatccccataaatctccaagaaatacatcccactccgaaactaggatatggatgtcccagttccatggcaagagaattaaaacccataatgaaacccgcagcaaccccatactctagtagctcagaactccggcaatggcctgtacagttacacctgctaaacccacaagccggatatttccaaagagcaaacgtactactagcctccgattgttctgccttcactgccgggaattttcacgaacgcttcctgaaaggtaagattctggctattgcctgcccgaaactggatcataataccgattcttacgtggacaaacttcgtagcatgattgacgatgcccggatcgacatgctcacggttctcatcatggaagtaccttgttgcggtggcctcctgcaaatggctttaaaagcgagagaaatggcctcccgtaacatcccgatcaaaaagatcgtactttccgtggaaggggaagtgaaaagcgaagagtgggtataaaaataggtttataaaccctattatcatgctgtaaaacatcaaaatacgtggcgaatgatattcctttattattagctttgcaggctcaaaaaataacaggaatatgaatattgattttactacaatcattgattacatcggtacattcgcattcgctatcagtggaatacgtttggcatcagccaagcgattcgactggttcggggcatacgtggtcggagccgcaacagccatcgggggcggaacgacacgagatttgatgctggggttaactcctttttggatgcaccaaccctcctatctgattgttacagggctggccttgttattcgtgattatgttcgggaaacaagtgatccggctgaataacacgtttttcatctttgatgccatcggattaggactatttaccgtggtaggaattgaaaaaagtttacttgccggatttcccatgtgggtagctatcatcatgggtatgactaccggagctgtcgggggtgtgatccgggatatatttatcaacgaagtacccctaatcttccgcaaggatatttacgccatcgcctgtattctaggaggattaatttacttcgcctgtgacttctttgccgtaggccatatcaccacccaaatcatcacggccggaagcgtcattttagcccggattgttgccgtaaaataccatatcagtcttccggtattaaaaggaaatgaaaatcaataagtaaaaatagcgatagaaagacatgaagctttctatcgctaacacacacaatcactctagtttaaaatatctaaaaataaagcatatcgacaacatttcctccctctttaccatcccgaagccatttctgatacttaattttcacatccacgggaactccagatattccttcatatttttttactaattctcctgtttttagatctagaaccaacacatcccctttcaatccttcagacataccttccgtatcatccccataacgagaaactcccaaaagtatttcctgttctgtccttgaaacactcatacaagtgattttagcttccgcattatacccccatttcgacaactccacgaacacgctcgaattccctggggcaacattattttccaactcgcgcaaattataacgatacaacttatcattcgtggtaaacaacatataagcttcatttttcatcggataataagatgttgtctcgttaataatattactaggtactgcaaaatccgcaagtaccgattgcgttccattcgaaagattcatatacaacatccgataacccgccccatcgctcaacacggccacggcatgatcttttgttgccgtatgggttccaaataataaagaataaccactataagtcccaagttctggaactccaacattattagcggacagcaaattattataccaaaattgaccgaccgtttcatcaaacatatacatatttgccactgtataattttgtcctccagactcaactaaagaagacaaaaacattgtcggggataatgttcctttccacggactccttatttgcataaatgcaagttttaaccacatattcatagaaggaacacatgttgattgtatcgtccaaaattcatctcccgctattgtacacgtataattcgtattcatcatcccttccattgttgtagcctgatgattaaaagctttcacttcaaaacccgttatatctccggaaggtaaaccctgagcctctttgatataataattatgatccaaaatggcattcccctcaatctcctgcaacgtctcctcactcaaacattttatttgatgatccgtttctattttcaacccggaatttacattatttgcctcgggaagataatctcggtgtatccttcgtggattagtccctaaataatttccggttaaagcttcataaaaattaggggtaaaaacacttccttctttgtccaaacgcttaaaagacaactctgcatgccctttatgtttgcttaaaaccaaaatacagtcacccgccgtggaactggacacattgattttaaaatatttaaatgctttcgtgccaagttctttatccgttaccacgaaacgagcctcgttttctcctaacgggaaattaacatacacgttcaaatctttggccgtggacactattttacgattaatttcccaaaaatacgtgaatcgattcgtatcggcatactgcgtcccttccaaagtgaccggaatatgtaacaaatccatctgatcacaacgaatcaaactatcaatccccgaaatcgtaatttgattaatatcgtgataatcataattccccttatcatcgtaacaagcaaataacaagcctgtcagacacacaaaaaatagtattgttctcatacaaattacttttccaaatattaaatttcaacaagcccggtttttgttatacgcatccccgtttcatcatcaataatcacatttttatccagccaatcattcaacataccactcttcttctgcatatcaaccccagtaccgacaaaagcatcttcaacagcgaacatagaatcccactctatcaacttccgccatttcttcgggtgataaaaaccaagttgcgtctcattcgccgcccaccaagacggagggaataaaatattattcacagacaacttcatttcatgcccgacattaatacccaacaagaaatcctcaccctcttcaagagtcagcatcaaagtttttgattccggatttcgcaaactggtactcaaattcttacgatacaccaaaattcgaagagtatcctgaaaacgattaggcccaaacacctgctcttcggcaataggagcataatcttcaccctcaaccatagttgtcacaccatttaattgcacccccttttccagcaccttcacccgatatttccgaggttgttctgaaacattccccataagttgcacgacgatcttagccgtatcagcaacgacctcttctggcaatttcccaaacgagaaaacaaccgaatctacgcttacattattccccagactattctgaacctcgtactggaaataaattcgatcaatatcatcatactcgtattccggatcttgctcacatccctgcaatccaagacaaaacgcccaaataatatatattaacttcttcataaaacaagtcttatttaatttctatatccatattctatctcttcttccggtaacggtaacacgaaaacactattacttgcttttaccccatcttccgaagtattaccgataatatcatgatttaaacgcttatacacgtaaaaaagctgtccctccccaacaaactctttccgcatttccaataaaatcatctcttccgtcaccgtttgcttattcacgattgatttcgtcctagcttgctttaaagtttgtaataattcggccgcatgttccgggtcatcctccatccatccttcagcagcgatcaagtacatctctgacaaacgaatcataggcatcttgggaaaaaaacgttcactattatcggaagtatattttataatataaaaacttttataccaattcaatctataatcctctaaatcacccaaatataatatagactgataaccactagccatttgcacgtttccatccgtacccgttatttgcttatgtacaccttccgcatcagatttcacgttttgtccccgcaaagaaaagatatgttcatcagaaaaaagtaaatctttatttgcctcatccgtgttcaaactcttttcataattcaccaaagcaaatttaccacaatcaattacctcctcggccagacgacgggcatcctttattttatcccctcccatgctcaaataaacccgggctaacaaagctttcgtcgcataataattcattcgagcgacataaaggtcagctccatctttattttcatcatcaccattccccaactgataaggtttcacttccttaatcggatcattctccaaatattttaccgcatcctccaaatcaccaatcaccagattcaaataatccatcgtgctataaacaggcggcgtttttactccaaacttcgtttgataaggcaaaacacgagcctttggatccagtttaacgtcagtagcaaacaaacgataaatatcaaaatgcaacaaacctcgcaaagctaatgcctcaccccgtacctgattccgtcgctcatcagataaaacagaagcatttttctcactccattccaaaatattattcaatgctgcgatattagcataaaatgagctccataacagatagatataacttttcatatccttattctcgtaatcataatcccggaatattttcatcttattcgggatctgagaataatcataaatacgagacattatatcaagcattccgaaagacaatgtttgtccatacatattagaagccgcaatatcgcaatagacaccggctaaagcctcggaaaaaccacgctcggtactgaaaagatcactttcttcactctggttgatcaaatctacatctaaccatgaattacaagaacacaacatgagcgtcaacaacaaacttcctatacaatttcttaacctcataactcttttcattaacaattaaaacgtaacattcaaactcaggttaaaagttcgggcaaaaggataacttgtccctcgctcttgctttatggttgacaaacgaaatacgtccgtcgtactcaacatcaatcgaactcgatctgcataaatcttctgactgatatcccggggtaattcataagataaagacacacttgacagagaaaacaaatcattatcaaaaaccaaacgtgtcgtctggtaaggagaagtccgatcatcaatacgtctgaatttagcatgatcccccggttctttccaacgatcatacaacacccgcttatctgcattcttataagggttagcaccttccactttagaagctaaggtcccattataagccttggccccaaactgatatttaaaaagcatatacaacgtaaaacccttccacgtcaaattcgtattcacgtttccttcgatcgtaggtttcatatctccacacttcactttatcatttgcatcatattcaaatgtcaactccccgttacgtttaatataaacctcgtttcccgttgctggatcgattcctcccgaacgaaccatcatcaaggctgtttgcgaacgcccggcctcatattgccggtacacgacagttccttgattataccaatcactattagcatatttattgatctcttccaactgattagacaacttcgtgatcttgctcttattatggaacgcggaaagtgttacattccatcttaaatctctttgagtatcccgaatcaaattcaagcgcaaacggccctcaatcccagtattcctcaattttccaatattttccacataactactaaaaccggtcgacggtgcaaccgtcaaaggcaacaataaattttccgtgtttttaatgtaaaaatctccattaaacgtaaccagccctttcaacaaagtcatatccacacccacgttataagaaatagtgttctgccacttcaactccgggttaccgtatccggccaaactgacaccaaacacaccattatatattttagaaaaatcataattataagttgtcaacgcttgagtcgaagagaaattagtcgttcccgtactacccacggaagccctcaattttaaagaactcttctcgtctcccgaccaaaacgcttctttatgcacattccaagcaactcctactgaccagaacggagcaaaacgtgaatttctcccgaatttgctggaaccatccgtacggaaagataaatccaagaaataacgattatcatacccataattcacgttaccaaaaaatccgaccaaccgggatttatcataactaccattaggactcgaattttcctcaaaagagatcgccgctcctataaaaaccatatccggattaacaaaaccgaccccggtataagaatctccttcctcggtcgactctgttagattgcttcccacacccacgttcaacgaatgtactcccaacactttattatattgtaatgtcaaattcccgtcaaatttatcactttgtgaattggaacgaaaataagttcctttctttttaggatctgtttccgtgctataatccaaagattccggagacttgaataaatcccttttatcaaattgtctggtataactaatacgtccttgtaatcgcaatgccggaataattctccaatcaatattaaaattatcttgaatagatgtatatgtactcgtattctttttcgccaaatgagcattatacaaaggattccaatctcctgaagaaagcttctcaacaaactttccattctcatcataaatacgatcgtacggattttgattggcatacaaataaaattcattataaggagaatttttcgctttcacattatccacggccaaatcattccgaataaagaaattcgtcccgatgttataattaaatgtcaagttaatacccaaccgatctcggccggattgcttcataacccctttatccgtgtcatatctcaaatctatcccgtaacggaaatactcgtctccaccctcgaaattaatagaataacgttgattcaatgaggttgttaaaggctgagacaaccaataagtattcacgccctttctcacctcttccaatcgagaattataaagttcatccagtttacattgttctaaataatcggtatcctgatacaaaccagctaaccgctcatattctaacttttcttcagcattcatcaaattatagtcccgcaaatccggcaccgaaatattataattagcattcaagctcactcgaatctgcccggacttcgggcgaatcgtcgtgatcacaataactccattggaagcgcgagaaccgtataaagccgtggcactggcatctttcaagatagttatagactcaaccctatttacatccatatcataaacacgttcagccgaaacttctaccccatccaaaatataaagaggagcattaggattcgtggtcgcatcatctgcattcgcccgcaaatcaaacccgttttcaccccgaatggtaatatcaggaagcacgttggggttagaaccgtttgtcaagctttccgccaaacgaattgaaggatcaaaagcactcaaagcttgcgttatacttaacgctccaactttcttcaactcttctgtttcaatcgtcacttccgaaccggtaaaactctcttttgccttattaaaataacctgttacaacaacttcttccacgttttcaacttcttcctccagaacaatttttaatgtatcagaaggaagtttaaactcgacctctttcgttttataacccacaaaactcaagatcaacctcccattcataacaggcaaccgaaacgagaaaacaccgtcaaaatttgttgccgttcccatatttgtattttctaacctaaccgtcactcctggtaacggctctttattcatgtcaagtactctaccgacaagcatatgatttttccccaaagaatcatttacaacaacagcacttcgagcattcaaaataaccacgtcattcacgatagtatagctcaagtttgtacccctcaagatttgtgacaaaacatcctccaatgccatattcttaacatcaaccgaaatgcttgtcatttttttgatatctttactatcaatgttataaaaaaagccataatccgtttgaagttttaaggattgaattacctcttccaaacttaccccttccagatgaagggtcaccatcttattttgagagtgaagcgccgccgatacgtgcagcgaggcaacaaaaacaaaaagaaatagaaaccttgtcataatccacaattttcgtaaactatccctccatataggaatagaacaccgattttttttcatacatttgtaattataagtgaaacatacgggaacaacacccgcaaaatgtttgttccctatttattttactaaaagcagaaattgctggaaacaatttctgctttcatttttttaatcccgaactaacacgactcgcccgttcacgtcaaaatgcacgtccccagcttttgcaatcacgtccaacacctcctgcaaacgagtctgccgtttcataataccgaaaaatcgtttttgctttaactcaggattctggtaaaaaatctccacatcaaaccaacgtgctatcttccttaatattgtctcaagattatcattttgagaaacaaaaagaccgtctttccaagctacataaggaaaaacatctactgtaacaacttctgttttccccgtttttcgatttaaaagaaattgttctcccggaacaatcttttgaaatccaatagcctccatccctttcgctaacaccccgacagaaccttttaccaaggttgtttgtaattctttttcatcttcatatgccatcacgttaaactctgtcccaaacactttcacctcttccaaagaggtctccacgataaaaggacgctctcctttagccaccacgaaataagcttctccggccaatttcacttttcgttctccaggcggaaacaccgtaggataatacaaactagaagccgaattcaaataaacctttgtcccatccgacaggacaatcatatattccccagaaggaggaacatccaactgattataaaccaattccccggttgcaacagaatcccggtcatactccaacacgccaacaccaacacgcataaccacgcaatcttgactgatcgtttgtgccactagagtcgaatccaacacaattcgctttccctgccctaaacgaagagtcacacttgctttttcttgttccgcttcaacaaccaccgggcaggaaatatcatttttagtccaatacatccaaccaatggaaaacaaaatcaacacggtagcagcaacaccacacaatttccaccaattagaatgatattttacacgtcttttgaattttatctccatcaatcgacgctctacatccacaaccgaacaatcacgagccataatcttttcttgctgcacacaaaaacgtttataatacaaacgatgtttttccgactcgttgtaccacgcatcaaacttttgctgatctacatcagaaatcggtttacctaccgatttcctataaagaatagatacagatatcgacctagatttccacatttttcataactttagacctatgacgtaaaaaagcgaaaacagggtgaatgaaaaaacaagaaaaataacgttaataagactacaataaatgcttattctttatttctaacaagattaaaggtaaaagtaaattcaaatgttgcatataaagtctctccctcagatcttgatatgcctttttcatatgtgttttaaccgtattgattgacaaacctgtcacttctgctatcgaaggataactcattccatcataaacactcattttcagtatttcccgacgctgttccggcaacttctctatctcttcttccactttccgaattaactcctcctgttccaaaagattaaaatcccccacataataaacagcatcaaataattttatatccaacggatctacaactttcaactttcgtaaataatccacacatccgttctttacacaactatacaaataagaacgggaatattcgacttcattaaaatccgaccgtgacaaaagagacaagaagacatcctgtaccatatcttctgctgtttccaaatctcccacataactctcagcaaacagtaccaaacgttcgtaatactgattaaataatacatcgaatttcccctgttccatcacattatagacatttattacttccgttaatgacaaaaatacacaaaaaaacaacggttcaaaaatattttagaaggaacaccatttttcataacaataaacaccaaggaaatatcattaatcagaactgttgttcctccgtggaatcaatcccaatggctatttccttgataatccccttttcaatataaatggggcgggcatgtctacgcaccaagggacgataatactcgaaaaccagcgcagccacaaaacaacaaattccggataataggataatcttttgcaatccaatccatttttcaagcgcccccagtaccatacttcccacgggagccatacccgtgaaagacattgccatatatcccatcacccgacctcgtttatcctcgccggaaagggtctgcaacagcgtgttgatggaagccacggcagcgataatcgtgaaacccaccggcagacataacacggctgccacccaagggatcgtgacaaacgacatcaccgataacccgattcccagcaaagccccggaaagcatcaccacttttcccaaacccagtacacttttccgggcagccagatacaaggccgcaatgaaggaaccgacaccgatacatgaaagtagtaaccctagcatctcgctctccccgtgcaggatcgttttcacgtaagccgggataaacgtcatcaagggcaacccgaaaaaactgatcgcactcattaaaagcaacaacgtacggatcggtatatttccagccacataccggaaaccatcccgcatatcttcccacaccttttgtttcacggctctctcccgtctgggtgctatccgcatcatcaacaaggcaataatcacggcaatatagctgataccattcaacaggaaacaaataccctctcccaacaaaccgatcaacacgccacccactgcaggaccgatcaaacgagaaccgttaatcacggcagaattcagtgcaatagcgttactcaacttatccttcggaaccaaactcgggtaaaaagattgtcgagtaggattatccaaagcattaatcaaaccgatcaacaaactcagaatcatgatatgccacacctgtatcaaccctgtcaacgtgagcaaggccatcaacaacgcctgtaccatagacagtgattgtgtcagtaccaacaatttacaccgattaaaccgatcaacaaaaacactcatgtaaggcgttgccacaagaatcgggatttgcgccataaaagtaacggttgccagtagaaggaccgatccggtcaaccggaacaccaaccagctcatggcaatctgttgcatccacgtcccgatcagcgaaatacattgtcccccgaaataaagacggaaattataactcttcaaggaagcgaatacctgcgtgaaagcccctaagttattcggcaataactcccgaagcccccgccaaccacccaaaaacctatacccgctcctatctttattcatcttatcaaacaaaataaccttataaactcataacctacccacccgtaacctgcaacgtggcatagccacttcccccacaaaaatacttacattttgtatcatttgaatcaccagcgaataattttgcctattttcgcgataagaatacggttatgccatgatagaacaaacagaaaacagactctcggttgcagaagcgcagaatatctgcctacggaataacatcccgttttacacgtaccgtttacccggttctcgtgaagttattttcggggctcaactctccaacgatacccgaatattcaagggattcgaaaaacatcgaggagaaaaaggttttgttatcacacccttcaatcactcctcctggagtttccccttcttcatcaaggccgatctttcatttacggactacctaactgacggagaggcgattcggaatttacaaaacaccgttttcaataccccggaacgtattttcaccaagcaggattgcgagcattttgagtacttggatgaactgcgcacgatgatcgacacgctgaaacgggaagggatgaaaaaagccgttctatcaagaaccatcacgattccctgcgattcactccggctatcgccagcaatcttcgaacaaatgaaacaataccaccacgccttcctgttctttgccgctattccgggtaaatgcgcttggatgggagcctcaccggaaactttcctcaaatacgacagaaacggattcttcaccatggcactagcaggaactcaacccgtggcaacagcaaaaaatccacctgaatggggagacaaggacatcgaggaacaacaaatcgtgaccgactacattcaagacacgttaagacatttctttacccgccatctcgaaatcgagggaccaatcacgttacaggccgggaatgtctttcacctttgtacctttttcagaagtgatgaacaactcccagccgaccagattgacgaactggtaggacaacttcacccgactccagccgtctgcggtttacccaaaaagagagccatgcaaatcatcacggagatcgagaaacgggaccggggatattatgccggattcctaggaccattgcaagcctccggggcatttgacctgttcgttaacctacgtaccatggaagtattcgatgatgccctacggttgtatgtcggaggtggtattactcctctttccgacccggaaaccgagtggcaggaaacttgccagaaagccgatactttactaaacctcatacgtcaaatgaattatggaaaaattacattctgatattaaaagtgttcgaattcttatctgtctactcgtccaaaaagggatcaaggaaatcgttctgtcacccggttcccggaatgcacctttactcgtgtctgttgcccgggaaaaaaggttgaaacatcatgtcatcgtggatgaacgttcggccgctttcttcgcactgggaatagcacaacaaaccggacaaacggttgccctcatctgtacgtcgggaaccgccttattgaattactcccctgccgtggcggaagcctattaccaaggcattccccttctcgtgatctcggcagaccgtccctccgaatggatagatcaagatgatagccaaacgatacaacagcaagggacattatgtaactttgtgaaaaagagcttccagctcccgacagtcatcacgtgcaacgaggatcgctggcataccaatcgtttggtaaacgaggcaatcaatttatcccaacacggccggaaaggccccgttcatatcaatgttcccttgagagaacccctgtacgactttcaacacgaatccataacctctgaacgggtgatcaaaactctgaaagaatctccttccttaaccgcagaaatctctcaaaacctgcgggaagaatttttcctttgccccaaggtcatgatcattgctggatttcatgaacccgacccggttttgcaacaacacatcaagctactggcaagccttcccaacgtgattattttaacggaaagcgtaacaaatctatccattcccctcgtgatctccacgatagatagggtaatctccactattcagccggaagaggcagagacttacgccccggaactactcatcacgttcgggggatcgattgtttcccgcatgataaaggctttcatccgagaacatcccccgcgtactcattggcatatcgacgaacggcctacacctcccgacacgtacaagtccatgaccctccacgtcccaatggacacccgaacattctttgatcaactccaacctgcggaaataaaagccaatagcctgccatctagttatgcccaccaatggcatcaacgggaagaaaaagctgtacaaatacacgacaactacttgaagtgtatcccgtggtgcgatctgaaagccttctccatgctcattcccgcacttcccgccggaagtcgtttacaactaggcaacagcaccccgatacgttacgcccaactcttccgctacacgcaggtggaccgtaccgatgccaaccggggaacaagtggcattgacggttgtacttcgacagccatgggtgccgcctcaacattcaacgggattaccacgctgatcgtgggggacaatagtttcctgtatgactctaatgctttgtggatcaagaactgttccccgtcactacgaatcatcgttatccaaaacgggggaggaggcatattccgctttttggcaggcccttctggcctagaagaagtcgaggagtactttgaaacccctcacgacgtggatatagaacggtttgccggagttcatcgtttcaaggtgtaccgggcaacggatgccccctcgttagaatcagtactatcagaattctaccaaccgggacaacaaccagccattctcgttgttcacacacccggaaaaataaacggagaaatattaaagggatattttcaggcgttgaaggattaattgaaaaacgactactctctcattttttcttccccagaaagtacacttatccatttatttactacttttgggatagcatttgattattctttttgtcttaatttatggggataagttattatttcatggacaaggccaacaagcaggtcggaccgctctcgttagatgaactcaaacaaagaggaatcacgcgagaaacacccgtgtggcgtgaaggtatgccgaactgggtacaggcaaaagatattcccgaattacaggcatatattgtaacaccgaaaccctacatcaacgaggtacagcttattttgattttatgcgcaatctttgcctccattttattcttactcgcaggtagatttgtttccgcatttgtcgcctcgtggtttgacatttacccttatgtcccgggaattgccatcctcatcatcggggtactaggtatcgccttttccctgttttacaaaaaaagaaaatacctactgaatacaacactggtagttctaccctttttactatcttccttattttccattttctattatggaatgctaaatcatgcctaccgtttccggcatgatcgctgtatcgtggaaaaaagatccggtgtcggggtcatggataaattcggtttggagatcattccctacatatacgataatatcgcacccaatagttactggtcacccgcttactaccgggccacctacaacaatcaagaaggtgtactcgcccttaacgggactgaaattatcccgtgtatatatgatgacattgatacctggctcacaaccgacaatttcatggttaaatcaggtaaactaaaaggactatataccccaagaggaaaagtaatcgttccttgcgagtacacgaaaatttctcgctggcgagaaacctctctcatccacgtgaaaatagatgatcaagaagggctctattctccagaaggacaagagatactaccctgtcaatttattatctgtaaagaattaaacggaatatccttgatcaatcgaggaggattttcgaaaaatggtaaagttcagaatggaatctggggagcgatcaacaaagagggcaaaatcatcgtcccctgcaaatacaatgacatcacgccctacgccggttctgaacgcatcgaagccgacgggggatacatcaaggatatttacgactttaacggaaattatttacgaagcgaatataaatggtaaattattaaactatggaaaattatttttacctgaacgaaaaaaatgaacaaaaaggcccgatctctcccgaagaattaatcagcaacggggtaacgaaaaacacccttgtgtggaaaaacggtatggctcaatggctcccggcaggagaagttcacgaacttgcgaaattgttcacgaacgaaacctccaccccttcaacacccccaccattccctcccacaccaccccaaccaccagtaaccaacaatcccaaaccggacaactggttagtatgggcaattttatcgaccattttatgttgtttgccgctaggaattgtctccatcatctacgccacgaaagtagacaatctttggaactccggtcaacaagaggaagcattaaaagcttctaacatggcaagattatttttcttcctggcattaggtggaggtgtactcgccctgatcatcgggttcatcagcggattagcaagcatgatgataggaggaggaggttattattaatattcgaatgaatgtattcgttcggacattttaagaaaataggccttatattaattatactactcgggatcatcctctttttcgttgatcccgagtattcggcattcatacccaaatgccctttccgttggttcacgggactcgattgtccggcatgtggcagtcaaagggccatccatcagttattacacctgaacatcaaaggagctttcgggtataacccgttcctcatactctcctttccctacttgatcgctctcgtgatcacgcaatggtttgatccccaaaatcgattggcacaattgaaaagaatatgccaccatcgaataaccgtcaacacgtacttaatcttaatcatcgtatggtggattgcccggaatatcctaccgatcttccgtgatacacccctatcaatcctataacacgtaggactcattcacatatcaaagacactcgtgaacgtctttgaaacgtctttgattcgaaagtgatacgcctttaatccctaagatcatcgaatacacaccggaaaatgaacggatttttcacggtaaaagaattctttataatgatctcacgctaaaataaaaattatcacgtacatttgcgattgcactttacaaaactaaaaaataacataccggatatgtcaaaaagagaatggagtacaatcaaagaatacgaagacattcgatttgaattcttcgaagggatagctaaaatcaccattgatcgtcaggaagtttacaacgctttccgcccgcaaacaaatttcgaaatgctggatgccataaatatctgccgggaacggagtgacattggtgttgttgtactcacgggagccggggataaagcattttgttccggaggcgaccagaaagtgaaaggaataggaggctacattgatgaaaacggcgtgcctcgcctcaacgtgctcgacctgcacaaggccatccgttctctcccgaaacccgtcatcgccatggtaaacgggtacgctatcggtggaggccacgtacttcacatcgtgtgcgacctcacgatcgcttccgagaatgcccgtttcggacaaacaggtcccaaggtcggtagtttcgatggaggattcggttcctcctatctcgctcgccacgtcggtcagaaaaaagcccgcgaaatctggttcctctgtcgtcagtacaccgccaaagaagccgaagagatggggatggtgaataaagtggttcctttcaaccaactggaagatgaaaccgtggattggtgcaaaaccatcatgcaacgcagcccgatggctatccgcatgatcaagcgggcattaaatgccgaattggatggtcaacacggattaatggaattcgccggagatgccaccttgatgtactatctcatggaagaggcacaagagggtaaaaacgccttcttggagaaacgagacccagacttcaaaaaattcccgaaattcccgtgacaagaaaattcgcatctttttagtatctttgttatcacaagggattttcataaaacacgatgcaacataatttcgacataacaaacaacggggaaatcgttgatgcgcttataaaaggagatgaagcaacttttgccatggtctacaaaagctacttcatctccttaagaaattatgccacctccatcctctcggatcaagaagctgcttatgaaattgttcagaatctttttgtcaccctgtgggaaaaccggaaaaaactagaccgggaaaaatctctccgcaactatcttcttcggggaactcacaataattcactacgctacctcaaaacccactcccttcatcaactgcatcacgaacagataaaacaggagataagcgaagaagaacaagaaaatatcatcaaccacgatcccccgacggatcccgaaactcaactggctaacatccttaacgagctgccggaaagaagtaaacaagtggtcatcatgagtcatatcgagaataaaaaaagcacgcaaatcgccaaagaactgggcatttctgtccggaccgtagaaacgattctttaccaggccatgaaaaaacttcgggcaaaagcaaaaaaataacattttcgaatacgtagtttcgaaaagtcaagtattatataaatagattagagagaaacacgcatgaaaacaaatgcagggaaatatttggaacgccccattggggagaacgaggaagagttactagaaaaaatatggaactcacttccccccgtggaaaacgatgatcaaatgttggatgaaaactatcggaacgtgaagcaaagaatacataaacataccctcagacgccatgtcatctacatttcaagtagtgcagccgcagtatgcttatttatacttttgctattcagccccgaatcatccgaaaagtctcctgtatttgcacaattaaatgatatgggcgtatctatcagcgaacaaaaagttcaattcatgataggagattccatcgtggccaacttgaacacgtcagccaaaatgaatatcaacccaaatgcgaagacgaccttacaatccgccacgggagaggaaattgccctacaagaagagactccactcaagatatacgtccccgctggaaagcgtttcgatctagagctgacggacggcactcacgtgtggttaaattcggacacatggctcgaatacccggcaacattcgcctcgaccaaagagagacgggtaaaaatcgagggagaaggattcttcgaagtcaaaccggatgccacgaaaccctttcacgtagaaattcccggaggagaatccattcgggtattgggaaccagtttcaacgtttcagcttactcggataacgaagagaatatcacgacattggttaccgggaaaatcgaatactcactccccacacgaactgaagccatcgccctcttacccaatgaacaagtacgggtaaacaaaacaacgaaaggagtcacgaaaaacgaggtaaacacctccgaattcgccatgtggaaagaaggaatcctctatttcaacaatgaaaaattacctacactggcaaaacaacttgcccgaatgtacggcattgaaataaaagtagcagaaaaatacaacgatacttgtttctccggcatgatccggtatgaaagaggtattgattatatcacgaaattattaacaacaacaagtaatataacgtgtagcattgaaaacggtatcattcatctgaaataaaaacaaaggaataacatattgaatatctgaccgaggacattatcaaaacataatgcctggggaattgtatactcaaaaaaataacacaaaatacaaaacctaacgatcaaataatatgaaagagagaacattaccagacaaaaatacctagaaaacagtagcaacatattagcgaaaaaatatcgaatgtagataacaactcaaaaaagggaagactttatcacggataaagccctggaggttgtaaccctaaaaaaaaggtttatcaagcaaataaacaactaaaaatcaatcaataacagtaacataaacatcatgaaagaagacacttcaaccaaccttagacaagtaattccctggacgctgttcacgggaaaaatgatcttgcctcttttcttgatcatcgtattttgtagcatgacaaataatttacatgctcaagatacgcgtctcaatcttaaactggaaaatacgacccttctggacgctatcaaacaaatcagcaccaccacgggaatggaattcttttacaatacaggacaggtcaaggcttatgacaaacgcatttctaaagaattttctgacaccccgctaacacaagtactggaatttttgttggacaaaacacctttcacgtacaaactggaagataaaacgatcgttatcgtacaacgtccggtacaagctaatacaccccagataaaacttatcgagctaaaaggtgttgtgtttgataaagatacccgtgaacctcttcccggcgtgaccgtcatgatcgaaggaagtcagcagggtactgcaaccaatgccaacggagaatttattttccctatcgattcggggaactacaatatcatattctcttttatcggttacgaaagattagtaaaaaaattcaacggtaacaatagtgcggaattccgggaaatacagcttgcccccgccgtggaaaccatcgaagacgtcgtggtgaccggaatataccgaagaaaaaaagagagcttcacgggatcggcaagcacgtacaaggtagaagacttgaaagccgccggtacgcaaaatgtacttcaaagtatcaggacactggacccctctttcaagattaacgtcaataatcaattcggatcagacccgaaccggttgccggacgtggagattcgaggtaaaagtagcgtcatgggattgaaagaagaatacggaaccgatccgaaccaaccgttatttatattggacggattcgaaacggatttacagacagtcatggatttgaacatgaaccggatagcctccgtaacacttttaaaggacgccgcatccacggcaatttacggttcaagagctgccaacggtgtattggttattgaaacgaaaattccggaaaaaggagtactttcgctctcgtacaaaggagatttcagcataaccatggccgacctgtcggactataacctcatgaacgcacgggaaaaactggagttcgaaaccagagcgggaaggtacaccagcaccacaaacgacccgatggaccaaatcgcaatggacaatctcaggaaccaacgtttacaagacatcgaacgaggcgttaacacctactggctcagcgaaccgattcgcacgggtttcgtgcagaaacacaacctttatgccgaaggaggcgaggaacgcatccggtacgggctgggattaagttacggcaacacgcaaggagtgatgaaaggttccgaccgtcaaacgattagcggaaatatcgacttggtttaccgtacggggaaattccaattcagcaataaatttatactggattacatgaaaacgaataatcctgccgttcctttctcggaatacgcaaaagccaatccttatttcagaaaatacaacagcgaaggcggtatcgacaaatatttatactacacggaagatcctgaagaatattccgtacccaatcccttgtggaacgctcacctgaataattacgacgtgcaggatcaattcgggttcacgaacaattttatccttgaatggtttgccacgaatgatctacgtgcaagagcaaaattcggaattagcaaaaacagttcgacagccgaggtacgtctttctccgcaacacagtgattttgatgagatgagcgagacagaaaaaggactttacacgaatgctcaaacgaaaaacctgaattacgaaggagatatttccgttacctacggacacctattcgcaggaaagcacatgataaatgccgtggcaggatttaattttaacaccaaagaaaattccaaaaacggttacaaagcaatcggttttacagaagatgaatttgacgccccgtctttcaccaacagctacccggcaggctctaagccgacttacacggaaagcaaaacacgtgccgccagtttctatatcaacgggggatacgcttatgacaaccgttacctgtttgatttcaactaccgcagtgacggtacttccgtgttcgggacgaacaaccgtttcagaaacacgtggtctgtcggtttaggctggaacattcacgccgagaaattcatggagaattgcgatttcttccaactattaaaacttagaggctcggtcggaaacccgggaaaccagaatttcgcttcttatcaagcattctccacctacgctttcacgcactggatgagcaatattttcggaactggagttattctcgaaggcttgggcaatcccgatctggcatggcaggaaactatcaattacagtttgggaaccgatgtcacgatgttcaacgaacgagtgaacctcactgtagatctataccggaaaaaaaccgacccgttagtagcagccatcacgacaccgagctctatcggggtgaaaagtgttatgatgaacatgggacaactgaaaacagacggtattgaagtaacgttaaaagtttcacccatttaccgcccgcaagatcgtttcgtatggaatatcagtctcaacgggacacatgccaaatcaaaatactccaaaatcggaaatagattgcagtcgatgaacgaacagaatcaagcaaacttgaacaccaccagatactatgatggcggcagtcctactgatatttgggcggtaagatcggcaggaatcgatccggcgacaggtcaagacttatttatcaagaaagacgggacttataccttcacatatgacaaaaatgacgaagtggtggtcggaaataccgaacccaaactggaaggagtactcggaacaaccctttactataaaggtttatcgttcggatgttacctacgttaccggttaggaggtcaggttttcaataacgctctctacgaaaaggtggaaaatatcgaccgggaagggatcaattataatcaagataaacgggctttatacgaccgttggagtactccgggacaagaggctaaattcaaaagaatttcccttttccaaacgaccgaaacttcttcccgcttcgtgatggacgagaacacgctgagcggagagtctttcaacatcggttacgaatttacccaacctttcatcaagcatatcgggttgtccacattaaccgtgcaagctaacatgaacgatattttcagagtgtcttcggtaaagagcgagcgaggcattgactacccgttcgcacgcacgatgtcattctctatatctgcaaccttttaaacggaagaattatgaaaagaaaaatacaattaataatgcttatatgttgcacccttattttcggggcttgcgacagttggttggacgtgaaaccttacgaccagatagcggaagaagacctgttgaactcggaagccggtttccagaaattactaaacggcgtgtacatcgagttgaacgacgagaatctttacggaagtaccctcatggtggaaatgctagaactcatgggcggagcctacaagatcggcgacgaccaagggaaatggggggattatattgatttaaacagctataaatatagcactgaatactggcggggacgcttggataaagtttgggaaaaagcttacgccctgatcatgaactgtaacaagattcttgataacatagaaaaccgggaatcactcttcacgggtatcaactatgacattatccggggagaagccttggctttgcgtgccatgttgcacttcgatatgttacgcctgttcggaccggtttacatgaacaacccggaaaacgagtgtatcccctactatctgtaccaatcatcgaatgtaaacgatttattaccagcaaacaaggtaatggaatatgtcattcatgacttgcaagaagcggagaaagcgttggcaaatgatccgatcatcacgaaaggtactttaatggaatcagccgggaatgaatccaatttcctacgttaccgggcattacgtatgaattactacgcggtacaaggactcatggcacgagtttatctctatgcgggggataaaagcaacgcatccatctacgccaaaaaagtgatcacggcggcagaagcggggacattcccgttcacggaaaggacggaagcaaagagtgaccggattttctcgtcagaggtattgtttgccttaacgaacacgaatcgagttttgttattcaagaattactacgacccgtcccgtaacccgtcgtttatatttaccatggatgaaaaattattgaatttcctgtactcggcgtcgggttcctctaccacgagcgacactcgttttgaggccaactgggaacaagctacactccccggattgacaagcggtgcccggtatttctataaatacaatgacatgagtactaccggattgatacagaatacaatgattccgatgttaaggttaggggagatgtatctgatcgccgcagaaagcgaatcggaaactctgaatgacggacttccatatatcaacacgttgagaaataaaagaggtatctcgaatctgggttcactaaccgtaacggatctgacctacgaatacatgcgcgagttgtatggtgaaggacaattgttctatttttataaacggacgtttaccacaatcttaaacagaacgaacagtagtggaagtagacctgcaggccaagcggcatcaacccaagttttcgtggtgcctttacccgacacggaaatcaataacagacaataacacgtaaattatgaaaacaagaaatatatttatatggattatgctgctcatcatgggattaaccgcttgctctgaagaagaggttaatacttacagtgcagatgaaggaatctatttcaatcaacgtataagagtgggaaatatactgacggatagcacgaatttcacgttcgtgtatatcgaagaatcacagaacgaggcaaccgtgtccattccggttcaattagtcgggagggctactgatgaacctcgcccagtaaacatcaaagttgtcgggggaagtgcaaaggaaggggacgatttcgtgttacccgtcaacccggtattacccgcgggagccagttcgttcaattatgaaattacgttgaaacgttcgaccgccctgcaggaagaagcaaaaacgattgagctcgccattgaagagaacgagtatttcagaccgatcatcacgcacgagatcacggatatccaaagcggtacggatgtcacgaccatgcgtcataaaatcgaattttccgaattgttcacggaagcgcctgttgcttggtacacttatatgtacccatttacccctcaacgtttctttttgacttgccgggtaatggacatcccgcgctctgactttaatgatgcgtcaaaaatcccatccgcccgcttccaatatctcatatctgaaatgagaaaatatgtagcggaccaattgttattggagaatcccgatccggaaatctttgacgagaacggaaccccaatcttttaacaacacaaaaaagacagatcatgaaacagatattatatagaataaaatcactttttttacttgttgcaatagcaggtggaattagtgcttgtgcggacgataaaggcaattacaattaccatgatattccggaagtaaaaattgaaggtatcggtaattccattacggctttggcttaccagaatttgtctatccccgtgcaattagacggtttgcaagccgatgaaaaccgatatgaatacgagtggttggcaatccggcagttcgaagcggaagacgcaaatgacaccgcaagcgaagtgttggcaaccacaaaagaatttaatgacattatatctttacgccccggtccttacaaattgatttacacggtaaaggacaagcaactggatgtattttaccaacaacaagcgaatctttccgttgtcacgacaacttccgagggatgggttcttctttgttccgaaaatggtaatgtccgtttggatatgatttctaccgtgttaggagaagaagtacactccaaggatatgctcgccgattcggatatgccgttcaagaaagggccgctggcactcattgctcttagtccggaaagcacggaagatatgagtgccgtacaacaagtagatcctacctccccgttctatctggttaccgaagaaggaactacccggttgcataaagacgctttcgaatggaaagaagagtatcttatgaaatacgaaatgggagatatgagcgatgccaaacccactcatatcacatctgcatcttatttccgcatgatggtaacaccggatggtacacatagcagcaatttcggttccggaaccgatgcattatgggaatcaaggttaaattatcttcgtaatgacgataacacgaaagaatatatacaagttgcaccatatgtgggatgtaacattacgaacccaatgcaatatgccccggtattcatgttttatgatttaaatcacaaacaatttgtttatcatccgggaggtatgtacggcggattaaccggagatctaactgtcggatgcttgaatatgagcgatgatgaagccggaggtgacgctttctcatttccggtaggatataactacgtttacatggaaaatagcggacgcaaatattccgaatctgccatgatgcccggcttcggcttcttcaataacatcactttcacgattttggagaataatggagtttatcatctttatggaattgcattagatgattattatatggcattgatgggaatgccgccttacacaaaaacccattatgcgaacctctccaattgtatcgatattacacaagcaaaacattttgcattcagtcctttgaacgaccaaatgttttatgccgtggacggaaaggtttaccgggtgaatctggacacgagtaccccttctgcccaattccagtttgacgtgccgggagaaattacttgtctgaaattctatctatacaggaacgcagaaaatgccagacgttcttacgatttgatcgtgggcagcgacaagggcggtactgacggaagtgaactcagagtgtacgaagccattgataacctggcacaaataaccgattacaaagaatatcattccggtttcggcagaatcgtggatattatctataaagaacccataactcaagaataaaaaatgaaatacattttatttatcgcattcattctatccgtcgtcagttgtgcaaaacacgacggatataccctcacgggactcgtccccgaagcatgggaagggaaacctgtttttttggtactggatgatacgaatcaacctcattttattgacagcacgaaaatatcgggaggtaaattcaaattccaaggtaaattcgaggttccgcgttattgcacgattaacatttaccttgatcccaatgaccgacagacccgtagtaaaattataaacttctcgttatttatcgacagcacagcggtagaagccacttgcaactattccggcaaacaccccgtgttccaaatctccggaagcggcacacaaactgaataccagaactacctgagcgagatacaacccatggaagatgaccggagtaaaacgttccacgcttacggggaagcctactacagtacgaaggatttagcgaaagcgattgaccttgccaaacttgtcacggaaaaaagactcgcgatcagagaggctaaaatgaaatacctgaaagcacaccccgaatccgccatcagcgttaagatagcgcaagaactctccgacagaaattccgacctttccctgaaagaaattgaaggattgttcactagcctatcgcccgaaatgcaaaattcggaaatggggcaggctcttcgggcaacaattcaaggtagacaggtatttataggaagtccctttatagaccgggaactctcggcaccggacggaagtaaaaagaaaatatcggatttcgtaaaacccggatgtactacattaatcgaattctgggcatcttggtgcaacccctgccgtgtggaaattcctcacatgcgtaacacgtacaataaataccatcccaaagggttaaatatcgtgagtatctccattgacagtgatccgaagaattggcatcaagccatggaagaggaaaaaatgccttggggacagcttattgataataccaaagcaacctttcgagcttataacctgactggagtcccttcttcaatccttgtagacgacaaaggaaagatcattaacgtaaacgcaagaggcggatggctggatgccgccatgcaggaaatctatgattaattattaatatttacttgacatgagaagctttttatttattattttactctcgatcgcctgctcttgttcacagaagaacaacgacgatattgtcgtggacttcaaagtggaaaacatgacctattccaaggtcgctattgttgtcagcccggaaatgatcaaggaaatggaactggacaaacacgggaaagccacctgtacattacagggtgatgtgatatacgcccgtctgttttatggcgaggaagccaagaatgtttttttccggaaaggcgatcgtgtaacgatttcttttgatgccaacaattttaaggacggcatgaaattcgagggaaagaacgccccggtgatagaatatcttaattctatcacttatgccccgataaatccccccgactacgagcgttcactggacggaattatcaaccttgccaacgagaagatagacgaggctaccgccttactgaaagcccggaagctggaaacgacaaatcccgaatttgtaaaactggaagagggacgaattaaatattcatatctagtcagtctggtcatgtatcccatgggacatatcatgttcgacacgacttatcgcccgaacgaggagtattattcaacgttggaacaatatgtacaagaggacgagagtctgattgacctcgacatttacagggaatttattatagagtccgcccttatacttggaagcaaggataaagaaatctccggcatttacaataaaaatgttgcccgaatgaaatatatcgctcaacatttcaaaaatgacaagctaaaacaatctcttcttaacgaaattgcagtcagacagataaagaaaaacggtattaataatatcaccgagctggaaaatatttacaatacctacgtgactgacccgactttacgggctgcctataaaacagagtacgacaaatggaatattgccgttgccggaaaactttccccggacttcgaagcaaaggacattaacggcaaaacttactccttgaaggatttcaaagggaagtatttatatatcgatatgtgggcaacgtggtgcggtccctgcaaaagagaaatgccctacctgaaagaactggaaaagaaaatggaaggaaaaaatatcaccttcctcggtctttccactgacgaggacaaagcggcatgggaaaaaatggtcaaatcgggagaactctccggcgttcaacttttgcttgggcgagggagtcaattccaacgggattataatatcaacggcatccctcatttcattcttattgatccggatggcaagattattaaccccaaaactgtccgtccttcttccccggacgccgaaaagattttaaacgctcttcccaatatttaatcgaaatatcttacttttgttaatataaacaaaagtaagatatgttacgagcaacgtacacgagatacattctgaaattcaaacagcccgcaggaacctcccgcggcattctcacggagaaggaaacttggtttgtcaaagtctggtattcggaacaacccgaaatatacggactgggagagtgtgctttatttcggggattaagtgcagacgacacgcccaattacgagaaaaaattggcatatatctgccaaaatatcaacactctcatgctttacgaacttaaaggattgagttctatcctattcggcttggataccgccatagcagatttaaataatggtggcaaacgcatcatttaccccacccctttcaccgaagggcaaacagatatcgaaatcaacggtttgatctggatgggcgacaaagacaccatgcgccaacggattatagaaaaactggacgccggattccattgtgtcaaactgaaaatcggggctatcgatttcgaggaagaactagatttattacgctatatccgaaaacaattcagcaaagaagtcgtcgagttgcgagtggacgcaaacggggcttttaccccgcaagaggctccccgtaaactggaagaactgtcacgttatgatatccactcgatcgaacaacctatccgccaagggcagtgggaagaaatggctattctatgccggaacactccaatccccatcgccctggacgaagaactgatagggattgaggtttctgacaaaagtaaattacttgacatgatctgccctcaatacattgtaataaaaccatcgcttttaggtagtttttcgggttcatgggaatggattgcccgatcccaagaacgcaacattggttggtggatcacttccgccctggaatccaatatcgggcttaatgccatcgcacaatggacagcttatcttcaaactttcctccccacgggtatgccccaaggccttggaacaggacaactctatacgaataatatcccttcacccctagaacaaaccggctcaaccatccggtacaacccacaggtaaattgggatttatctcaaatttcattctaaacgtcatggaaatcaatatcaagcttaacggaattcgacacaagaatctggaaacgcttaaaaatagcgttgattccgatatcaccaccttcctacaagaatggtatgatcccaaagaccacgtcatcggacacacatccggctccacgggaaccccgaaagagattcgattactgaaaaaagacatgcttgcctcggcacgcctcacgaacgaatttttcaatatctgcccatcatccaacttattgctttgtctatccccgaactacatcgcgggaaaaatgatgatcgtccgaacaattctttccggagcaaacctggtcacagtaaaacccagctcttcccctttacaaaatatcgaagaggacattgattttgcggcaatggttcccatgcaagtcataacaagcctatcttccccggaaacggctacaaaactagctcacattaaacagatcatcatcggaggggccgccgtatcccccacactggaacaacaacttcaacaaatcccaacagcctgttacggaacctacggcatgacggaaaccgtatcacacattgccctccggcaaataaacgggggaaaaagatccccttactactttgccctgggaaaggtcacgtttgaaaaagacgaaagagaatgcctgatcatccatgccccacacttacaacagcaaacctttgtcacgaacgacatcattcaactcacggacgccactcatttcgaatggctgggacgccatgacaacgtgattaattccggtggcatcaaattatttcccgaaaaaatagaatctcgcatcgcacccctcatcccccaacgcttcttcatcacatccgaacccgattcccgtttgggacaaaaagccgtcttggtcatagaatccgcatcttggagcgcaaccgaatgccaaaaactacttcgtcaattaagatcatgcctatctccttacgaaatccccaaagacatttatttccaagaacattttagtgaaacctattccggcaaaattgttcgaaaaataaaataaacccacacgaagaattcagatactttcttatctttgccccgcttaaacaaacgtttgcaatgaattacaaagaagtcatcgacaatatatacaacgaggtaaaaccctttttcgggaaaggccatgtagccgactacataccggctttagctaatatcgaccccaaacaatacgggattgccatagccaccctcgacggccaaatcgttggtacgggagattaccaaactaaattctccatccaaagtatttcaaaagtcttcactcttgccatggtcgttcgccacatggggggtgatctgtggaaatacgtgggacgggaaccttccggaactccatttaactcgctggttcagttggaacatgaacaaggaataccgcgtaatccgtttatcaacgccggagctctcgtggttacggataaagtgatgaacctttaccaccgaccgaaagaagccatcctgcaattcgtgagaagtgtagccggaaacgatgacatttactatgataaaacggtggcccagtccgaattcgaacacgccagccggaatcaggccctgggacatttcatgaaaagtttcgggaacatcgataacgacgtggactcgctgatcgacgtgtactgtaatcaatgcagcatcgccatgacgtgtgaggaccttgcaaaatcattcctattcctagccaaccacgggatcaacccacacaacaacgagagtattctcaccgtgagccgctcgaaacgcctcagcgcacttatgctgacctgcggcttctatgacgagtccggagagtttgctttccgcgtgggaatgccaggaaaaagcggtgtgggcggaggcgtggtagccatcatcccgggcaaacttagtattgccgtatggagtcccgaactgaacgaacacgggaattcatacatgggaatcgaaacgctcgaacgatttaccacgaacatcgggatttccattttttaacgagactttaccttgctagaagttacaagttgcaggtttaccagttacaaattcaaaaacacaatgagaaaaataatatttttactggtaatgcagtttgtacttttttcatgtcaaaaagacaaagccatggaagggcaggggatacaactcccgcttgaatgcaacgcttccgaggaattctccatacactacctgcacctgtttgccattgatcgggataatcgcatcgcccgtcacgaaacgtttacatcgtcgcacatccatgacaacacgcttcacgccattctcccgctgggtagatacaggttagccctcgtagccaacgctcccgaggaaagcattgttatcccggaaaccggagaagtacttgaaagcttgttcctctgcctgccacatgaagagaacacgaaccaagaagccaacgacatctccacggccctgcaaagcgtcagtatcacggaaagtaaaaatacccttccccctatccggctcttccgaagaacaggagtattacaattctctctccatgcaattcccaaggcaatatccaatctaaaactggaattgtctttcgtcccgtcctctgtcagtttttccggatcgaccaccaacacgttcggcacgatcacgaaacccgtggatcatcaaggaaaggcaatgattcgaaccttcccgaccaaaaaaggagaagctacgctttctattacctatgatgaagacaacaaatcaaaaagaaaaatcattcctttctcggaggctatcgacacgaatcaaataattcacgtagactgtaacttcccggaactaactgaaggtggaatacaggggaacggagaaaatctgctacaaaatggagatttcgaaaaatggagtaacccgacaatagaacccgaccattggcatttttataaagacgggaaagacagtgtcgcccttaagatcacgggtccccaagcccgttccggtcaatccgtttacctgcaaggcaaaacttacctgtaccaagatataaacattgaagctggtaaacgttatgaaataaaaatgaatgtaaaggccccttctacctctttcccgtggaaatattactgctattggcgtaaaaccaaaagtacggcactcccggcagaacacaacaaacctatacaagcccaaagttatttgaaacaaacagatggctggatcaacgtattcaatggcaaatcattcatcgccccggaaggagcaaaacttttacgggtagaaatccgtacctatagcaaagagatcacacccgacgagggaatatacattgacgatttctgtgtagaactcgtggaatgaaactcattctcaacacaaaatcgctgaattccttttttgttttaagtagaaaaactaaattcgcgtcttaaattgtaatataaataagattcaattatatgggaagagcgttcgaataccgtaaagcacggaagctaaagagatggggcaatatggcccgtacgtttaccagaataggaaaagagattgatatcgccgtaaaagccggaggcccggacccagcgaataacacgcgtttacgaatacttatccaaaacgccaaggctgaaaacatgccgaaggagaacgtcgaaagagctatcaaacgcgccgtttcaaaagatacttctgactacaaggagattgtttacgagggatacggtcctttcggcatcgccatcgtggtagaaaccgcaaccgacaacaacacccgtaccgttgccaacgtacgtcattgcttcaataaatacggtggttctttaggaacaactggtagcctcgatttcttgttcgaccggaaatgcgtgttcaaaattacccgcccggagaacttcgacctagaagaattcgaattggaaatgattgactacggtgccgacgaaatcttcgaggacgaggaaaatcacgtgatcatctacggttctttcgaagcgttcggggctattcaaaaatatttggaagataaccactacgaaatggtcagcggagaattcgaacgtattccacttgatacaaaagagttaaccgaggaacaaagagaatcagtggacaagctgctagaaaaattggaagaagatgatgacgtaaccaacgtttatcacaacattaaagaataattttcttgcagattaaaaaatattgttgcatatttgcacccgcaaaacggttaaaacctcttgcaacaaggaagacttcgtagctcagctggtagagcaattgactcttaatcagcttttactatacagaaaacattaaaaatcaagcacttacaaaaagtaggtgcttctttttttacccattttttaggctattttgccctctagttaaaccatgagttaaaccaagagttaaaccgaaatcagtcatgacagcaggaattaacatcttgtgttacaaatcaaaaacacttgcaaatggagaacatcctctaatgcttagagtatgtaaagatggtaaaaagaaatacatcagtttaggtctatcaatggcagaacaatattgggacttcaccaaaaacaaacctaaacccaactgccctaataaagaatatattgaaacactcattgctgataaaatcaaagaatacaatgaaaaggttattgaatttaaatcagaaaacaaagaatttactgccactactcttattgaaaaggtagccaaacctacgaagaaaaaaacagtgggggagttctttttagaacaaatagaacaactcagagctgccaaaagaacaggatacgcacaatctcattatcatgtttacaattctttaatgaggtttaatgggcatcttgatatttatttttctgatatagacattccttggttaaaaaaatacgaagaatggcaaagaggtaatggagatgcagaaaattctatcggaatcagatttagaacattaagagttgtttacaatcatgcgatagaagaaaacattgtcaaagaagaatattatccattccgcaaattcaaagtttcaagattacatgaggttacagccaaaagagcaattgtaaaagaagaagtgatgcaaatcattaattacaattacacaggtaaagacttctatatccatctagctattgatttattttcgttctcttatttcatgggaggcattaattttattgatatggcttatcttactcatgacaacataatggatactagattagtctacaaaaggaagaaaacaaggaaacttataaaacttccattgttacccaaagctattgaaattatcaataaatataaaacagaggattctcattttcttttcccaatcttatcaacatttcatcaaacagaagtacaacaaaggaatcggattcacaaaacaatagctaaagtaaataggcgattgaaaaatattggtaaagaacttggaatagataagaaattgacaacctatgttgcaagacattcccatgcaaccacattaaaaagggctggtgttagcacatcacttatttgtgaggcattaggacacagttcagaaaaagtaacccaaatctacttggatagttttgaaaacagtcaaatggatgctgcaatgcaaaatttattatgaatatcatagcctcttatcttcggatttgaggctattttctttttctccaaaatcattttatttatcccccaagaattagaaataatcaccaattttataaattctaatccagacactaaataagaaatataatat

SEQ ID NO: 10708 - DNA, 10797 bp, Unknown
  gut microbiota DNA sequence
tagttgtttatcgttgaaaccaaagatatacctctacgtacccttctatatgtattattaattttaattatttttattgtgaatatttttgtagcaaagttaagttctacgaccacaagtgaggacttacaggctcttttctcggagcatggttctgtttcttcagccaaagttattatggacagagaaactggtaactctaaatgttttggttttgttgagatggaagatgaaacggaaggtttcaacgcaatcaatgccttaaacgaaactgaattccaaggaagaaaaatcgttgtgaaaaaggctagacccagagaagaaggtggcgacgatagaggtcaaagattcccaagagaaagaagatttaattcgaatcgttaagaatcaagaaaacagagagtttgagaaagctctctgtttttttatatcatttgcggtacttcgccttcagataggcgtataatacttggtgcattaattgtgcttccgtcagttcttcgtccgtgaggttgggagcgagttctatgccgttgcagacatcagtcaattgttcatcccggtcgatacggtcatcgaaattctgttctatcaagaaaatatcaaacaattgcatccgttcgatggattccaaggctagatttcgggcttccaacaagttgttctcccggtattttttcaaaaagacttcgattaggctatccgtgaaatagtctgcgaaatagtgcatcaggatgatacgctttttgagacactcgtagatgtgtgccggggcagacgagatgcactcgctgatgcccagataagcgagttctgccagctcgatgctttcctcttcttcttcatccagttcgagtaggagaatcttgtataacaaatcggcatattcctcttggcgggtgatagcccggctttcatggtaataatgaaaacgatcggggataactttctttagtaacaggcggagggccttccggtccccactggcagtgtgtagtaaagattcgtcaagtacgttttccagtttgttcatggttgtttgttatttttcttcggacgggttaaagtttacccagccttgggctttcagttcaaatgaattaccgtccttggtgattaaattataaccttcgctttttgcacaagtatgtccgatgatactgatttcttccatggtaattagtttgtcgtaagcgtcgagtggggccgtgaacaatagttcgtaatcttctcccccggaaagagcacacacggtggcgttcatgttaagttcctcggccattttgaaagtttggtaatcaatcgggattttctcttcgtagatattacaaccgagaccggaatcgtggcagatgtgtaatacctcggacgagagaccgtcggaaacgtccatcatggcagtcggtttaatacctttttccttgagtaattggataatatccatcctggcctccggtttgagttggcgttcaagaatgtattcatacccggagaaatccggttgtgcatggggattttccttaaatacgactttttccctttctagtaattgaagtcccatataagcggctcctaaattcccgctgacacaaattaagtcattttctcgtgcggtgttacggtaaacgatgtcttcttcatcggcttccccgataaccgtgatgctgatgcacattcctgtttgtgaagaggttgtatcaccgcccacgaggtcgatcccgtagtggtcacaggcaagataaatcccctcgtacaattcatcgactgcctctagggagaaacggttagaaacggcaagggaaacggtaatttgtcggggggttccgttcatggcgtatatatcgctggcgtttgttgcaacagccttgtatcctagatgtttcaatggggcataagctagatcgaaatgtaccccttcaatcagcatatccgtgctgaccagtacttttttgtccttgtaatcgagtacggcggcatcgtcaccaactcctttcagggaagatttgttttttaattttatatcttgtgtcaggtggtggatcagtccgaactcccctaacgtggatagtttcgtcaatggtttgttttcactcatgtttcagttcttaatattcaaaacaaaaatacgctaaattgatgaatcgagcaaatgataatgtgattgccttatgttacaggtttatggagaggtattttgtgaatgagaatgaatcataatactgatttatcacgtaatagatattatctacctgatagatgattgacaggttatatttttttgtacttttgcacagattgataaattggagataatagggtataaaaattatggctaaagaacaagacgatatattgaatgaagtaacagagggtgagtataaatacggttttgtttctgatgtggaaaccgagatgattgggaaaggattaaatgaatcggtgatccgcttgatttcacaaaagaaagaagagccggaatggctcttggaattccgtttgaaggcttaccggcattggcttacgatgaaaatgcccacgtgggcgaaattggagatcccacttattgattatcaggatatcgtgtactatgcggccccgaaacaagaggtaaaaaaatcgtgggatgaggtcgatccagaattgaaagcgacatttgataagttgggaattcctttggatgagcaaaaagcattatccggggtggcggttgatgccgtgatggatagcgtgtcggtgaagacgacgttcaaggagacgttggcagagcgtggggtgatcttttgttcgttttccgaggcggtgaagaatcatccggatttggtgaaacgttacttgggttcggttgttccctattcggataacttttttgcggcattaaattcggccgtgtttagtgacggatcatttgtttatattccgaaaggagtgcgttgccccatggagttatccacttattttcgaatcaatgcggcgaacacgggacagtttgagcgtactttgatcgtggcggaagaggagagtttcgtgagctatctggaagggtgtaccgcaccgcagcgggatgagaatcaattacacgcggctatagtggagattgtggtagagaagaatgcggaagtaaaatacagtaccgtgcaaaactggtatccgggagataaaaacgggaaaggcggtatctataatttcgtgacgaaacgaggaatctgtaaaggggagaatgctaaattgatttgggctcaggtagagacaggttcggctataacttggaaatacccgagtacaatattgaagggagacggatctgtcagcgaattttactccgtggccgtaactaacaattaccagcaggctgatacggggactaagatgattcatatcgggaataatacccgtagtcggattgtatcgaaaggtatttctgcgggatatagttccaactcttaccggggacgggtgaaggtggtgaaaaactgtaagaatgctcggaatttctctcaatgtgactctttgcttttgggagataaatgcggggctcacacgttcccttacttggaagtggcgaacccaacggcacaggtggagcatgaagcaacaacttccaaaatcggggaagaccagatattctattgcaatcagcgaggaatttcaacagaagatgctatcggtttgatcattaaggggtatgccggagatgtgatcaacaagatgccaatggaatttgctgttgaggctcagaaattgttgcaaattagtttagcggggagcgttggataagaaaactaaaagttaaaggataaagactaaaagtttatagatttacgatttatgaattacgatttatgattttggagtagagatgtttcgagtggttgaaatctaaaatctaaaatttaaaatctaaaatgaaatgggtttactaaagataaaaaacttacacgccgcgatagacggaaaagaaatcttgaaagggattgatttggaggtgaatgccggagaagtccacgcaattatggggccgaatggggctggaaagagtactttgtcagctgtacttacaggacgggagtgtttcgaggtgacggagggagaggtttggtttaatgggaagaacctgttggaccttccggcagaagaccgggcacgggaaggaattttcttgagtttccagtatccggtagagattccgggggtgagtacggttaattttctgaagacagcggtaaacgagcaacgtaaatacaagggattacctccttatccggcaagcgaatttttgaaaatgatccgggagaagatggagatggtaaacatcgacagtcgtttgttgaaccgttctctgaatgaaggtttttccggtggagagaagaaaaagaacgaaatattccagatggcggtgttggaaccgaaactggctattctagatgaaacagattccggtttggacattgatgcattacgtattgttgctagtggggtaaacaaactgaaacgtccggataattctactatcgtgatcactcactaccagcgtttgctggattatattgtgccggatgtcgtacacgtgttgtatgacggtcgtatcgtgaaaacggctggcaaagagctagtgctggagctagagaaatatggttatgattggattaaacaggaagttgagtccggtaagtaatagaagatggaaagattagaaaagataaataatgattttgcgactctgtttcgggagggacaacgtttactgcaagaaggatgcggtgacgtgatgaaccgacaccgggaggaggcttttcaacgtttcgaagctttgggaggaatcccctataaaacggaggattatctttacgcggataccttaccggtatttgaccgggattatagggtggtgctgaagtatatcaagcaagaggttgaggtaggcgagatattcaaatgtcacgtgccgaatctggataccaatctgattttgacgatcaacggttggttcgtgcaggagaatgcaatgccggaaatacctgaaggcgtggtaatttgcagcattgcagaggctagcgtgaaatacaaggagttatttgaacaacattataaccagtacacgaaaccggcggatgcggatggattggtggcgttgaacacggcatttgcccaagacggggtgttcgtgtatgttccggatcgggtggtaatggagcgtccgttgcagatcgtgaacctgatgcgggcaaatgcagatttgatgtcgttccagaggaatatggtgatcttgggacgtgatgctaaagcgactattctcgtttgtgatcacacgttgtccgatgataatttcttatccaataatgccacggaggtcgttgtcggggagaactcggcttttgaatactatcatgttcagaatcaacatatcgaggcttcccagataaacagcgtgtttgtttcacagaagcgtaattcccgctatgatgcaaacgtgatttccctgtatggcgggtttattcgtaacaacctgtttgccgctttgacggaagagggatgcgagagtaatctttacgggatgtatttgtcggataagaaacagcaggtggataacttcacctttattgaccacattgcgcctcattgtacgagtaatcaacatttcaaaggggtattggatgatgcggcattggctaattttgccggacgaattgtcgtgcgtcccgatgcccagcagacggaggcctatcaagcaaataataatttgctgttgacggatacggcacaagtaaacacgaaacctcaattagtgattgatgccgatgatgtgaagtgtagccatggagccacggttggccaaattgatgaagaggccatgttctatcttcgttcccgcgggatcggggaggcagaggctcgaatgatgatgatgttcggttttgcgcatgagattgtcggacgggtgaaacttgcacctcttcgggacgagatcgataatttggtggataaacgcttaagaggagaattaaccaagtgtcacaactgtgtgatgcattgtaagaaataatttatgtttgacgtcaatcggattagaaaggatttcccgatattagaggaaaaaatttatggtaaatcgttggtttacttggataatggagcaacgacccagcgacctttacgggtggtggaaaagatgacggagtattatttacgttacaattccaatgtacatcggggggtgcactatctgagtaataaatgtacggatgccaatgaacaagcccgggaaaccgtgagggagtttatccatgcggagtccacggatgaggtgatatttacccggggaacgaccgagagtattaatctcgtggcttacactttcggggaggcttttattcgggaaggtgatgagatcatcgtgacggaaatggaacatcatgccaatattgttccttggcaaatgctgtgtgaacgtaagaaggccgtgttgaaagttgtgccttttaatgataagggtgagttggatatggaggtgttccggggatttttgaatgaacgggtaaaattggtcggtgtcgcttatgtttccaacgtgttgggtacggtgaatccagtgaaggagatgatagacgctgctcatgcaatcggagcttatgctttggttgatggggctcaagccattcaacatatcccggttgacgtgcaggtattggattgtgattttttcgctttttcagggcataaggtatacgggcccacgggagttggtattctgtatggaaaacgtaatctgttggagcaaatgccaccctggcagggcgggggagaaatgattaaggaagttcgtttcgagaaaacgacttataatgaattgccttttaaattcgaggcggggaccccggattttatcggggttgtcggtttaggtgaggctttggagtacgtgaaaagtatcggtttacaggagattgctgaatatgaacatggcttgatggattatgctatgaagcagattcgagagattccgagcattattttgtacggggatgccgtgaataagtcttccgtgatttcgttcggtattgagggagtacatcctttcgatctgggcactttgctggataagatgggagttgccatacgtacgggacaactgtgtgcggaaccggtgatgcaacattacggggtaccgggaatggctcgtgcctccatagccatgtataacactcgggaagaaatagatattttctgtgaagggttaagaaagatagaaaagattttcaaattataataagagcaatgacgatagaagagattcagaatcaaatcgtggacgagttttccatgtatgatgattggatggataaatatgcttatctgatagaaataggtaatggcttgagtgcgatggatgaaacgcataagacggaggacaatctgatcaaaggatgtcagtctcgggtatggtttcatgccgaactacgggagggtaagttgtattttgaagccgatagtgatgccattatcacgaaaggtattgccgggttattgatccgggtattctccggtcagacacctcacgacattgtgaatgctaatctggattttatcgataagatcggcttgactcaacacctgtccccgacacgttctaacgggttattgtcgatggttaaacaaataaagtattatgccttggcatacgagggaaaataacgagagatatgggaaaaagtttaatggaagatttagttattgaaaagttatctaccgtttatgacccggaggttccggtgaatatatgggagttggggcttgtttataatattgaatttccaaagcaaaacgaggtgattataaccatgaccctaactgctccgggatgtccgatcgcagatcaaatcgtgcaggaagtgcatgatgtagtgctgacgatcgacggaattgatgaggccacggtaaatttaacttttgaaccggcttggagtccggaaagaatgagcgaagtggcccggttggagttgggatttgatatttaaaagagtttgtaaagtttataaccttacgactttacggacgactttatggaggtattatcagaaatagctaaagcgtgtgggtttgatgcctgtggagttgtcccggtggatgttttatcccgggagagggaaaggttagagcgatggatcagacaaggatttcatgcgggaatgaattacatggcgaataatatagagaagcgggagaatcccgctttacttgttgaaggggcccgctcggtgattgtgactttgacaaactattatactccgaaactccagttggaaggtattccagtggttgcccgctatgcttacgggaaagattatcacagggtggtgaaagaccggttgtttaaattgtatgcttgcttggaggaggctatcggacagaaaataacgggacgggtatttgtagattccgctcccgtgtttgaacacgagtgggcccgacgggctgggttgggatggattggccggaactctttgttgattcatcctcgtttggggtcctattgttttattggtgttattatatccgattttgaaccttcaaggtattccctacctgaagagcggaatttttgtggtcagtgtaaccgctgtgtggaggcttgtcccacgggagccctttcctcgcatgaagtgaatgctaacctttgtattgcttataacacgatcgagagaaaagatgacatcccgtcaaaaatgaagaaaaagatgggagatcgcttttttgggtgtgatgcttgtcaggaggtctgtccgtggaatcggaaagccgtactacatcatgtagaggaattttccccgaatgaatggttgatgcggatgagtcgggaggattggttatcgcttgatgaggaaatttttcgagaacgctttaaggattctcctcttttacggcccggattggagcagattaagcgcagtgtcaagtgattcttcttttcgagaaagacttttgtatgttttaaattttattatttttgtgtggtatttggaatacagatgtaatggctagggataaatcgatggaaaatggtacggtaaataatcgaattacttcggaaaaagaattcgaggaggtatttcgttactattatcgcccattgtttttatttgcctatggttatgttatggatgaaggagaagcggaaaatatcgtgcaatctgtttttaccgagatgtgggagaaacgaaaaaatttgccggagaatttgaatctgaaagcttatctttattcttcggtaaaacatgcttgtttacgttattttaagcgtttgcaacttttggatgaatacaaaaagcggcaagctgaagctttggttttgtcttttgcagatgatgatattgaagatgatagagaattgattgctcttgttcagaaggctttgtcacaattgtccgaacaacagcgtagaattgtggagctacatgtgatggagggaaagaaatatttggaaatagcctatttacttcaattatcagaaaataccgtgcgaactcatttaaaacgagcttataagatattaagagaaaatctttcttgtcttttcccgaatatctttttttgaaaaataataaaataaattgatttcttgtcacccaaaataagagttcatgtcttttagtgtaaaatttgatgaaagatatgaatcaagagcaaatcgagtggactttaattcggaaacaaaatagacggttgtcttaccgacgaggaacgagagtgtttggagcgttggatggcaggtgatgagagacgtcgtggttttgtggaacatgcttgtctatattataaacgggatttgccgatggttgatgagactcgaatttcagaggcttggcagcatttccaaaaatatcggctgatctgttagtggtaaaggctatgcttgacggggatatagataaagtatacgaacgatttatggcatttgaggattgtgattttctgcttgatgcgccttggttgcgtgcgactattttccgttatttgtttacacgattagctgataaacaacgtgtgcaagcctgtatggatcgcttgcttgcctaccagggccgattaggtcacggtggagaggtggttgatgatgtggtggccttaggtaaagaaaaattagcgaagatgtgactttagaaaaattgcgtgttcgatagttgtgggcagggtgcccccccgttgtttacgggttgtatattcgatgtattcaggtatcaaagccgtatcactttcgaatcaaaggcgtatcaaaggcgttcgggagcgtccttgaatcgggagaatcccgggggagaagcgttattccctcgcctcttccctcctcccgtcccgttcccggtgcggcattctttcatgcaagcgattggttaccagttatgatggggaaattttgaaaaaaagtttatgaaaaatttggaaaagggataaagtttgccttatctttgcacccgctaaaacggaacgagggaggcgagacggggggacggcgagttcacgtggtggtggcgttctggcgatgttgacgacaatctttccccggcgggaccctttaaacgggggcgcgagaaaaaaagtttgaaaaaacttcggaaaagatttggagggaatgataaaaacgccttatctttgcactcgctttcgctcctggaaaagcgacggcgatgaagatgacaagaagagttctttaacaatattgacgtgaaaataacaacgtagcgagcgtgaatcggaatcgacgcgagtcgagattcgatgaacacatgaccctgccagataaga

SEQ ID NO: 10709 - DNA, 10029 bp, Unknown
  gut microbiota DNA sequence
gctattgagtggaaaatccactcaaagtagtccccttaattcacagtaatttgacccctgttaaattttcccattctcccttctgtttattcttgttttcttcgtattcttcctgtccgttatgccgggttctacattaaatttcgtttacaaatataacgattattttttacttttacatttccgcagcgactccccgaagagttcaatgcgtatggcctgatgcacaattctgtccagaacggcatcggcaatcgtcttttctccaataacgtcataccagtcttttaccggtacctgtgatgttatgatggtagattttttaccatgcctgtcctctatgatatccatcagattcatccgcccctgggaatcgaaaggttgtataccaaaatcatccagtataagcatatccaacctttcgattttcttgagttcttgcaggattgtaccttttgccttggcaaccttaagcatccccataagtctggatgtattggcatataacactttatatcctttttggcaagcctggaagccaaaagctgttgccagataacttttacctgttccggcgcttccggtaataaacaggtctttgcgctctctgacaaaagtcaggtcggccaaacgcagggtaaggttcttgtccagccccctttccaccgagaagtctatttcttcaatggtggccttgtatctgaaggaggcctgacggatagccctctctaccgcacggtttctgcggtcatcccattcacttgaaaccagccatgagacgaactggtcggtagtcatactctctgtccgatgtgtttccaaacttgttttaaaggcataatacatacctttaaggttcattcctaacatcttttccaatgtatcctgattcatttccatattgcatctggttggtttattgataatattcttttcctctgatattctcatgggaaggcatctccgtttcttgcccggcactgtcttccaacgggaactcatcctgccggttgttaaggatgcgctcaatgatggggtaattgtacagaccgtaacttgtagcccaacgacaggcattggtcagtcgggtgttgccgaccctgcgtgcgaagctaagaatgccctggcacgatttataggcttgctccggatgttttttctcttccatcacccgacggatatatgcctccacgtccggatggatagctgccgcctcatgtataaatttgtccgggttccattccgtgatatagcgatggtgtgaagccagatgctcttccagggtcgtgtaccggcaacgggccctgttgcgggtatgggtggcaatcagctcgtagccgtaatagatgcatacctggcgtgaggtatatgacaggatgactttcttgcctatatagcggcaaggcacgctgtagtaatgggcatcttcccccaggcggacatggccgtttttcatcacggtagccctgtaacgatgcctgagttcaaagcggatgggatttagtttgcgcagggaatcacgttctatctcctcgaactgttcccgccgactgtatttgcggcctgtgagcggagtgttgttatggagttccaatgccacgcggatagccgcgttcagtgaatccaggtcataaaactcgcgttcctgtatcttgggatagatactgcggtaaatcagtttaacggcaccttccaccagcgccttgtcacgtggcttgtaagccctggcggggattacggtacagccgtaatgttcggcaaaagcggcaaagtcttcattcaggatagcctcgtatttactgctcttggtaacggcagacttgagattatccgggatgatggcggagggaactccctggtagtataacagggcgttttccgaagcacggatcaagtcctcttttttctggctcatgacagcttccacataggttaactggctgcaaggaagaatcgcgacaaaaacctccacaggaatgatttctcccgtatcaaggtcgatgatggaaagtttgtcgccggcgaagtctatgaacattttatcaccggctttatgctcaagatgcatgatgggacggctgcaggctatatattgctgaatcagaatatagaagcgggtgcgtccgtagccatccggatgggaagaaaggtactcgcgatgcaatgcctcgcgggtaacacctttcttcttaagccgcttgcaatactcgggtaacaacgactttagttctcccagccgttcactttccgtctttactctgctcttttcgtggaataactttgagagttcctggtccggcagggacaacatctgctcataatccaaaccgctacgttgaaatacttgtaagtatttcttgaccgtgttgcgagagacgcttaacatactgctgatacttttggtcccatgaccctgggagtaacagcgtaacacttgacgaatcttttccattcctaattgtttattgggcataaatgacttttatttgtttttaacaaacaaaatagaattatagaccggataaacaaaaatcaaactcacttttgggggatcattttaaagtgaatttaagggatcactttcgagtgaatttaggggatcactttaaagtggacggaagggggcaaatatgagtgaattttccaattacgctatcaataatatttacgggactcttgaattttataatggtagcgtgattatcatgaaggatctggcagaatcaccgtcagacccagattttaactcgttaggatcaagcgaatacacgattgctttcgtggatgaggtcagcgagattggatcgaaagctatagaagttttgtcatcacgtctacgctggaagattcacgagacgttcaaagttccgaagttattaatgacaacaaacccgtgtctcggttgggttcgtgatcgattcgtgcttgatgaaaacttggaaccagttgtaccagcacaatatcacaggtatgtaccgtttagcgtgtacgacaatccagatgcggctttccggcaaatttacgaggcatcactaaacaagataaaagatccggcaacgaaagcacgattattatacgggaactggtgttttgtcaaatctaatgacgtggccgcgtacaagtctttcaacggggacaaacatcttgtttctgggttaaaagaaaaggtatatgacccgtttaagccattaattttatcttttgactttaacgtgttcccacacatgacttgctcggttgttcaaattgattataccaacaaaaatgtttattttctggaagaaattctggggaaacccaaagaaaagcaaaacaacacaccacaactagcaaaggccattcaagaaaaattactaaaagaaaaacatattggtggggttgtcattaccggggacccggcaggaacagcaagaagtacccaaacagaggaaggaataaataacttcatcattatagaaaatgcatttaagaacggtgttttaagttccactgtaaaattattgtccaagcaaccaccccaaaaaacaagactggaatagataaacgagctgtttgaaggaaaagacgggtggacaatttacattgacatgcgttgtagaaaactcacagaggatttaatataccagactactaacgaggatggcacgaaaaacaaggcaaaagtaaccgatgctgaaaccggtatgaaatttgaaaaatacgggcattgttcggacacgttagactatgttttgtgtacttttttgagcgatagctggggaaaatatcaacgtggagggacaaatatcccaactattacaacttcaataataactcctaatttcacatactaatgcaaaataacaggtttcttaaaaacgaggattatcacgggattatcacggaagaggcttttttatctataactagaggaaagttgagtgacgtgattaacgccgagaattcggccgagattacgatcttggagcatctcacggagatgtacgagatagagagtgaatttaatattggaaaggctatactggatcatgatagacgtatctgctaccctatcggggcacatgtaacaataaacgaggagatatacaaggtaatccggcctattaatggattcaaagctccaactagtaaagtttactggagggaatctagctcaacgttaacaagctctcccagatattcccaatttagaacgtattacccgggcgaagtggtcatgttcaacgagaagcaatatgaatgcgtgatagaaaacgggtacgagttgaatgatattcgaataccaggtttgaatagctgggaaatgataaacgtggaagaatggtgccctatggattacgggcttcatgccgtggtgaaacgcgacaatatattttacaccttgttcaacatggatggatacgaggcttttgaaataccagaaagtctaacagacaactggggagaaatagcggtttatgatcctgaatacaactcgtatgaattgtctgatcatgaatacgtggtttatgatggagaggtattttacccggtaatggatgtgaacgcggatgagataagtattggaagtaatctggtaaaaaatgacccacggcacccgaacttgaagaaacacatgacgcaaatagcgttgttcgagttgtgcaagaaagttgccccaaagaatgtggcaaatacaagaataatagattacgaaaattctatcaagtggctacaagattgtgcaaagttcaggattaacccgcgaatttcgagaaaagtggataaaaataacgaacaggttacagattggcagatggccgcttttcaaacaaactttgatccttacagaaacccgtggctgatataaaagagctatcaaaaacatgtacactccaaagtttccaatttaactttcggagtgtactttatattttgaaaaactaatttttatttaactatcaaacgagttctccccataagcttgcttctcacaatcattccacaagtagttataagagatataccaaagccccttttcaagttcctcccgtaaagaattataaaaaaaacaaacttctctttctctttggccttcaactataatcacatcgtttttgacttttactttacatgaaaattgacaaccgatcttatctgctacatattgtagataatccatgtcgatctcatttagagctttattcccagaacaatctatggtattactacacaccaaaacataagaagcatcataatacccatcataaccagaacatgataacggagatttagtgacggtttccaacgacatcgcactcgtgatattcacatcatattcccattctattctcattggagaacgcaataaaccttgaactgaaatatctttctccatttcatcttgaaagaaaactaatggttcagtaatttctccagacaacaaagaactaccaggcttttctttaacagggaatattaccacgcctttcaattcttttttatctaccaggggtaatatatattgccagcctcgattgccactatatactaatgtagctttgttcggaagtacttcaccctctttcgttaccatgctccaatacttctcccaatctggattagatttcaaatgattcatgaatgccattcctattccatctaacttttcttccttcaatttaggcgttaaacaatcaaacgtcactgttaaatcgaaatcgttcaaattcaaataattttgtgtcatttgtatcgtcgagtgaccaagagcttttgagatcatgggtagtggaataccggatcgcaataactgggttgcgtaagagtgtcgagccacataagaggtcaatttaattggtaaatctaattctttaccaattttatcaagcaatgtattatatccaaaaatccgactattgatgcatgtatatagctctatataatctaagtgttgcctctttagcggaataatcggaaataaatatttacccctatcctttgaaaatttgtatttatcaataatcatcattgatatttcaggaagtggtatattaataggtttgtgggttttaaatcttatataagacaaatggttatcggatatattatcttgtgttaaaaaagccatatctctaaacgagattccagcagaatagtacatgaacttaaacatatccattacaaactcccacttttttttgcggggtttataggcaagaagtttttgcacgttcgattcagataaaccacgtttaataattggttttttggtaggagtataagtcaatgtaatatctgacactgatataccatcattttttgcttttttaactactgatttaagcctataaaacttattcaaaaccgtcttagaatcattgccaccagcaaggcaccattttatatattcaaataaaaatttgttattaatatcagacatttttacatttctattttttgtaaaagaatgcatttctcctaacaaattacgatacatattgaaattgccagttcctcttttcttaaataaatctatcaaatgttcaatatattcaaacaacgattcttttgatgctgctgctttttggtaattgatcaattcacctgatgtaaagtctcttttaactgtttcccaggataatccaacttgagtgtattcaacttctgtgtccttaattaaaatattaagttcatctgcatacatacaccctttccgaacctgtcccaaatccggattccaatgttttaattctaattttcctttaatcttgtaagacttgaaaacagtcttaccatctttgcatatagcaagattcaattcaatcatggtgtcaccttttgcgcccttgttaatcaaactagagtattcacggcaaacggtgcgtatggtaaatcccatatctactcgaattgtgcggcaaatttgtacattattttgtacatttacaagcgaaaatggggcaaaaacaacatgtttttattggtatttcgtattttcttttacaaaaaacaacaacacaacccactatgtattaataaattataaattaattattatacacgataaatactaggaaatccgattattattttctatttttataacatagaatacaaaacaagccgtatgggatgcttgtaacagggaaacaccgaatgaatggtacgcattttgttagaagtaaataaaccaatagtcaatgaatttgtcatacaaaaaagaaattaatattattactatgaagatagcattatatttttcagcattagcagtcctattaggcgcttgctcttcctcgcaaaatttcacacgagcgcaggaagatgatatctactatgttcctggtaaacgttccctcttcgctcaagaaattaaagacaagaccggagtggacatcacctcgaatacttcttctagttctcaaattagtaaaaacacaaacaatgataaagtttatccgaaggaaatagataacagtgtaaacccgaaatctcactccatcggcatggctcgttatgcaactgaaaaacaggtgcaaaaagaagagaccagaaccggacaaactgttaatcggattgcagttccggcagatgacgggtactggatcggaggctttaaaggtagtgaaaatgatttagaagagtgtgttcgaatcatgaatcgttacccggaaggtttcgcctatttcggaaacggatacgaaattgcccagaatctttcgttcagctccgactggaacgtgtacacgattgatggtcgctactggtggttccccagcagttcgaacgtgggactatactctcaattaattttcggtaattacccaaaatacatttggaccgtgatttggaacgatcctcgttttgatagtttcgcatggagtaacaacgtaagtttcggctggaaccgctggggatggggagcctcgttcggttggggaaactcttggggatgggacccatattggaacaattactatggttacggttataatccgtggggttgggggcatggattctacgatccatggggctggaacccttattggaaccactactacggttatcatccacattggggacaccgtccgggacatggacatcatggcccaaactggggtaaccatcgaccggattggggtggtgccagcaaaccaactgtaactactcggtatgcacctaaaaagcaatacacgacgaatagaaacgcccggtcatatagtacctattcaagaacttcaagaagttccgctatacaatccagatcaaatagtagccgctacgagtccggctcaaactacaatcccttgcataacaactccagcaattcatcaggaagttattccagaggaaacagcggatctagctcgtatggaagtagttcaacaacacgctccagcagtggaggtagcggacctgttcaacgtacaaattcgggtagtagaagataagtctaactaacatcaattgtctatgaaaatattatatatacttccgacattactcctcttctccttcttcgtttcggctcaaaacgaagaggatgcccttcgattttccagacaaaccccattcggttctgcaagagttaccgcaatgggaggagcattcggtgcattaggtggagatttaacaaccctatccacaaacccaggtggtattggagtattccgtaaatctgaaatcagttttacatccatgctcgattttgctcacgcaaaaacaaaaggtattgataatgaaaaaaatatgtatctattaggaggattgggattcgtattatcattccaacctatgagtaataaatggaaaaatatcaacatcggttttaattatacgaacctaaataatttcaatcgaaatatttttcaaggctattatgaaactaatggagattcatccttatcaaatatatggaaagaggaagcagacggtttatccccgaaagaattaaatgattttaccacaggacttgcttatgatgcatatatgctttatttaagcccggaggctttagaaaacaaggactatgactacgaaactccaattagaagtatagatcagttacaacattataaatacacgagagaacggggttttcaaagtgaatatgccatatcggcaggggctaattatgatgacaaattttactttggcataactttaggaattcaatcactacattacaaatcgttttccgtgtacactgaagaaattattggagaaacaaataacaaattggaaaagttcagtatgtaccaagactttacaagtagtggtgtcgggataaatttcaaagcaggttttatatatcgtccgatcccagttctccgtctaggttttgctattcatacacctacatattacgatcttgatgcttatgccaataataatgtttctgctaaattcactgaacttccggttgaagatgccaaacctacggacaactttgaatatggagagagtgcatggacagattactcctacaaattaaaaacaccgtggagatttatggcaagtgccgcaacagttctaggccaaagagctattatcagtttggactatgaatatgttgactataccacggcaaaatactcaaatgatggtgccaaaaatgaatatttagaaactaacaatgcgataaaagctatttacaatagtactcataatttccgtgccggagcagaatatcgatttaatagcgtgttctatttacggggtggttatgcctattctgcctcaccttacacgaaaggagaaatgaatgaaaagaatgacattcaaataatcacgggtggtctaggattaaatttcggagtattttacgccgaccttgcttatcttcacaaggcctccaaactaaatggtctattctattactacgaaactccaaaaggtcaagtaatcgaatcacctgaattccaaacgaaattcaaagacaacgaattcagactaacattaggaatcagattttaataaataacgtgagttcgatataaggattaaaattatttatttgaatattagtaacatagcgataaaagttgt

SEQ ID NO: 10710 - DNA, 73712 bp, Unknown
  gut microbiota DNA sequence
gcttccgtgttcgcgcactcgaccaggatattgaactttttcaacaacaggagtacaaacgcttccgccgaagcattcaacgccaagctcaaagacttcagggctcaattctggggcgtgcttgacattaaattttttctctttagagtcgctaagatttttgcatgaaaagaatgaaattcaaaacaagaagaaaacgaactccaccttatttttcacgtgagccccaaatgctagtatttttgtttaacacaccttctataatcccgtcaccaccaactctgacatcaagaatatcagtatccgtttttagctcaacaatgattctggaaacactggaaagattatgtccttgttcaaagatatatctttgtggtcttatcccaagattgtgaagataacaggccagagcgcaattggaggttcctgttgcggcctcttcgttaatactgtaaagtggggcgaaattccggcaaacagcagtggatgcattgtctatatcagattccgtgagtgcgaaacagtgaatactaatacatttcatttctttgctcaaaatagatatttctttgaaattaggaaccattaccccgattttgcgaatattgctgttaatgcagcaaaaagggccggtaataatgtgtaatatttcgacataagtcaatgatcatttgttggttacaaaattacggattttagcggataactttattattattgtttttttgaggcaaaattaggagggaatattgtagaaattttgaagatggagagatatttaaggcaaatgaggtgtgttaaatattctttatagtgttacatattcaaatgtatgtttatatatttgtgtattcaaagaatgagaatatggaaacagaatgctttacatgggaagaattggaaaagttggcttacgtgttgaaagcggtggcacacccgaatcggttaaaaattatatgtttactctcgaaaaacggtgagatgagcgtgtcggatatatgtgaccggatgggatgtagtcaggcgttgatttcgcatcacctgacagatatgcaggcgaagggaatcctattgattcggcgggaggggcgtaatgctttttatagtatggcgagtgatcatgtcacggaggccatgcggtgcatgatgaaatgcacaaagtaagtccgtgaactttacgggagaacggacgttataagtagtataaattaaaacgtgatattatggataaattcaatgagttgattaatggagaaaagccggtattggtggacttttttgccacgtggtgcgggccgtgtaagatgatgcatccgattttggagaatgtgaaaaagaggctaggtgacaaggtaatcatcttgaagatagacgtggatgtgccggctaaccgacaaccggtgtatttgtatcatatccagtccgtgcccacgttgatgttgtttaaacagggaaaggtgttgtggaataatagcggggtggttcaagcatcacagttacaggaaataattgaaaagtatatataaccctaaaatctaagcgtgtatgaaatatttgattgttggtggtgtggccggtggtgcctcgacggcagctcgtttgcgtaggctcgatgaaagtgctgaaattattatgttcgagagaggtaattacatctcttatgccaattgtggtttaccttattatattggagagttgatatacgaacgggagaaacttttcgtgcaaacaccggaaagttttgccgcacgatttaatattgaggctcgggtgcgttcggaagtggagcgtgtaaacccggaaaagaaaacaatcacggtacataatttggattcgggaggactttatgaagagacgtatgataaattgatcttgtcgccgggagcggctccggttcgtccaccactagagggaattgattcggagggaatttttaccttgcgtaatgtgaatgatacggatcgggtgaaggagtatatcgaggagaatgacgtgaaacgggcgttgatcgtgggggctgggtttattggtctggagatggcggagaacttgcacgagtatgggattcaagtgtcggttgtggaaatggctgatcaagtgatgactccggtggattacgagattgcgaccgtggtacatcaacatttcaaatcgaaaggcgttggtttgcatttgcaagaagcggtgacagcgttccgccccgtggaggacggtattgacgtggtgttgaaaagcgggttggtgttgcaggttgatatggtattactttctatcggggtacgtccggatgtgaaactggcacgtgaggctggattagagattggggagacagggggaatcaaggtgaacgagtttttacagacttcccatccggatatttatgccgtgggtgatgcaatcgagttcccgaatccggtgagtggtcatccgtctctggcgtttttagcgggaccggccaataaacagggacgtatctgtgcagacaacgtggtgaatggtaatcatcaaaaatatagaggctctattagtacggccattgccaaggttttcgacttgaccgtgggggcaaccggggtgtctgcaaagatgttggatcgtttgcaaattccttataaagaggctatcgtgcatggagcatctcatgccgggtattatccgggtgcgattatgatggatataaagattaatttctcgccggaagatggaaagttgctgggagcacaagccgtgggtattgatggggtggataaacgattggagatgatgtcagccgtaattcggaatggtgggactatttatgatctgatggaattggaacaagcctatgcgccaccttactcgtcggcgaaagacccggtgaatatggccggattcgtggcggataatatgctgagtggaaaagtgaagatgattagttggcgagaattgaaagatatggaccgatccaaagtaatgttggtggacgtacgtacggcggaggaatttgccatgggaagtatcgagggagccgtgaatatttctttggatggttcacggggagaataccaaaaattaccgaaagatcggacaatcgtggtgttctgtgcaatcgggttgcgggggtatattgcagcccgggtattgatgcaacacggttatgatgtggtgaacctgaatggagggtatcggacatattcaactgcgatggcggaacaatgtaacccgataaaatattcggagccggaacctaaaaagccggtggaactaaaagctccggagaaagtagtggagaagaaatcctttgcgatagatgcttgtggcttacaatgtccgggacccgtgatgaagttgaaaggtgggatggagcaattgaaggctggggaacgtttggagattaaggtgaccgaccagggattttcccgggatgtggcatcgtgggcaaagatgacgggaaaccggttggtggatgtgaaggaagaaaaaggtataattacggctgtgttggagaaaggggcaggagtttgtcccgtggtgaaggaaggagcggggaacaacaagacgctgatcgtgttcagcgatgatctggataaggccttggcgtcgtttgttattgcgaatggggcggcatcgacgggacggaaggtaacgatgtttttcaccttctgggggttgaatgtgatccggaaagagcgtgccgatgcagtgaagaaagacacgatgggcaagatgttcggaatgatgatgcctgccggaagtcgtaagttgtctttgtcgaagatgaatatgatggggatgggaacccggatgatgcgaaaggtgatgcgtaataagcagatcgattcgctggagagtttgattgaacaggcccggaacaatggggttgagtttatagcctgccagatgtccatggatgtgatgggaattgcgaaagaggagttgattgacggggtaaatgttggtggtgtggcgacttacttggagcgggcggagaatgcaaacgtgaatctgtttgtttgattgaaggtttttcaaacaactacccccactaactcccccttgcacagggggggaaacgcttggtaatcagctctccccctgtgtaagggggagttggagggggtagtctgttaaaaatagactttggggacacccccctttatttatacttaatctaccataccctgccggatttacgccacccttttttatagtaattttcgcttaggtggttgaccatgacaccttttgatgtgctggcatgagcgaagtaaccgtttttgaggtagatacccatgtggttgagggttcttttcttccgcttggagaagttgaaaaagacaagatcacccggtttcaaacggcgtttcccgatgcgctggcagtctttattatagatattaacaaccgtgcgttgtagggatttatggtaaacatttttatacacggctcccacgaaacccgaacaatcggcccctgtgcgggtggttccaccataccggtagggagttcccagccatcgactgacctcttccagtaggggtagatcgtcttttcggttcaccgtgaaacccagcttgcgggatagctgtgcggttttatttttctggatggcgagttgtttggatgaggtacaggacgaaaaagcgaggaccagcaaaagaatcccgatatatagcgtgttaaatttaaatgttctattcatattcaattagttaccaataatgtcaacaaagatagggaattcgggagaagggtttgtctttttttgttatttttgcttttggattcgtgttaaaaaaagtccgaaaaacttgaaacttgttattagataaaaacgtaaaccaaggaatgaattatttagcacatatatttctctcgggagatgatcggagagttcagatcggaaattttgtcggggatgctgttaagggacgggcttacgagaattatccgttgggttttcgggagggtattctgttacaccgggagattgatgattatacggatcatcatcccgtggttcgggaggtggtagatatgttgcgaggtggtttcgggcgttactcgggcgttttgacggatatttattttgatcatttattagcaaggagttttcagagttattccgggcagtcgttgaggtggttcgcttttgggttttatagggcattagttttgaattatcgtcatttaccggaacggtttaaggggttcctttggcattttatcctgacgaatcgattggtgcgttatgcgtccctttctggaattaagcgttcactggaaatcatggtggaatacaagaatttgggagttgacccgggggcggccatcgtctttttcgagaggaatcaggatcggttacaggagttgttcgatcgtttcctgccggatgttcaaaagaaatgtcgtatgatgttggaggcggatataagttgttaattattaatataaatttaggtgtatggaagaattattgacaagtccttctaatgtgtcattagatgtgttcttaactaagatgatcgatttaggtatatcggtcggttctaagattttgttggctatcgtggtgttccttgtgggacgctggattgttcggcgattgaacaagctgttggcgaagatattggaaaaacgtcacgtggaggcttctttgtcgacattcgtgaagagtttggtaaatatcacgttaacattgttgttgattatcgtggtgattggagtgcttggcatcgagactagttcatttattgctctttttgcatctgccggtgttgctattggtatggcgttgagcggtacgttacaaaattttgccggtggtgtgatgattttgttgttcaagccgtttaaggttggagatacgatcgaggctcaaggacagaccggtacggtgagagaaattcagatatttaatacgattttggcaactcccgataataagattatcattatcccgaatggaggtttgtcaacagggttgatgaaaaactattctaaagaggctacccgtcgtgtggactgggagtttggaattgcttacggggatgattacacgaaggcgaaggctgtgattgcccgtttgctggatgcggatgggcgtgtgttgaaggacccggcttattttattgccttgacttctttgggggagagttcagtgaatatcgtggttcgtgcttgggtgaacgccggggattactggggtgtttattttgatatgaacgagaaggtgtacaagacgttcgccgaggagaatctgaatatcccgttcccacagttggatgtacatttgctcgggaagacagaataggattctgtcgttacaagttaacgggttataggttacaaattatttaaatagaagtggtagctattgaaagatagttaccacttttttgtattgttcgagaactttgattctttatagaaaaagagttagctttgcggggttgggaaggagggggaaaggaacttgtaactcgccggaggcgaacactaaaattgaaattgttatgttacttctttggttggatttgaattcttcgtatgctcattcttcattggctcttccggctattcatgcccaagtggaaggaaaggaggggaatgtggaatggagaaaggtttcagcgacgatcaattcaaatgtggggagtgtggtggccgagatcgtggcggcccggcctgatgtggtggcggccacggcatggttgttcacgcatgaggtgttgttgaagatcacggctcgggtgaaggcgttgttaccggaatgtaccattatattcgggggaccggagatgctgggggataatgaggaatatttgcgtcggaatcggcacgtggcttgcgtgtttcgaggagagggtgagctgggatttcatgagtggctgggggtgtacgattgtccttcccagtggaatgaggttgtggggctgtgttggttggatgcggagggtgtgtatcatgatgggggattggcgagggtgatggagttcgatcaattgatgattccggaacacagtcgttttttcgattggacaaagccattcgtgcagttggaaacgacaaggggatgttttaatacctgtgctttttgcgtgagtggagcggagaaacccgtgcgggtgttgtccgtggagcgtattcgggaacgcctgactgttattcgggatcatggtattcgggatattcggttgttggatcgtacttttaacggatcttcccggagggcgatcagtttgctggagttattcagagagtttgctccggggatgcgttttcatttggagattcatccggcgttgctttccgatgaggtgaaggagttgttgcgggagttgcctgccgggttgttgcatctggaggcaggaattcagagtttacgggagaatgtgttacaggcttgtcggcgaatcggtgatttgcaggcggctttggatgggctgcgttatttggcgtcattacctaatttggtggtacacgcagatttgatcgccgggttaccattgtattctttggaacagatgatcgaggatgtgcgagtactggccggtttcggaacgggagagatccagttggagttgttgaaattattacccggaacagcgatgcgtgcagaggcagaggctttgggaattgtctattccccggacgtgccgtacgaagtgttgcagacgaaagcgatgtcggtggaggatttgcgtcaagcccggttgttgtctcgtttgattgatggtttttataatgctttggcatggcaggaggtgactcgtgagttgatcgggcatgatgaatgttttctgtcagattttttacgctggatggaggaacgggaattgttggagcaaccgcttagtttggaacgacggggagcgttgttgtacgagttttgcgaggaacggtacccgatgtttctgactgatatttctgtagcttgggttgttgcggggattccttttgctaaggaaccgagtaagcgactgaaaccgtggagtaaagaggttccgagggatgtggagaacgtgatgggggaatacgagaatgtgatgcgggtgtatcatttaccgggggaaaaggaggaattctggtttggtttcgatcggggaaagtcagcatcaagaccattgtatgtgggaaaaaaataattacatttttaattatttacccagttgttaatcattttgcagccctggcgggtgatgatggattcggggtgatattggacacctcggatggggagagttgtgtggtagaaggacatgatgtgaccttcttcgtcgagggcgctgatacggaggcatggggggagcgtgtgagggttcactatccatgaatggtaacgtcctacttgcacgggataggtgaggtcatggtagagaatgtcagtggggtcgacgattgtgaggggactttcgtggccgtgcttgggatgaggcagttgttgtaagctggcaccgaaggattcggcgatggcttggtggccgaggcatacaccgaggatgtcgtgagtggttttacaatgctcgatgagtgtgagaagctctccggcttcggctggaattcccggtccgggggataacaggatcttgtcgtagttgccgagcgaggaaaagtcgatttggtcgttatatacgatgtcgaattggcagtgttcgttttcccggaggatttggacgaggttatagacgaacgagtcatgattatcaatgacaagtatattttttatttttgaattctccatgccgtggttttctttgtgaggttgatgacctgttttctcccgcgaaagtaggaattcgggggaaaataaactacttttggctgttgtgttttatcatataagttgtgattatggcgaagagaaagaattggttttccctgtttttcacgaattatctgggagttttgaatgataatttcctgaagacactggcgtgttttatttgcattgcttgggtggggaaggagaacgagtcgatggtggtgacgctggcatcggcagcattggtgataccgtatttgctgttttccccgttggcgggacgattggcgaagatatataaaaagcgaaaaattgttgtttgggcgaagtttgccgagatgctgatcatggttgtggctgcggcaggattcttgatgcattcgaccgtgttggtgttgtcatctattttgttgatggggctgcagagtgcgttattttctccctcgaagtacgggttgattcgtgatatcgggggagaggaaggaatttcctatggttcgggggctatggagatgttcgctttcgtgggtatcctgacagggacgttgatggcggcctttttgtcggagagtgtgacgatcccggtgctgtgcgtgatcctgttcggggtggcgttgttgggttggttgtctagtttgacaattcgggcaaatgagagtgaaccgatgaaggagagtcacgagacattaaatcctgtgaagttcgtgaaggacatgtttgtgcgggcgttagcgttcaaaggattgaattgggtggttgtgggactggctacattttggtttatcggttcgatgatccagatggtgcttatcgtatattgtcgttctgatttgggaatgagcgattcgaagacgggtatcgtgatgtcattagcagccgtggggattggggccggatgttatcttgccggggtgctatctcgtcgggatgtggagttgggattggtaccttatggtggaattacgacgggggtgaccttgttggcaatattcctttttgacgctcatggggtaacgttcgctattctcgtatttttggcagccttcttcagcggaatgtttaaggttccgttggatgcttggattcaggcgaacgtgaaggggcgagaattaggagatatgctggcttattcgaatttgatcacttttttgtttatgttgatggcatcggggtgttttggggggatgacgatgctttttgatacaaaatatgtgtttatttttcttgccgtattgacgtttacgatcacggttgttttgtttttgtgtgtggaggaagtgaggatgaggtttaagaagtttagattaaagaattagatatgggttataagaaggtattggcggccttttaccggggtgttctgagttcccgttaccgggtgcgccttgaagggacggggatattggccgataggcgggcgactttgtttttgcctaatcatcaagcatcggtagatccgcaaatcgtttgttcccagttgttgcgttacgtggatgtgtccccgttggtaacagaggggtattttaaaattccggtggttgcgcaagtgttgcatttgatgaatgcggtgcgggtgccggatttggagaagagtcgtcgggaggtgaatatcgtggcggggttgaaccgggtggtggtggacgctttggcatcggggcataacgtgttactttatccggctggacagttgacgaatagcgggttggagcatgtgggtaataagcagggagcttggcaggtgtgtaatcagttgccgggagatgctcgtgtcgtgggtatgcgtatccggggattgtgggggagtatgtggtcaagggctaggacgggacgttcaccaaattttgcatggacttatttgaaaggaattttttacgttctggcaaacttgttatttttcgtgcctaaacgtgatgtaacaattatttttgaagatattacggacggtacggtgcattatgctgcggaggggcgccagccgtttaatcgttttttggagagtttttataatgctccgggtgaggagcaacctttatttttgaaacatttcttttacgtgaggggacgacaacacggttcgtcatcggaattatgaatatgattgcagttaatgaggtacgggtatgcatgaatgaggcgggagcccggcggcaaccgtttttgtttggtgttgatttcgagttgtcggaaggttttttcgtgttggatccgttggggcagcaagagattctttttgaagttggaggagtctcgaattctccgatgagggagggaatatcgggggtgttgtcagagaaaatgttttctatgaatccgatggcatatgaggtttaccaggagaagtttgccgtggtgcgggagggggtagcccgtggtgattctttcttgttgaacttgaccgtggcaacaggattggatacaaactggacgttggaagagatttttcatcgggctcagtcaccctatcgcttactggttccgggacgttttgtctgtttctctccggagatttttgtccggatggacgagggaatgatttcttcttatccgatgaaaggaacgattgatgcctctgtgcctgatgcggaacgggtgatcttggaggattataaggagcgttcggagcataatacgatagtggatttaatccggaatgatcttaatcgagtggcagaacgggtggatgtgaagcgttttcgatacatagaccgtttacgggtgagtcggggtgagattcttcaagtgagttcggaggtgacggggcggttgacgggggattattattcccgtttgggggagattgttttcgggatgttgcctgctgggtctatttctggggcacctaaaccttcgacgttacgtattattacccaggccgagcgtgagcggagaggattttacacgggtgtttttgggtattttgatgggaaaaagttggactcggcagtaatgattcgctatatagaggtgcgtgatgggcgatattattttcgtagtggtgggggaattacaattaatagtgattgccgggcggagtacgaggaggtgttggcaaaggtatatctaccgtttggaaacgagaggagtaaataattttaataggttcggtatggagagttttgtcgagacaatcaaggtgttggatgggcagttctgtaatttggaggcccatgaacgaagggcaaggaggacggttgaggctatttggggaaaatcccttgcgtgggaggttggaaaaatgattattccggttgagatgtgttccggattggtaaagtgtcgggtggtgtatgattgggtggttcgtgaagtaagttttcagccttatgcgatgagacaaattaaaagtttgcggctggtggatggtgataaggttgactatcgttataagtcgacggatcggtcgatgtttattcgtttgatggaacagcgtggggagtgtgatgatgttttgatcgtgcgtgatggatgggtgacggatacttcttttacgaacgtggtcttcgaggatgtggtgggtggtctttacacgccggatacttatctgcttgaagggactcggcgacagagtttattagatgtggggaagattcaggcgtgtccaattcgggtggaggatattgggcattttcagagggtgttgctcgtgaacgcaatgattggattggaagatgaaattagtgttcctgtggtaaatatcatgaagtagaaattttagtgattccgacctctgtttaccctggtttacggtaaacttttttaggataacactcggtgtttacccgttgcatattcgatgtacttagggattaaagacgtatcaacttcgatacaaagacgtatcaaagacgttcacgagtgtctttgatgggggattgtcgtgtgattattggaggggagtctgaggagttaatcttttcttcatttgataatggatggtggtttgccgaatacaaatgtatgtgaaatatatgtatttgttttttagtgtattgtttgtgttgtgataaaaaaagtgggggaaagtggtttaaagtgggaaataattttataactttacatcacaaattaggaaagtaatatgttgtcatttattggagattatacatgcaagttggatagcaagggacgagctgttgttccggttgttttccggaaggaaatgcaggcggcgggagaggtgtcttttgtgatgcggcggaatattttcgatgaatgtattgacgtttacccgaaggatgaatggttgaaattgattgcgggcttgagagagaagttgagccagtttaaccgggaacaggtgcgttttttccgagagtttttccgaggggcgcaggaggtggagctggatgggaacgggcgcgtgttgatcccgcgcaagatgctggatagcatcggtatcgagggggatgagatcgtgatggtaggacaggattcgaaaatcgagatttggggtaaaataaagtatgaagaaagtacgatgaatacggatgaatttgtacttttgacgtcgcaaatcggtttgtagggatgatggattaatgcctatcgacgagatgtttatgtttttattttttaactttaaatttgtgtagccatgtatcacgtgccggtattgttggaagagtccgtttctgggttgaatattgatccggatggggtgtatcttgatttgactttcgggggcggtggtcattcgagagagattttaaagcgattgaaggatggttgcctgatcggtttcgatcaggattccgatgcgctggctaacgtgccggatgatagtcggtttatttttgtgaatcataattttaggtatctgcggaatttcttgcgctactgcgggtacgacgaggcggacgggattctggccgatttgggtgtgtcgtcgcacgagtttgacgaggcgggacggggtttctccttccggtttgatgcggaattggatatgcggatgaaccagcggagtcggctgaaggctacggatattttgaatacatatagcgaggagaatttgattcggatttttcggaactacggggaggtggataacgtgagacggttggttgatttgatagtgaatgcccggacggggaagatgattactcgctcggaagagtttttgcaggtgatcgcaccctgcgtgccgaaacaaaaggagaagaagtatttggcacaggtgtatcaggctttgcgtatcgaggtaaacggggagttggaggcgctggaggatatgttgaaggaggcggaacgggcgttgcgtcctggtggtcggttggtggtgattacttaccactcgctggaggatcggatcgtgaagaactttttgaagagtggtaatttcgaggggaaggttgaaaaggatttttatggtcacgtgaaacggaatttcgagctggtgaaccggaaggtgatcgtgccgtcggaggaagagatcgagagaaacccgagagcgagaagtgcgaaattgcggatagcggaaaaacgggaatgattttggatttatgatcgggtgattgttgattttagcttgtatttatttaactctaaattttaaattaattaaatgatgtggtttaagaaaaagaaggtaaaggatttcgtgccaccgttgcaggaacagaaggaggtgctgggggattcaatgaaggagttgctggacgggcgtttgttggcagacacggtgttgcgtaagaacatcgggtttattcttttcctgacttttctgggaatcgtttatatcgctaatgggtatgcgacggagaagttgtacatgaagaaggtgaacatggagaaggagttgagcgagttgcgtttcgaatcgatcacgacagcctcggagttgatgcggatcagcgttccctcggaggtggagaaacgaattcgggaggcggggttggatttggtgcaaagtaaggaaccgccaaccaaaatcaataggtaattttggctggtaaaaggtgaaaactaaaagataaaagtgaatactatatataaataacaggttagggactaaatgattttacgatgagggatgaacttttagtttttagcttttaatttttaactataatatggcagcatctataaaacacgaattggccgggcggttaggacttgtgtacctgattgtgatggtgattgctgcctttatcgtggtaaaagccctgcacgtgcaaatatgggaaggggataagtggaggaagatgggacgttcggtatcatttaaagattttgaagtggcaccgaaccgggggaatatatatgcagatgacgggcgtattctggcgagttcggttccttattattcgctgaggcttgattgtaaggcaattccggacacgctgtttcggaagaaggtggatagtttgtcgatgatgttgtcccgctttttcaaggatgccccgacggcggagtaccggaagaagttgtggcagggaaagttcggggcaaagccgaatcgttatttgcttgtgaacaagaagaaaatttcttacaccgacttactggaggttaagaaatttcctatttttcgggaaaggggtacgaagagtggtctgattttggaacgggaaaacgtgcgtttgcagccgcatagggacttggcctaccggacgatcggttatttgaacgaggcaaaggatggtagttttgagggacgcgtggggattgaaggggctttcgagaaacaattgcggggggagccgggacggagtatcagacagatgatgtcgggacgttgggtttcggtgacggtagacgatccggtggacgggaatgacgtggtgacgacgattaacgtggagtgtcaagatattgtgcaaggggctttgacccggcagttggagcattacaaggctagtgcggggacggctatcttgatggacgtgaagacgggagatataaaggctatcgcaaacgtgtcgaagacggcgacagggtaccgggaggtgttgaataacgctatcggggatgctgcggagccggggtcggtgatcaaggcggcgacgatggtggctttgttggaagacgggtatgttcatccggaggacaccattgacttgggaaatggtgtttacacacataacaaggtgacgttaaaagagtcgaagcatccgattggtaaggtgacggtgcagggaattttcgagcgttcgttgaatggtatcacggaattagtatatgagcattacaggcaacagccagagaagttcgtgaatcggtggtatgcgatgggtttgaataaaaaggtggggatcgagctggcgggtgaagcagaaccttatattaaatatccgggggataagacgtggagcggtaccacgttgcgttggatgagtttcgggtatgagttgaagattacgcctttgcaagtgttggctttttataacgcattggcgaatgatgggaaacggatgaaaccgcgtatcgtgaaggagattcgtaacgggagtcgggtggtggagcggttcgaaccggaagtggtgagtagtcatatttgcagtcgacagacggtggcttatatgaaacagatgatggaaggagtggtagagaacggctctgcgaagaatttgaagaacgcagcctgcaagattgcgggaaagacgggaacggcaaaggtggccgcagggtcgaaagggtataattccgaaccgaagtaccgggccagtttcgtggggtattttccggcggacaagccgatgtactcgtgtatcgtggtggtggataacccgtcgcagtcggtggggtattatggaaatgtggtttcgggtagtgtgttcaaagagattgccggtaagatttacacgatggcatcgttaatgggggataataacgaggacgaggaggaggagaaagacgagacgttgccgatcagccagaacggattgaagagtgattttctggagatatatgacgagctggggattaacgtgacggaggacgaggcggagcatgccgattgggtgatgacttcgcgggataaggagggaacggagttcgtgctgaaagcccggagcgtggatatgacgctggtgccgaacgtgaagggaatggggctgagggatgcgctgtacttgttggagaatagcgggctgaaagtcggggtgagtggggtcggtacggtgagtcagcaatcgttgactccgggagggaaggtgagaagggggagttatgtacatattgaactaagataaaagctaaaaactaaaaggtaaaagttggttttgtaatatattttgagatgaatttaaaagagctgttagccggggttgcctgcgaggtcgtgcaagggaggccggatgtagaggttaagatgatacacttcgattcgagaaaggtcggagagggagatttgtttattgcccaaaggggagtgaatgcggacggacacgagtatatcacaaaggccgtggcggcgggagccgtggcagttgtctgtgaggaggtgccgggggagttgaaagagggggtagtttacgtgaagacgggtaattcttcggaggcgctgggggtgatgtcctctaatttttatgggaacccgtcacgtcggatgaaggtggtcggggtgaccgggacgaacgggaagacgacgacggcgacattgttgtacgagctggtgcgcttgctgggaaggaaagcgggacttttgtcaacggtgtgtaattatattggtgatgagagggttcacgctactcacacgacaccggacgcaatggagattaacgagctgatgagccggatggtggaggtcgggtgtgagtattgtttcatggaggtgagttcgcacgctattgaccaaagacggattagcgggttggattttgatggggcgattttctcgaatatcacgcacgatcatctcgattatcacaagacttttaaagcgtatatcgaggcgaagaaggcgttttttgaccacttgccgaagaaggcttttgcgttgacgaacggggatgacaagaacgggatggtgatgttgcagaacacggtagcccgtaaatacacttactcctgtaggaggatggcagatttcaattgtaagacgttggaacggcatctggacgggacgttattgctgctggacggcagcgaggtgtggacgaggttcgtgggggattttaatgcttataatttgctggcggtttatgcgagtgcacgattgctggatttcgggaaagaggaattgttgcccgtgatgagtatgctggtgccggtgtcgggacgtttcgagaccattttatcgaacgagggggtgatggctatcgtggattacgcacacacgccggatgcgttggagaatgtgttgtcgacgatagagggactgaagaaagaggggctggtgatcacggtggttggtgccgggggggatcgggaccggacgaaacggccagaaatggcggaggttgcctgtcggttgagtgatcgggtgatcctgacgtccgataatccgcgaagcgaggagcctgccgcgattatcgaggatatgcgtgctggggtaccggaagaggcggcaagccgggtgctggcgatcaccgatcggaaggaggccattcgtgtggcgttgatgttggcaaaaaagggggacattgtgttagtggccgggaagggacacgaggattatcaagagataaagggtgtgaaacatcattttgatgataaagaggttattaaggaaatatttaagttgtaggtcatgttttatcatatctttgattatttagaacagtttgatttcccgggagccgggatgtttcaatatatcacgttccggtcagcctgtgcggtgattttgtcattgttgattgccacggtagtgggaaagcgtattatccgcatattacagaaacaacaggttggggaggaaatccgggacttgggattggaaggtcagatgcagaagaagggaacaccgacgatgggcggggtgattatcctgctggcgattctggtgccagtgatcttgtttgcccggttggataacgtgtatatccagttgatgattgtttctacgatctggttggggttgatcggttttctggatgattatatcaaggtgttccggaagcacaaggaggggttgaagggacgtttcaaggtgatcggacaagtgggtctggggctgattgtgggggtaactctttacgtgagcgatgacgtgctgatccgggagaaggtttccatttcggaagtcggggtggtaaccagcactgtagatgaggggtttgtgtccgagaatagccagacggttctgacgaaagatattaaatcgaccaagacgacgattccttttttcaagaataacgagtttgattacgcttggttcggggcgctttttggggactatgccgaggagatcggttggatcgtgtttattattatcacgatcgtgattgttacagcggtgtcgaacggggcgaatctgacggatgggttggacggtttggcaacggggacttcggctatcgtgggagcgacactgggtattctggcgtacgtgtcgggtaatatggtgtatgcggattacttgaatatcatgtatattccacattcgggtgagctggtggtgtttattgctgcgtttatcggggcgacgatcgggttcctgtggtataactcgttcccggctcaagtgtttatgggggatacggggagtttgtcgctggggggaattattgccgtgtttgcaatcatgattcataaggagttgctgatccctattctgtgtggtattttcctcgtggagaatttgtcggtgatgatgcaggtcagttattttaaatatacaaagaaaaagttcggggagggacgacggatattcctgatgtccccgttacatcaccatttccaaaagaagggtattccggaaccgaagatcgtgacccggttctggatcgtgggaattgcgttggcggtgataacgattgtgacgttgaagatacgataagaagaaatttaaaatctaaaatgatgaaacgtttggttattttaggcggaggagaaagtggggcgggagctgccaagttaggaaagaagttggggtatgaggtttttttgtcggacaaggggaagttggccgacaagtataagcgtgtgttggaggaattgggggtggagtatgaagagggacaacactcggaagaacgtattttctctgcggatttggtggtgaaaagtccgggtatcccggataaattgccgatgattgtggggctgagggagaaaggaatcgaggtgatttccgagattgagtttgcgggacggtacacggatgcgaagatgtattgtattacgggaagtaatgggaagacgacaacgacattgttgttgtatcatatattggagaaagccgggtatgacgtgggactggccggaaacgtgggaaatagtctggcggcacaggtggctgatgatttacaccggttttacgtggtggaattgtcgagtttccagttggacggaatgttccagtttcgttgtgacacggccatattgacaaatattacaccggaccatttggatcggtatgattataaatttgagaattatgcgaattcgaagttccggatattgaataatatgcggaaggaggatttatttatatatggttatgattgcgaggttgtgcgggagagagtggaacagggggatgttttgccggaggcagtcgggtttacttattcgaattgcaccggggtaaatgcttatatggatggggatacggtggtggcccgttggagagatcgggagttccggattgccaaacaggaggtcacgattcaaggacgacataatgtgtataacactatggcggcaatactagctgctttgaagactggggtgagtgatgaggatttgaggaagggattgacaacattcccgcaggtggaacatcgtttggagacggtggatgtggtgaatggagttacttatattaatgattcaaaggcaacaaacgtggattcggcttggtatgctttggatagtatgcacgttccggtggtgtggattgcgggaggaacagataaaggaaatgattacagcgtgttgtttgatttggtgaaggagaaggtgaagttgttgatttgtatgggagtggataataagaagttgattaaggcgttctcaccgatctgcgaggtggtggatactcatagtctggatgagacgatgaacgtggcttatcgccgggctgagaagggggatgtagtcctgctttctccttgttgcgctagttttgacttgtttaagaattacgagaatagaggggagatgtttaaggagaaggtgaaaaagttaaaaactaaaagataaaaactaaaagttgaaagataaaaaacgttgattttgtgcggctggaatcacttaatcataaatcgagaaatcagtatgttgaatctaaagaataaggtggtatttaagggggatcggacgttgtggtacgtggtcatcgggttgatgctggcctcgttgatcgtggtgtattcttcgacggggagtctggcgtttcgtgtgcggggagggaataccagttattatttgattaagcagttgtttttgatgttcgggtgtatggtggtgattctgacattgcagtcgtttcactacaagtatttcctttcgtttgccaagatcgtactggggatgtcgttgatatttctgttgtgggcgaagtttgcgggtactacgttgaatgatgcggggcgttgggtgacgattccgggaatcgggttcacgttccagccttcggaaatggcgaaattggggattattatgtactgtgcccgtgcgattgcttttgaacagacggaggagtgttgtagcaataatgtgttgtggcggatgacgttggtggtgccggtgctgttcttaatttttatggagaatttctcgacatcggcgttgctgggcggggtttgtttggtgatgttgtttgtcggtcgtttatactggaagacttatgcgaagttgataggggtgatcgtggggttgctgattctgatgttggcggttgtctttattgttcccgaaaagcatttaaagtcagcgggacgtttactgacggtaaaaagccgtatagagcatttcgtgaacccgagcgagacggacagtgacgattcgtaccagtctgatcaagcgaagattgccgtggcaaaaggaggattgatggggctgggaccgggaaatagtgtacagcgaaatttcctgcctcacccgtattcggattttatatttgctatcattgtggaagagtatgggctggttggggccgggatcgtgatgttactttacctgattattttgtatcgtgtaggggtgatcgtgcgacgttgtacgaggatgttcccggcgattctggtggctggattagggttgtgtattgtgtttcaagcattgattaatatgggggtttgcgtgggactttttcccgtgaccgggcaaccgttaccgctggtgagtatgggggggacttccctgttgtttacgagtgcttcttttgggatgattttgagtgtcagtcatacattctcggaagagggagaacgggaagagaaggagaaactaaagatggccgctcaaggtataaacgaggaagaagagaacgaggaaaattgaacatgaagatatttgagatatgaaaaaagttattattagtggaggcggaacgggaggacatatatttcctgccctttctattgcgaatgcgctgaaacggttgaataaggatatagagattctattcgtgggggcagaggggaagatggagatggagaaggtgccggaggccgggtataagatcgtgggattaccggtgagagggttacaacgtaagttgacgttgaataatctgaaggtgctgtggaatttgtggaggagtttgaagaaggccaaacgagtggtgcgggagttcaagccggatgtagtggtcggtgttgggggatatgctagcggaccgattggaaaggtggccacgaatgcgggtattccgttggtgttacaggagcaaaattcttatgcaggggtgactaataagttgctggcaaagaaggctgctaagatttgcgtggcttacgagggaatggaacgttttttcccacaggaaaagattatatttacagggaatccggtgcggaaggatttgttgaatgccgtgagtgaacgggcggaggggattgctttctacgggttgaatgcgaataagaaaacggtgctggttaccgggggtagtttgggggccggatcgattaataaggctatggtgagatggttggagaagattgcggggtggaaggacgcacaggtgatttggcaatgcgggagttattatcataaggagctagaggaacaattgaagggacgtatgccggaaaacgtgaagtttatgccgtttttgaaacgcatggatttggcgtatgcctgtgctgatttggtggtggcaagagcgggtgcgggtacgatttcagagttgtgcttgctgggaaaagccgtggtgttagtgccctcgcctaacgtggcagaagatcaccagacgaagaatgccatggctctggtgaataaacaagctgctgtgatggtgaaggatgccgaggtggtggagcgtttgggaggggtgatggaacgcctgttgcaggatgacggagaacggaaaagtttgtccgagcatatcctaacgctggcaatgaaggattcggatgaggtgattgcgagggaaatcttgaaaataatgtaaagtgtagaatgtaaaatttagaattgaatggtctgccattttaaattttaaattttaaattttaaattcatagtatggatattaagaatataaaggcagtgtattttgtgggtatcggggggattggaatgagtgcgttggctcgttattttaaggtgatgggttacgaggtggcaggatatgaccggacatcgtcaccgttgacacgaaaaatgacggatgaagaagggtttgagattacttacgaggatgacgagaagggagttcgggaggttttccgggataaggagcatacgttggtggtatataccccggcggtaccgcaggaaaatcgtattcttagttttttccgggataacgggtacgctttgcataaacgggcggaggtgctgggatttttgtcccatagtaaaaaagcgctttgcattgccggaacgcatggaaagacgacgaccacgacgatgctggcttttctgttgaatcgttcgcacgtgggatgtagtgctttcctagggggaatttcctctaatttcggtacgaatttattgattgataaggattcggattacgtggtgatcgaggcggacgagtatgatcgttcctttttgcatttacatccggagattgcggtaatcacggctatggatgcggatcatctggatatatacgggacgcacgagcatttgattgaggctttcgagaagtttgccttgcagacacgaggggagttgtttttacgtaaagggttggaattgaaaaaaagaacgattaccgggcattatgctgccggggagaaagcggattattatgccgatcggttgcgagtggattacgggagttacttgtttgattatatcgggaaagatgtggagataagggatttgagaatgtgtttccctggacgggtgaacgtggagaacgctacggccgcaatcacagtggctttgtatgcaggagtgacgtcggaagagattcgagaggcattgcctttgtttaaaggggtttcccggagatttgacgtacatgcgaagagtgaccggttggtttatattgacgattacgctcatcatccgcgggagattgaggcgtctctttcttctattcgggagatgtggccggataagaggttgacggtagcttttcagcctcatttgtactcacggacaaatgatttttacccggagtttgcgaagagtttgaatcttgcggatcaggtgattctgctggatatttatccggcacgggagcaaccgattccgggggtgacatcgggtttgattgctgagcgactgacggtgccattcgtgcgggtgacgaaggaagagtttccggagtatgtgaaggagaacgtaaaggagggagtttttatgaccgtgggagccggggatatagaccgttttattccgattttcacggagatgtttggagggacggattgctgatcgtggttacaggtttggatgtaatggataagagacgagaatttgaattagaaattttaaatttgtaggctgggaatagagatgaaacgcattttaccttacatattatcttgcattttgcttgtatacctgataattgtgtttacctttgtggcgacaaaatcgggggaggtaacatgtagaggggtacgggtggctgtcaaaaatacggatgttaacgtgtttgtcgacgaggaggatgttatgaaggcgataaagaaggggtacggagacattatggacaaaagtatattggcggtgaataaagatagtttggaaagggtgcttgtcaagaatccgatgattaaatcggctcaggtttactacagtttagacggttatattcatgtaaatatccagcaacgtgaacctgttttgagagtactaacgggtgaagggtattatgtggatcgtgacgggagagtgatgccgttgtcttctaagtttacttccagggttgttgtagcaaccggtgatataaataagaaatttgcttgcgagaaattgggtcctttcgcaatgaaattgaagaatgaaccattttgggacgcgtatatcgaacaactggttgtgaggtcgaacgaggatgttgtgatgattcctaaagtaggggattttcggattgtgttgggaaaggtggatgattgcgatgccaggttggagaagttgatattgtttctgaaggacggtatcacgaaaaaagggtggaatcgttataaggagatcaatttgaagtttgacaaccaagttgtttgtgttagaaaataaaagattagatattatggggtttgtagcttctttggatatggggtctgaaaaaatggtgatggctctcggagaaaagtccggaagtgattgtcgtttggtcggtgtcataagtattgcctcacaaggagttaaacggggcaaaattattgataaacttcgggcaaaagcatgtatccagcgtttgttggatcgttttaagagcgagtatgaggttcatattgatgctttgaatgtcgctttgagcggggcgtgggtgaaacagattgaagaccgggagaatatcaagttttcccgtccgaagagtatagaccaaggggatttgcaggagatggagaaaaagtgtcggagtgtggtgggggctggtgacgaggaagtggtggatgtcattccgttcgcttattacgtggataaggagagcgaggtgaacccggtgggggttacggcaaaacggttggatgttcattatcacgtgtatgtggcaaggagtagtgagttgatggatttgagggatatgtttgctaacctaggagttgataagatagatttttattcgatggctggggctacacagaaggctttgaccacggcaggatcggatatatttaatttcgctttgcttgatttgggcgcagatagtatcaaagtgcaaattttccaagacggacttgtttattttgacgaggagttgccgttggggtgtagcacgattgacggggatataaataccgcattttcaattaatgacgtggagaaggcgcacaagctgaaagaagagttcggtatggcgttgcgagcatcgtgtaagaatcggaagattatgattcccgatacgaaatattgtattgatagtcatgatttggtacacgtggagcaatcccgtttggaggagttgttggaaggggctattttccaaatgcaggaaagtggttgttacgaggatttggatgacgggattttgttgactggaggcggtagtcaggtggtcgggatcgaggtgttgttgtccaagctgtcaggacattcggtaggatttgcaaaggtggcaagtgttaaagcagatcgggaggctagtttgaagtccccggtgtattttacggctttgggactgttgcagtgtgaacgccgggaggtgaaaaagcctaaatccggtggatggtttagtaatttttttaaagaataaatgatataagacttttcagctatgcttaatgaagatgatttattggttgtgaatattccaccacaggaagaatcaattatcaaggtgatcggagtggggggaggcggtagtaatgccgtgaaccatatgtgccgtcagggtattcggggcgtagagttcgtggtgtgtaacacggatatacaggcgttgcggattagtcccgtgaagaatcgtattcagatcggtaaggagcttaccgaggggcgtggagcgggaagtttgccggaacgcggtaaacagtcggctattgaaagtctggattatatcaaaacgatattggagcgtaacacgaaaatggtgtttatcacggcaggtatgggaggtggaaccggaacgggtgccgcacctattattgccaaacaagctcgagagttaggtattctgactatcggaatagtgactattcctttcagttttgagggacgaaaacgggtggagcaagctatggaaggggttgatgagttgtcgaattatgtagatgctctgttgattatctgtaacgagaagttgcgggatatgtacggggatttgaagttgtcgaaagcgttcgagatggcggataacgtgttgacaattgcggctaagagtatagcggagatcatcacgttgaagggattcgtgaacgtggactttgccgacgtggaggtggtgatgcggaatagtggggtggctctgatgggtgccggagaatcggttggggagaatcgtgcgttggaggctgcgaaaatggcattggaatcgcccttgttgaatagtaatgatattcggggggcatctaatatattgttgaatatgttgtacggtagtaaggagatcacgatggacgagattaccttgattaccgattacgtgaaggagttggtcggaaatgatgtggacgtgatctggggtgccggtaaggatgatgctctaggtgatgagttgcacgtggctgtgatcgctaccgggtttaacggttcgccgatcgagaggaagaagacgaatatttctttcaaggtggagacggtggaagatttggaaatgcagacagtggatgcccggaagttggaggaagaggagcggatgcgcaagcaaaaactggaggaaagtcgtcggttacgtcaacagcgaggtgaacagcggcgagatatcgggaaacgtcaacgggcaatcgtgtttgacgacgatgatgacgatgaaccggttcgggaagaggagactcaccggaaacggatcgaggagtatgaccgggagtttgaacaggagaacggacgcaaacggggaaagaatgaggtgccggatgtggacagttggttcaagcgtaagctggggaatatgttcaacgaggatatgaatagggattcacaaatgtaataatggacgatcatggtagatggattgataaattttaaccagtttgagattactaccccgattattaaagtgatcggagtcggaggtggtggcggtaatgccgtggaatacatgtacaggcaagggatttgtgacgtggatttcgtgttgtgtaataccgattcgcaaatattggaacatagtcctattccgaccattattcaattggggaagaccctgactgaaggacggggagcggggaaccgaccggaaatcggagaggctgccgctaacgagagtcttgatgatataaaagcgttgttgagtaccaatacgaagatggtgtttatcacggcagcaatggggggtggtaccgggaccggtgcggcacccgtgattgccaaggttgccaaggatatgggtattctgacagtgggtattgttacgataccttcccgtttcgaggggccgaaacgtttggatcaggctcgtgaaggggtaaaaagattaaaagaacacgtggattctttgattatcatagataatgaaaagatacaacggatattcggatcgcagacattgtcgagtgcatttgccaaggctaacgacgtgttgaatattgctgccaagggtattgcggagattattacgttaccgggatatataaacgttgactttgctgacgtgagaacggtgatgacggatagtggaattgctattatgggtgcggcgaaagcctccggtgaagaccgggccaaacgggtgattgccgaggctttgaatagccctctgctgaataagagcgatatactgggagctagtgacatcttgttgaatattacatccgggacggatgaaattacgatggatgagatgagtgaaatcacgaattacgtgattaaggaagtaggtgataatgcagctataatctggggtgtgggaaccgatgaggcgctggaagacgcaatttccgtgacggtgattgctaccggctttcccatggaggacgtggaaaacacgttcacgaaacccttgaagggagttgcgtccgtgaatgatgtttcggaggaggcggtggatgccgcccgtacgaaaaaaatcaaggacggggtaaaggattacgtacaggttattttaaaggaatcggaggttgtgcttcaaccggatctgtcacccgaaaaagtagaagaattggcaacgactccggcgtatacacggagacatttaaaaatagacagaccctagcgatttagtgatttaatgatttagcgattacgtgatttccggttataagtagaggtgtcagcctcgtggggaggaatctaaaatcaaaaatcactaaatccgaaattgtaagggggtaatttaaaacagtttaatggaaaaatttagagaattaggattagacggggaaattcttaaaggaattgcagatttagggtttgaaacaccgagtccggtacaagagaaggccatccctgttattttgggcgaagaaaatgatttggttgtgttagcccagaccgggacgggaaaaacagcggctttcggattgccgttattacagaaaataaatccggaatggaatagcgtgcagatattggttctgagtcccacacgtgagttgtgtatgcagatcgggagtgacttgaaaaaatattcaaagtatcttccggatattcgtgtgacctgtgtgtacgggggtacggatattagaaggcaaatgaaagagttacagaagggggtacacgtggttgtggccactccgggacgtttggttgacttgttgaaccggaaggcattgaatatcgagaccgtgtttgctgtcgtgctggatgaggccgacgagatgttgaacatgggattccaggaagatctggactttatcttgagtaacacgcctaaggataaaaatacatatttgttttcggcgacaatgccgaaagaggtagagcggattgctcggaattatctggtgaaccagaaggagatttctgtgggtaagaagaatcagggtgcagacacggtgtctcatcaatattatatggttcgtgcgaaagattgttacgagacgttacgtcgaattgtggattgctctcccagtatgtacgctattatttttacccgaacgaagaatgatgcgcaggatatagcgaaacatttgcagcgtgacggaattgattgcgatgcattacatggggatctgagtcaagcacagcgggataacgtgatgaacgctttccgggcgaaacgattgaaagtgttggtggcaaccgatgtggcagcccgtgggttggatgtggattgcttgacgcacgtgatcaattacaatttgccggaagacgtggagagttacacgcatcgtagcggtagaacgggacgtgccggaaaggaaggaatctctattgcgattattcactcgaaagagaaaggaaaattgcgtcggattgaaggtatcttgaaaaagaagttcgagtacaagcaagttcctgtaggtgaggagatttgccgggctcagttggcattctatgcagataagattttagcatcggaggatcaagaggatatggatctgtatgctccggatgtgtacgaaaagttcgcagagctgacgaaagaagagttgattcaacatttggtatcctacgagttcggtaagctactgaagaagtataagaatacagctgatttgaatattagcgaggatgaccgtggaggtcgttcagagcgaggtgaacgtggtgatcggggtgataggcgtgatcgtcggggacgtggagaagagactgtgtacagcacgtttatgctgaatgtcggtcgggaagatgggctgacacctcgtgatttgatgggcttgattaataagtattctcgtcgtcgggggattggtgttggaggtattcgtatttttgatacagatactaaattcgagattgacgaggagagtgcatctgatttcgccgtagatttcagcaaggttctctttaatggtattccattggagataaaggctatcccgactcgggataatggacgtcgtcgggatgatcgaagtcgaggcggcttttccggaagacgggaacgtcgtgatcgggacaaacgagatagccgaggtggcggacgtcgggaagaaaagagtggtggaaagagaagaggaagaccgggaagtgatccgaaaaagccgagaaatttcaatagatcgtcttctcgcgactagaaaataatttgtacatttgaacatgggaagtgtaaagtttactttatattttcacatgttcaatgtttatatattcaaattgaaaaatgatggaaattaagagtgccaattttgtgataagtaacacggatgtgaagaagtgtccggatccggatcgacacgaatatgcgtttatcgggagatcgaacgtggggaaatcttcgttgattaatatgttgacgaattacagtaaactggccaagacatccagcagtccgggaaagacacagttgatcaatcattttttgattaatgatgaatggtatctggtggatttacccggatatgggtatgccagaacatctaaatctcagcgaggacaattcagttctatgataaagaattacattttaaaacgggagaacatggtatgtcttttcgtgttgattgacagccggcacgatccattaaagatagaccttgattttatggagtggctgggagaaaatggggtgccttttgttatggtcttcacgaaggctgataagttgacgaccacggaacgaatgaattgtattgccaaatatcaggaaaagatgaaagatacatgggaaagtatgcccatggcgtttattacttctgctgaaacgaaattgggacgggtggagttactgtcttatatttctgagttgaatagattagaactggaataattagattgtaaattttagattgtagattccggcacagaaggctaatgtttgggagtcttttaatttgaaatcataaattgtaaatcacaaattagcatggaggctattggattgtaccaattgaataatttggtgaaacgggagttaaagaatcgtttcccggacagttttttggtgatagccgagattgctgatgtgaaagaaaatcgatctgggcattgttatctggagttggtggagaagagggaggaagatgatgcggtgattgccacagctcgggctacgatatgggcgtttacctatcggattctaaggccttattttgaaacaaccacgggaaaatctttacagaaagggatcaaggtactagttcgtgcggagatcgtttttcatgagttgtacgggtattccttaaatataaaagatattgatccgactttcacggttggagatctggagcgtaaacgtaaagagattattgatcgattgacgcaagagggggtaattgatatgaatcgggaactggaatttccgatgttgccgaagactgtggctattatatcttctcctacggctgccggatatggtgatttcgtggatcagttacatcgtaatgtttatgggtatgtttttcataccaagttgttttctgccgttatgcagggggaaaaaacaacagaatctattattgctgccttggaaagaatttacgagtatgaatcactttttgatgtggtagtgattattcgagggggtggttcacaaacggatttgggtagttttgattcctacgaactggctgctaacgtggcgcagtttcctattcctattcttgcaggtattggacatgaacgagatgaaacgatcgtggaccgggtggcttatcggagtgtgaagacaccaacggcagcggcggcttttttgatcgagtgctttaacgaggtggatcgggtattggaggacgctaaggaaaccttggtaagagagactagaagaattttgcaagaagaaagaactcgtcaggtagtacgaatcacagagttcaagcaatttacccgtctgtttttagaggggcaggcaaataatttgaccttgtcgtcccagagagtagaacatgcctcaaggctttttgtacagaatcggattaatggattgaatcaattgaaaatgagggtagaagggatggttggggccttgtttgagcgtcagaggaatcgtttggacgatatgcaaaagacgatggtacataaaacaacagaattgtttacggctaatcgttattttctggagttggtagaaacgaaaatgaagtatgttgatccgaaaaatatactggaaaaagggttttctattactcgtgtcaacggaaaggcggttcgggagacgaatcgtgtgaagaaaggggatgtgcttgaaacagagttgttcaagggagttattcgaagtgaaattaaagatattgaaacaaacatctaatatataatcgattatggaagaaaaattgacatataaatccgctatggaggagatagaaagtttggtgaagttgttggaagaaaataagttggatgtggatgagttgagcgagaaagtaaaacggatggcggtacttgttgagttttgtaagggcaaattacatcggacggaagaggatgtaaataatgtgttgaaatcaattaccgagtgatgaaatccggctggctgttttttttcatgctgatttcgatggcctctgcattagggcaaattcgaacagcgggacgaaatttgtggggaagggatgaagtaaaacatgcagcgataggggtttgcgtgaagaacgtggagacgggtcaaattgtgtatgagcataacccgcagatggcattgcgtccggcctccgtggttaagttgctttcttctgcgttagcattaaaacgggaaggggattctttaacttacacaacaaagtttttttacaccggggagattgatgaggggagactttttggaaacattgttatacaggcgggaggtgatccaacattagattcaaagtattttcccaaagcgtgttttatagatagtcttgtttctaaagttgtgaatttggggatcaagcgaattcatggaaatattattgtagagacagagggagaaccagccagtattccggggtcttggccgtgggaagatgtggcaaattattacggggctctctatcattcatttaattaccgggataatacgtatacgataaacttgaaatcaggaaaacctggtactcaaaccaagatcgtgtctgttgtgccttctgttccggggataaaattgcggaacgaagtcatggcttctgtcaagaatgtgaatgatgcgtggatatatggggggccggaggcagcgacgttattaattcaggggatgattccagccaatcgttcttcttttgcggtgaagggagctatgcatcatccggatgcttgttttagagctgaactggaaaaacgattgaaggagaaaggagttttgttggataaacaaaggatagaggagggagaacgtcatgcattgttgtctttggattctccttttttgaaggatattgtttattatactaataagaatagcgttaatcttttcgccgaggctttgggcgaattgatcagtccgacagattacgcaagaacggtaaaggtagaattaagtcatatcgggatagattcatgtggaattacgttgaaagatgccagtggtttatcgccggcaaatgctgttccggcggaggtgttcacggatttattgatttgggcaaaggggcatttaagtgatgcttttgtttcctcattaccacgaggaaatgtggattggggattacgagtttattccgatcatccggttttacgagagaatgttattgctaagaccggctctatgtccggagtccgggctcttgctggatacttaaaaaatcagaagggagaaacgttagcttttacaattcttgtgaataattacgtgggggatcccgtaaaggtacaggagattattagggatttattgaaagatatagcagataaatgaaaaaaaacggcatcttgccggttttttttctaaaatatatagaaaggattattcattcttgaactgatcatctccgaatgctaacatcgggaaagtgataaagggaaagaaaatagttgcaatggtaaatccaataccttttccgaatttctccaagaattcttttaaagctatgatagagaagatgatgtttgcaatcggaacaaaaatcatgatcaaaagccaccaccacggtctgttaatgatttggagcattacgtaaagattgtaaatagggataataccttcccaaccttgtcttcctgctttttcgtacactttccacatagaaacaagcaataatacgacaataagcaagtaaatgatagatactaacatagttctgattttttagttaaacatttataagtaaactcgttttttcctttcgtgtacacacagcattttcgctcgcaaatgtataaaaatctatacgattgtcaaagtttttctcctattatctatgtttttactgttaaagcttttattatctgttttttcgacaatagatttcttttgtatttgttttttaatacatttgtaatatagaatgtatgctatttatgggcgatttggagaatggtgtattaggaaaagaaaatgttgcgggagataacggaaatgaaagttttaaagacgagattgatgttattcgttacgcactggatcacgtggatcaggaaatttttgtattccgtccaagtggagaactcgtgtataccaatcaaccgggtaaagacaggtttcatctaccggaaaatttggctggaatttacgcatggacattagatccgacgttgacattagagtcttggaacaagaggattcagccagttagggagtgtggggagaacttcgagagtatgttgtatttaaacaggcccggtgggggatgtgatgttttaaaaatgtttgctcactcgacgattcgtgtttcaggagaggagttaatctgggtctttgggcgggatgtatccctgcatgtgaaaaatgagaatagaattaaagagcttaattccattatgaacaccgtactagacaatattcccgtgtatttgttcgtgaaagatgccggaccggaatttcgttacgtgtattggaataaagcttttgagacatattctcatattttacgggagaatgctctaggtaaaaccgattttgaggtttttcccaatcaaaaagatgcagagcgtttcagacgagatgataaagaattacttcgtacaggaaaagatattgaatttttggagacctacgagacgaaaaaaggggagataagaactgtgaagacgttgaagactttggtccggaatgactctggtgagccctgctttttagttggtgtttcgtgggatataacagatttaaaaagtacggaacaagaattggttaaggctcgtctgaaagcggaacagtcggacaagttaaagtctgcttttctggcgaacatgagccatgaaattcgtactcctttgaatgctattatcggtttcactcgtttggtggcagaaacggaggatgcgagtgagaaagattattatctgaatatcgtagagaataattcggagttgctgacacaattaataaatgatatacttgacttatcaaggattgaagctgggagcttagagtttgtgtataaaccggttagtattcgggagttgtgtttgaaaattcaagaagtacatcgggtacgcatgaaagaggatgtacagttggagtttgaggatggtggtttaaatacccacgtgttaacagatggaaaccgattatttcaggttatatctaatttgattacgaatgcctcaaagtttactgcgaaaggatttatacgtttcggttatcagcaagtgggagattttattgaattttacgtggcggattccgggtgtggaattcctaaagataaagtacctacaatctttgatcgtttcacaaaattgaatacctttgcgcaaggctctggtttaggattggcgatatgtaaaatgcttgtagagaaaatgggagggaacatatttgttcaatctgaagagggacgtggttctatatttaaatttacaattccttatcaaagaattactatcgaaacagacatgaacgatatggaaaataacgagattaaagaaaatgtgagcgtcggaagaacaattttagtggcggaggacgtggagagtaattttcttttattaaaagcaattatcgggaagacttatacattgctccatgcttggaatggaaaggaagctgttgagatatatgaacaatcccaccctgatcttattcttatggatattaaaatgccggaaatggacgggctagaggcaactcgaatcattcgtaaagtttctcaagaaattccgattatagctttaacagcatttgcttttgacgatgatcgggtaaaagcattagaggcaggttgtaatgattatttaactaagccgttgtctgctcctttattaaaggaaacgattgccaagtatctggtttgattgatattattataaaattattgtatttctaatttatgtgcatggaagttcgtcatgaatttccatgtcgtgtatgaggaaggatgtcattggagtatgaaaaaaagctgtaaacttatcgtttacagcttttttatgtagatgttagaattttatttcacttcctcgaagtcaacatcagttacttcttggtcttttccaccattgttcgcttgttgttgttgatcagcgtgaggggctccttgttgtgcgctgccttgttgttgttgtgcattgtacatttcttgagaagcagcctggaacacgttgttcagttcatcaatagccgagttaatagcggtaacgtcctgagccttgtgtgcgtctttcagtttttgcaaagcagtctcgatcggttgcttcttgtctgcaggtaatttgtctccaaactcttttaattgtttttccgtttggaagatcatactgtcggctttattgatcgtgtcgattcgttctttttccttcttgtcagcctctgcattagcggcagcctcgtccttcattctcttgatatcggtatcggagagtccggatgaagcctcgatacgtatagattgttcttttccggtagctttatcttttgcagatactttcagaataccgttagcatcgatgtcgaaactaacctcgatctgtggaacaccacgtggggctggtggtagtccgtccaagtggaaacgtccgatcgtcttattgtcttttgccaaaggacgttctccttgtaacacgtgaatttcaacagacggttggttgtcggcagccgtggagaatacttccgatttcttggtcgggatcgtggtgttggattcaatcaatttcgtcatcactccacctaaagtttcgatacctaaagaaagcggggttacgtcaagtaacaacacgtctttaacttctccggttaatacgccaccttggatagcggcaccaacggcaacaacttcgtctgggttaacccccttggaaggagctttgccaaagaactcttcaacttttttctgcacagccgggatacgggtagaaccacctaccaaaataacctcgctaatgtctgatgcgctcacgtttgcattcttcaatgcacgacggcaaggctcgatggttgcttgtaccagatggtctgttaattgctcgaattgtgaccgggttaaggttcttaccaagtgttttggaattccatcaaccgggaatatgtacggcaaattgatttccgtggaggttgaactagaaagttcgattttagctttttcagcagcctctttcagacgttggtgagccatcgggtctttccggatgtccacgttctcgtctttcttgaattcgtctgccaaccagttgatgatcacgtcatcgaagtcgtcacctcctaagtgagtatcaccatcggttgattttacctcgaacacaccgtcacctaattccaagatagaaatatcgaaggtaccacctcccaagtcgaaaacggcgatcttcatatctcgatcttgtttatctaatccgtaagccaatgctgcggcagtcggctcgttgataatacgtttcacggtcaatccggcaatttctccggcctctttcgtcgcttgacgttgggcgtcgttaaaatatgcgggaacggtaattaccgcctctgatacctcttgtcccaagtaatcttcagctgttttcttcattttctgaagaatcatggcagagatttcctgcggggaatatttacggtcaccgatttcaacacgcggggtattgttttctcctcttacaactttgtaagctacacgattgatttctttatctacctgatcataggtttcacccatgaaacgtttgatagagtatattgttctcgtcgggttcgtgatagcctgacgttttgcagggtcacctacttttctttcgccgttgtcaacaaaagcaacaatagatggtgttgttctcctaccttcactgttcgggatcaccaccggctcattaccttccattacggcaacgcaagagttcgtggttcccaagtctataccaataatctttcccatattgtttaatatttataatgttattattttctatttactttttcgttctttgtccctgaatagtttcaagaacatttatcttttatcaaacggtgtgccagttcccaaataagacttattttcataaaaatctattacaaacatgcggctggtgtcacgtttactgacagaacgtcataaattgaacaggtcaagatgtttcaatctgacaatgaaatggcagaaagagtattgggagttgataacttattttatatctttatacccgttaaaggtcgtaagtagacggtaaaatatattaactagttatgtaaaagattttacagtggaagaagtcgtaaataagtctattcaggtaattggttttacgagaaatgccgattttcaattacccgttttaaataccgataaagaattattgcaggagaatatcattctgctacgggttggttgtcagcatgaagagtttctaaacgtgttacaacaggttcgggctgaggatataatgcttgtcgatctggaccgggtggccttgcctatgttgaacgctcttggacaagcttacgggaaaacggaacgaaaggatcatatttattatgtgagtagccggaaacgtaagttgtggcttggatttgtggatacagtcttgtggcggagcgatcggagtatcacggattctcctgtgttaatcggtaacaagtctttgttcatgaaagcatatgctgggaatgatctggacggtaatttgttgagggctgtgagttacagtttacagaaagcattcgtgaaattcggtaccttggaggtgtctgttacctggaaagatttggaaaacgtttcaaatcctgccatgaattatttttggaagataccttttcgttttttgacgacaggccgtttctttaccacgttgtttgatgtttccggtcggtctcttcgggatatgacataccggatgcttatgttgttattcggtttgtttgtctttttctatatgccttatatcagtaaggattacgggattagcggggacgagtttgtcgatcaccgacattccggttatgtacttgatttcttcacgaaaggggataaggctgcgctgaatcagcctcaaacggctttacacctttacggtaattcgatgcaggtggtggcggctgtcgtggctaacatgatcggtgcggatgatgtttatgccgtgcgtcatgtcgtgtgtgccttggtgggagctttggggataattatgatcggtttgttgggaatgcgtttcgggggagggttgtgtggacttatttccatgttgttactctttttttcgccccgtttcttcgggcatagtatgaataacctgaaggacattccgtttgccgtgggatacttggttgccatattctatttcgtgcggatgttcgatcgttatcccgtggtcaaactacgacacatgatcggggccatgctgggaatcgctttggcattgggaacccgttccgggggtttgcttttgtttccgtacttgttgatgtatggcggtttgttttacatcttatgggtcggattcaaggagttttataaatttatgaaatatcgtaaggatgtcgaaaacgtcttgtttttgattatactcgttttatttgttgggtatttcttgtctatcatcacgtggccttttgcgttggctcgcccgtttactaacgtggttgtgtcattgaaggaattcacgaattataatatcgggttgcgcactatattcgagggagaacagatgatgtcgaatatgctgcctgttcattatgccccgaaatacttgatgatcgggtctcccttggtggttgttatcggttttattgggtatctttttttcatggctttccggaagaaggaattctctctgttgtcgttctttattttattctcactggtatttcccgtgttctgggttatttaccagaaatcaaatttgtacgggggaattcgtcatttgttgttcgtgatgcctttcatggtgttgctggcagcccggttctggacgttaatgttatctgtttcccctaaatatttgaagggtgtcatggtggttgtgcttgtcgggttgttattcttacctgcacgtcacatggccgtgaatcatcccaatgactatgtttattttaacgagttggtgggagggttgcgaggtgcttacggggattacgaaacggattattattataattccttgaaaaaaggggtggattggttcaagaagaacgtggattataagggacgtcctctccggatcgtgacgaatcatagtgcgaatctgcaacattatttccggaaagatacgaatattaccatcgtgtatagccggtattacgataaattcagcaaggagtgggattacatgatattcgataacgtgtatatcaatagtttccagttgaaaaatggtcttttcccagtgaaagagggctttttgtattcggtggatgccgatgggttgccgatgtgcgtggtgggtgagagaacgtctagggatgattacgaggcgatcaagttggaggaacagaagaagtacccggaggcgatcgcgaaattggagaattatttgaaggatcacccgtggaacgaggaaatgtggatgcgtttatcccggatgtactacacgattggcaagccggaggaggctcttcggtgtacgggtgaatctctgaaatggcaaccgcagttgatggatgcgttgaatatccgggcgttgagtgctttggatttgaaaaagttcacgacggctcatcaggcggttgacgcgatgttggcccaaaatgacgtggcatcttcttcttattatttgaaggggttgatttactacacggagggaaaggataaggaggcgctggataatgtcaataaagcgttgaggtataacggtggaaacgtgcaggcgttggccttaggtggggatattttacggcgaaacgggagttattcgaaagcgatagaaccttacgagaaggtggtgagagccaaacgggcggatgagcgggtgttgctttctttggcggaatgttactgtcgtgtgaataactacaagttactggaacagatcacatcattgttacgtgagcaaggacgggataaagaggcgttgcagaagattgaactccgggctttgattcagcaaaaacgcatggaggatgccgagaaattgttgaaacagatgaacggggtcaaggaggatagcgagtttgtattgttacgtgcgctatgtgaacttgcggcaggacgccgggctacagccacagaaatggctcaaaaggcgatagaactggacccgaagaacagggaggcgattgaattacagcgtttcttgtcgaaagaaatggagattcggaaataaaacgattataaatgaaaaagatatgtgtcatcatcccgtgttataacgaggcgcaacgtttggagttggaggtcttccgggaattcgtgggtagagaagaacgttttgatttttgtttcgtgaacgatggtagtcaggataatacatccgaggttttacggcgggccgtggagttggaaccggggcgtttcttgctggtagacaacacggacaaccggggaaaggcggaggccgtcaggagtgggatgttgtatgtcagttccttgaatcgttacaatatcgtggggtatctggatgccgatttggccacgccattggaggacctgtatttgctggcagaggtgatggacaggaaaccgggagtgtgcatgacgatgggggcccgtctgaaacgcttgggggccaacgtgcaaaggaaagcgtatcgccattatttggggcggggctttgcgacgttagtttcgatgttatatcaacttcccgtgtacgattctcaatgtggggctaagcttttgaaaagtgagttaatacctgttggatttagcgaggaatttcgttccagttggcttttcgacgtggaactaatcttacgaatccgggaaaaatacgctgattatgaccggattattcatgaagttcccttgaatacatgggtggagaagggggatagccgtatcaagttcaagcatttactgaagatgcccaaggaattgtttaacatttattgtcgttacatgggacgtgaataagggcgtgtgttccgggttattctaagcttaatattccgaataagttaccatgtacttgcgtcgctgtctcgttagtaagttaccgataagttaccgataagttgccgataagttatcgagcgggagtggtaacttgtcccagtgttcgtgttgatgaatagttggattacgcccgagttacaggcagaacaccggagaatgtgtctgccagtagacttgaataatgtttctattgtaaatattccggatgtcgtttcaaccacacggccgcatacgagcaagtgccttccggtttgaggtgattggctttcgcgtagtcataagcggcttccgtgagtgcgctagcgattcctctcccttctaaagccgggggaacgaacgtgtgaatgatgtcgagactattgtccgttaacctgtattctgcgtaagccttcatgttttccagctcgatttcgaaacgttgccgggtggggtaatgtgtcactttgtaattcatagtttttgttttttgatgtaacgaagataagcaataaaatgttttgtatcgttttttcgattatatttgaggaagaaagagtataaatttaaatgatggaattatgatagaggcacctgaagcgctttgtttgtcggaacagttgaacggggttatcaaaggaaaggtcgtgatggatgttataccttgctacacctcgcataaatttgcctttttcaacggggacccggaaaaatacccggggatgttactcggtaaaatggtggatggggcttgtgcttacgggggaatggtgcaaataaacgtgagggatgccaaggtggtgtttagcgacggggtaaacctccgttattacgaacccgaggcgaagttaccgaacaaacaccagttactgatcgggtttgaagatcagagttgcattatcgtttccgtgaggatgtatggtgccgtgtggtgtttcgtgggggattctttcgaaggtggtttgatgtcatattacggaggggcaaaaaataaaccgcaggtgttgtcggatgcttttgacaaggcgtatttcatgtccttgattaatgacgaaggggtacagaaaaagagtgccaaggcgtttcttgccacggatcagatgattcccggtttgggaaatggcgtgttgcaagatattctgtatctggctcgggtacatccgaagacgaagattgcggttctttcgcaggcgaaaagggaagagcttttcgggtgtgtgaagaaggttttgcgggagatataccgactgggaggacgttgttccgagaaggatttgtttgatcaaaaaggggggtacgttccttacttgtctaaggatacagtggggagccattgtgtgtactgcggggattatatattaaaagagaattatttggggggtagtatttactattgcaacacttgtcagcaagaagaaagatagaataaaaaatcccggattaaactccgggattttttgatattatctgttatgatcttttaatatcacgtcgtgggcaccgccttccacgatactggttgaagaaaccagggtgattttagcattcttttgtaattcaaagatagatgttgctccgcagctacacatcgtggagcggattttaccgatggttacatccaagttgtcttttaattttccggcgtatggaacgtagctatccacgccttcctcgaatttgagggattcactgccgcccatgtcataacgttgccagttgtgggcgcggttagaaccttctccccagtactctttcacgtaggagttattcaccattagttttttggtgggggattcatcgaatcgggcgaaataacgtcccatcatcaagaaatcggcacccatggcaagagccaacaccatgtggtagtcatgtacgagaccgccatcactacaaatcggcacgtagataccggtatcctcgaagtatttatcgcgggctttggccacgtcaatcacggctgtagcctgtccgcggccgatacctttctgctcgcgggtgatacagatggaacctccaccgatacccactttgataaagtcagccccggcttccactagataacggaatccggcctgatctaccacgtttccggcaccaacgagtactttgccgttgtattcttgtttaatccattgtaatgtctctttttgccattcggagaaaccgtcagatgaatcgatacataaaacgtccaccccggcttctactaacgcgggaacacgttctttgtaatcacgggaattaatcccggcacctactagtaatttcttgtccgtggtgtttaataattcattcgggttatctttgtggctatcgtagtccttgcggaacacgaagtaagcaaggttttgatctttatcaatgatcggtaaggtgttcagtttatgatcccagatgatttggtttgcctcgctgagggtcatcccgatttctccaacggttaatttggaaaagggagtcatgaattctttcacttttctgtctttcgggtctttttctccccggtaatcccggctggtaactatacccagcaatttgccgttcggggttccgtcatgggtaacacccattgtggtatgtcccgtgcgtttcaccaaagcaagcacgtctgccaacgtggcttccggggtgatgttggagtcactggtaacgaatccggccttgaatttctttaccttgcgaaccatttctgcctgtgattcgataggttgcgaaccgaagataaatgacaatcccccgttccgggcaagtgcaattgccaatccagaatcggaaacggactgcataatcgctgaaacaaacgggatgttcagttcaatggctgatttctcgccttttttatacttcaccaagggtgttttcaatgaaacgttggttgggatacactgtttcgtggtcagaccgggaataagcagatattctccgaaagttcttgatacatcgtccaaatagattgccatagaatttatctttatgcggtttgattaaaaattgggcaaagatagtcaatttctcggaatatgcagggtgtagagccttattttttgtttcgatgaatttcatgccatttttcaagacagtttaaaaagtgatataaaaaaggggctgtcccaaaagtctttttatatcaaaaaactcctccgtcacttcgtgccacctcctctataaacagaggaggagctggtgactcttcccgaagacagggagtatttcaactctccctctgtttatagagggaataccccgaaggggggagggagttaaaaaaagacttttgggacagccccaataaatgaataatatagaactatttacttttctgattttaaataatcaacagaaagtaaagattttttatttctttttcgccaaccgttcgtccagccacgttttcagctcgtgcttgtctttcgcttttcccacgattttaccgtccggggcgatcagcatcaacgtggggagataggggatagcatagagagtggccactttcgccggggtatgggggatagggaattcatctatgacttgcagccagggaagttgatcttcttccagtgctttcaaccagtcgtttttccggctatcattcgtgactccgagtatttcaaccccttttttatggtattcagcgtagagtttcttcatttcagggaaagaggctctgcaaggacgacaccaagaggcccagaaatccagaatcacgtatttacctcgcaaatcggatagggataattttgtcccgtcgggtgtttccaacgtgaagtccggggccggcatacctggttgtacacgaattcttgctgcaatttccactctaacatctttagcgaatgaactgttttgtactttaggagataaggccttgaatacttgttccaattcagctaactccatgtcattctgaaggaaatttaaatagtatgctactgcttctatcgtgtcatttttcaggatcaattctttttgttgcttccgaacctcattgctgaattcttcggttattgcctcggtttctgcttgatacttgtagaaggcttctttatcctcaccattatggagttcattcaatttagtttgtacttctgcgtattccttaaagcggggttcttgcatcaatttttcccgaacgttactgatttcctggtatattttttcgtttaatgaacctgtcacgttaacattcggaatactccgatacccgtattggtcgagaacatcagcccattttccagcgagagtgattgtgttgttttctccgataaaaccacaagatgccggtttttccttgtccggacaaacttggatgctgacccaagagggggcttctaattttcccgtgaaagtaaagactccgtttttcatttttaccgtgtcgccagtagtaggttcttctcttccgacggggagtgtcatgattgcgatcccgtttccggcaccttcaatgttacctttgatttggtaaccttccgtgttggattgacaggctaatgcggttaacccgatccatccgataaatgtcattttgttcattttccaaatatttcaattagtttttgatctaagttttcttgtggctcaccacctccgccgtaacgaccgatgatgattccgtttttatcaattagaattttcgtgggtagcgtgtgaataccgtaccattctccaatatcttcgcttttgtcatatccttcggctgtacgttttataccgcttaacacgtgacggaagttcccgattccatcttcctcgactgcttttcgccaagcctgtggtttcgtgtcgtcagatgcgatacacacaatctcgaatccttcgggggcatatttcttgtatagctctttgagatgcggattccccttacgacacgggatacaccagcttgcccagaaatctaggagaatgtattttttgccttttagctcttcaagattgagcattttgtcgttaatgtctttccggttaaacatggttgcgggacttccgggagaaccttgttttagtttttttatctcttctgcgatctctttaccggagcggctgtttttcactcgttctgtccaatgattgtaagcgttttcaacttgaccgacaggtaacgacatcaaccggaaacgcatgaggtaaggggatagataagagtcgggatgggttttgataaactcatccgtgatcacgtccatacgctcgttataaggttcaaattggtcacggatggctgcggccttttcatggtctttttctgctttataagcttctgtaagtggtcgcatctcttcccggattggtgcttgctgacgatttagttcttgttcttcctcgtttgttttcgaaccggaaagcttgaactctttgaattttccaacgacaatttccaattgcatatcggaggcctcgatccagaagtctgtgagattcgggtcatccatgtagcgaacggttgaatccaatcttaatgacatatttgtcggttcggaaatcattccttccagttggaactttccattttttaccggaacattcttttgtacgtactgttcgttattgtctgtataaccaaataggagatggccggacgtcattccttttatttctccgcgtagcgtgaatttattattttgtgcgtggagtattgtcgtgcttagtaagagcacgacaataaaaaacagtgatttctttaacatatggcgaatttttagattttactatatcccggattctgatccccaatcgtgggatttttttcgaactcggcagctgggatcgggagaatgatataatttttctcccggatggccggttttacttttaagatgacttccatggggaaacgaagtagcatgctccattcgattccatcttcaaacatgaggtttttcaccgtctctttgtagatttcataaagcaattcatcccggtctgtgatagcatcaatttttgtaaagtccgtgatcccggcgtgtcccatgacggttttcaaaggttccttggcgtcacccaggtcttttccggcacgaaccgtagcctctgcttttaacaggtacatttcagttagtcgaatagcataacattcttcgattttctcaccgacgtattttgttatggcataaatggtatccttgggactcagtaacccaagcatccattcttctctgggatcatctttcaataaatttttgaacatgggagttgctttgtattgagccgaattattatatatataggtgtcatatcgggtaacctgattcggaagaggttgaatacctaacatgacttctttactcgtcaatccttttgtttggaaaatatcccgcacgtgttcttcaagttcgtaaggaccattctcgatgatgtcgcttgtgagcgtgatcacttcttcataatcctcggtatttccccgtaagatcaaaactcttgcttttaaggctttggcgatccagcggttgctgtaaatattcttattttccaacggggcatttttgatgccttcttctaaatcttccaaaatcagtttatacgtgttttccacgttatctcttgattgtgcaatgttcgtggtcgtgacaaattcgtcacgtagtaaagctccatactcgcttttcgtatcgtagaattgagtgaaataccggagtaaatgataatgtccgtaagcacgcatgattttagcttctgcgatgatttctgctttccgttctccctcaaacatagaagtgggtaggggttccatttgtgagattaccccgtttgccgcattgattagagtgtagcaataactccagatcccttcaacagaaccgtcggtggcttgaacggatgcattttcatctaaatttcccccgctggttcgtgtgatataaccggaaagataagcgggaacgatttcttgagagtatccccattgtgtactaggtgtacctcggtcgtcaccgccttcggcgaaacggtaatataccccgtttaacgcaacttccgcacttttttgatccacgatcacgtttcctactacttttgattgtgtgggtaaggcatttagttggtcatcacaactcatttgtgaaagaatacccaaaaaggacaatatataaataatgacttgtttcatgattctatttttaggattagaaattaattcttattccaaaggtgtatgatttcaccgtaggataggtgctgacatcccgtcctcctccgataacactggtcggatcgtcactgacttccgggtccggtccgggataggaggtgattgtgaacacattggttgccgttccatatacggatgcggatttaatccgaaccttccgacaaatgctttccggtagattatagcttaatgatagagttttcagctttaagtaagaggcatcatatacgttaagactacttagcatataagtggttgcccacatacttcttgggcgattagacgaggtgttgtcttcactataatgatttaacacgcgtgtacctctgttagctaagcttgacataccggagtcgctgacatctttttggtagataagatcgttaccgtatgaaaacgtaaataaagcagtcagcgtgaatcggttccagttgatcgtgttcgtgtacccgccgaagaaatccggtgtggcgtgacctataacatcttctttccaaaaaccatcctcgtattcgtaagcgatgtctcctagatttaaataggggtcaaaaattgtccataaggagaattcttctcttgctgcctccagttgtgcttgtgtttttataattcccgtggctactcttccgtatagtaatcctaaaggttccccctcttttacaacacttgtacctaaattcattgcatcgcgatcattcgggtcggagaacggaccaccgtttatatccaaaactttcgatacattgcgagaaatatttaaatttcctgtccagcggaaatcttttttacgaataaagtcaccatgtatgtcgaactctaatccttgatttcgtattttggcaatattgaaaacgacggttgaataagaactactcggagccggagtcatgttaagtaaagttccgtcagtaaccttgtggtaatatccgaaagtacctcctaaacgcccgcgcatgaaagaaaagtctaaaccaaggtctttttgtacggtagattcccatttgattttgtcgtttccgagttgggtaggaatcaacgcgttcttgtctccgtaggataccgggctgtaaagtgtgcgccacatatggtctccaatactttgtgttccggtttttcccatactggctcgaactttgatttcgtcaatccattcaaccatgttcaagaagttctcttccgaaattctccaagcgatagccccggaagggaagaacccgtattgattgtccggtgcaaattttgaagaggcatcggcacgtcccgtgaaggtgaatagataacgatctttccacacgtagttagctctaacatagaatgacagtaatgaagtccgactttccggattagaaccttttacattagccgcgatggatgcggaacttaaattgttcaggtaatcatcgtccggataaccgcgtccacttgccgagaagtagtctttccggtgatcttcccatgaagttcccgccagcacgttcaatctgtggttttcgttgaactctttgtcgtaggttaacgtgttctcgaagaaaacgtcaattacagttgattgtgcctgtgtacccattcctccttgagaatcctcccgtccatagaatcctccgacttcaacaaaactcggaacgtaatttaactggttataattattataattgattgaaacggtactcttgaatttgaaatctttcaaaaaggtgacttctccggccacggaacccatgaaagaatacgtttttgcccggtttgttccggctgctacggccaatgggttttgatatccccggtagtcattgttcaagtcgccgagggcggcataagttccgtcttcattatacggggagaaagttggaggtgcggtaagtgcttgaccgtatataccgttagtgatattgtttttcgtgtacccgaaatttaaattggtatataatctgaagtaattcgaaacatcggtatccaaactgatttttccggaaattctcatgaagtcggttccgatcaaagttccgtcttgtccggtatacgagagagaggtatagtaccttgaattagctccacctccggcaactgaaacgtctacgttctgagaagttcctgtacgtaaaaccaaatcaagccaatccgtgtctgcatttccaaagaaagccggatcgtttatgatgcgttgcgcttgctcaacctggctacccgtcatcggtttacctgcatcttctcgtgccgtaaggaatctttgggccgcgtccttcagtgctgatttatattgctctgcattcaagactttttctttgatcgggttcgtaaagccaatatagtaatttagatttaattgaggtttcgtgtcttttcgtccttttttggtggtgatgatcacgactccattggcggctttcgacccgtaaatagccgttgctgatgcatcctttaagatgtcgatgctttcgatatccgctatattcaaacccgatagattattcaaaccgcgagagaaggctccttccacgctattgttgaagtcatccccgtagttggcagcctccaacgggttggtaatatccgattgtccgttgatgtaattgtctgaaaccacggttggaattccgtcaatcacgtatagtgggtcattcgttcccaacaacgatgcaccaccgcggatacggatacgaactgcaccaccgggggaaccgtctgcctttaccacggaaacacctgatgcttttccggccaacgcgtcgtccacgctgatgaacggtacatccctgatttctcttgtttttacggatgaaacagatcccgtgaagtctttctgtttggtggttccatatcccacgacaactacctcgtcaactgctttcacattttcccgtaaaaccacgtcgatggtatctttacccgtgtaagcaatttcttgtgtctgcatcccgacgaacgagaatacaagtgtaaagttttgaccgatattgttcgggatagagagtgtgtatgtgccattcatgtcagtggcagcaccgaattctgtaccttttacttggatggtcaccccgggtaggctttgtttttgttcgtcccgcactttaccagtgattcgaatcgctttcacttgttgcgacggttgtttttttaatttgggagagatgataatcacatcgtcttcaatcgtgtaattcagtttcgatccggctagaaagacttgcaggacttcttcgatcgtggcttccttcaattcaatctgttttgtcggtaattgcttgatctcttcgtgattgtaaagaaaccggtaatgggtgagttcttttaattgttggatcaccatttctgctggaatccggtcaattttaaaattaatcctttccgtttgggctcttccttctgcaaatgatgcaagagtgaatcccatgatcatgataaatgttagcttcatgattctgtaactttttgacaacacttttcctcttaagtgacaagtgtttctgttttttttcataactttgtcatttagtaattcaacttcgtttgagttccgccggagtaggggtcgaagtcttctccggctattttatgtattttagaattctattctggtgttatcgtgattgtttttccgttgatcgagaaagatatatttgtcgttaatcctatcatgtgtaatactttctctatattttcgtagcggtctatttcgccgctgaaatgcaagttcttgacttttggcccaacgaagaaaatgtttacatcataccagcgagccagttgggccatgatatcttctaggttttcgttgtcgaaaagaaatcgtccgtgacgccatgcactttgttggcgggcttttatttttataacgtttacttcgtttgcggtatttaacacggcttgttgattgggaaccaacttgaattctttgtcgtttacctgtaacccgatcgagccttcttcaagcgtcgttttttggaatgaatcgtccgggtaggctttcacattaaaggaggttccgtagacccgaatagccgatttggatgttttcacgatgaaaggcatcttgtcgtcgtgttgtacttcgaaataggcttctccttccagttcgacctcccgcttgtctccggtgaaaaaggtcgggtattttaaacgggtatccgcgttcagccagattttggtcccatcagccagtacgatagcaaattctccgcctttgggtacgacaagcttgttgattatcggccttccagaagtttcggtatgttttaattcattacgatttacgatcacggaagagtcttgtgataacacggcttgcatgttttccttgatttcgattacctttttatccccagtatacaaggttgctttaaagcctcctgcttggatttgcgcagggggagagggaactatcgctttctgctcgggatagagccagtaggcgccagcggcgaataatagcatgatggaggcggcaatacccgcaattcggtagcgaatgattcgaacccggtgtttccgggaggcttgccattttttccaatcccgttctaatccggtattcagacgcttgtattgttccaggctgttttccacattttgctttgataaaacttcccgcacgactttctcgttgcttgggtcttcatctttcccgggtaatgaagccgggttttcctcttcgttgcttttccccgtgaggtaattcccgattcggatggcttgttttatcgtttcttcaatttgtgtcctcatgatttggtcttaatttcatatatgaaacaccctcatcgcgatttggatggagacaaaaagtgacttttttgaagaaaaaatgaaaatattttaatatggtctgataattaaaatgttataaaaataaaaaagattactttttgacttgtaggggaaacgggatgatcttttagaatgaaatcacacgtgcaccaccactttttccttttcccttggaattgattttcatacgaatctttcgaagaccgccaccaaggtcgattcctgcttgtgggttttgctttaattcttgaagtaatacattataatcttctacaaagatgcataatgtttttgcaatcttttggcttgtttgtcaaatgattcagaggtttcaatattatagttcatctcgcaattcttgaagtaattctgtagcaggtcttgtcctttttgcttttatatctttcaatcccgcatcaatcccggcaagaatttcttctttactaattgtttcttctttcttctttgtttttttactaagcttggtaagtaaacgttttacttcatcaagtacttgacgactgtcagtggtcagtatttcgcatgctaattccgctttataagcttcaagttccatacttgtcatagtcgattctcctttctttgcgaattatcaataaacagagatactaaaaaaacggatagttctttgaatcaagatactaaaataagtagagtttttaaatattttagtttctctcttaactctgcataacttttggctttatggcttttcacagtagaaacggcaattcccagttcttgggcgatctcttcatttgacttctcgtccagggcaagtagtaatactttttgttccattgccgtcaaatacttaatctcgttgtgaatgatatgaaaaatctcttttttcatgatcgtttcgtgcatgaagtcgtcgctttcgaggtattgcaggttttcagtgaggtatttttgatgtacttgttgatgacggatcaagttcaggcacgtgttccggatggatttgtagaaaaacgctcttatcgcaattagattattgaaatcctctttacaatcccagtatttcagaaagacatcgtgaaccacgtctttgcattcctcttccgagggaagtaggctgttggcaaaggaaacaaatagggcgaaatattcctcgtaaaagattttcagcgtcttttcttttccgttttttaactcttctaccaagacttgatcacgattgttcatacacatacacgttatacatttacaaatataggatatttttggttggatcaacgtattttaaatgtatttttgtccgtgatgaaatatattgagtggaacatagatccggttgcgtttcgggtaggtgggatccctgtcatgtattacagtttattgttgatagcggggaccgtgttgtccgtgtggatactatagcgtgtttacaaggagaacgggatgtcgtgggagcattttcaaattctcgtgatatgagtattggtggctcgtttggtggcattgtttggtttacgaatattcatattatatcattcatccattggagatactgctcccgatacgggtgcaaccggatggagaggtcgtttttttctctctgactaattcgatagactctttgcctgtcatgtgttcaatgtcaatctccactatcagcagatggttaaagtctttgtctatttccgcttcccaacccggttcgccatgagaatacttgtctgccaataatttcaagactgcacgtttccccgcctcgtccgttaggatatgggctttaccgaaaataattacgctccgaaaatatgtggtaaactcggcaggcttgatgtcatcccgttccaccacgcaaaacgatactttgtcattctgcatgatggcatccaccttgtgtcctttcatggcacagtgaaaatatatcctgccatcgatatacacataactgacaggaactgcatatggataatcatcgtctccgtggagggccaatgttccgttagtcattctttcaaggatagccacactctcttcaggtggcaataactgccgtttacggcgcatttctctgaacatataattatgttttttttatacatatacgttatacctttacaaatatagagcatttttggttggatcagcgtatttaaaaatgtatttttgcccgtgatgaaatatattgagtggaacatagatccggttgtgtttcgggttgcagatatccctgtcatgtattacagtttattgttgatagcggggaccgtgttgtccgtgtggatgctaaagcgtgtttacaaggagaacgggatgccgtgggagcatctccagattctcgtgatgttgagtattgccgggttattcttgggggctcgtttggggcattgtttggtttacgagtacgagtattattttgctcacccgttggaaattttgcttccgatacgggtgaaaacggatagaactgtcattttttccggttaccaagggatggctagtcatggggggcttgtcgggtggataattgccatggtaatttattcccggatcacgggagagaaagtgttacgaactcttgacacgatcgctttggttttacctttagcggcaggttttattcgtttgggcaatttagcgaattccgaaatgattggtatagaaaccgacgtgccgtgggcttttgtttttgaacgggtagatttggttccccgtcacccggctcaagtttatgaagcactggcctatttttttacttttggggtgaatttgcttctatatcgacggattgggttggagcgctaccggggagtgcttttggggaataccctcgtccttgttttcgtcgcccgattcctaatcgaatttatcaaggaacgacaagttcctttcgaagatcagatgaacttggatgtgggacaggtgctgagtattccgtttattttactgggaatatttttgctgctacgtgggatgaaaggtgggaagaatatgactcaacgattcaggtaacgtgtgaagagaaaggtttgtttctgattaatagatgtttagttggagtctctacttgatgtaatcagtatcatgtgattatattgttattatgaatgtaatcaaatcattatatatactaataaacatctattttttgttattgtaataggggcggaataggatgggaataggagcggaatgggagcggcttgcagtatgattagaatatgatcaaaatttgataacaataatttatatgaattcaagaaaattcagaattgaactggggtaaagttgatttgctattatgaactgtcttctccaattttcacaggtacggagagaattgattaccaggtgtttccatctccttgcatgtgagagggaaggttgttgtatgaagtttacttttaataagccaaccgaacgttatccacccaaagtttatttcccacggtaccaatgtaagcttctccatagctggaagatacacgtaagaataaatgcgtgggtttatcattcgtatcaccccaaccaatttcttccaccggtacggattttcccttgctgttgatgcagtataaagattgttctttggggattaattgcatgtaggatttactaccaggttgatttgccgggtccccgtaaagtacgttcagtctgtggtcgtttttccagtcgggagtattttcggaaaggcgttctatggctgtaccgatccgtttggcatatacgttaccattctcgtcttcccaacgtttttgaaggatcatgtatacttcggcggaatctcgacccgccacgtcaacaattttgctgaaaccggttgctttgattcggtgatctgttcccggggtctccattttgtagtcaaatacaattgcgttcggagtttccgtgaaaggaattccggcgttcagtttactttgcgggttcttcgtgtctttgatcggttcgtgcatctgtcccaggtaaagtgtacccggtacaagtacggtgatgttcacgatacccagtactttacatttctccatgagcgtttcgacacgtacacaatagccgtcatctcttttctccgggaaaacggagatactgcatttcgtgactccactgacttttgccatgacgttggacgttctccacggggaaaccgtggaactgatatagggtttgtctcctcgaatagtgtccaccggggcaacctcgtagagggttttcgtgttaccaccaatgacaaatgattcatcaatgatgcgtaccatccagctattgaagtccccgaatgggattaatttttcattttcttttcctgtcgtttgtgccatggataagacgcttgttcccagaataattcccaggcatagcgtttttatagtattacgtgtaaattgtttcatatcaattgattttcctctgttttgaatacgtttattacgataaaatgactttaaggttttatacaagaaatatgccaatgttaataatcgtgttgaataatgtaaataatgttgctaacgtgtttattcttaatgtgaaaatgagaatgttaaataataaagagtatctttgactgtcttaaatacttttatatatgatgatgaaaaaattaaacattgggaatctctcaatttcagttcccattgtacaaggtggtatgggtgttggtatatcactttcaggattagcgtctgcggtggcaaatgagggaggagttggtgtgatttccagtgcgggattaggtttgttatatcggaatttatccaaagattatattcaggctagtatcatgggtttgaaggaagaacttcgtaaagctcgtgagaaaacaaagggtgtgattggcgtgaatgtcatggttgccatgtctaattttgcggatatggtgaagactgcgattgctgaaaaagcggatattattttctccggagcgggattgccgttgaatttgccgagtttcttgcaaaaggatagcgtgaccaagttggtaccgattgtttcttctgcacgtgccgcaagggttattaccgagaagtggcataatttgtataattacctgccggatgcgtttgtcgtggaggggccgaaagcggggggacacctagggttcaaggacgagcagattaatgatgaacatttttcgctggaacatatcttaccggaagtgattgacgaggtgaaggatattgaaacgcattacgggaagaatattccggtaatcgtggctggtggaatttacacgggtgaagatattaaacgttttatggatatgggagcagctggggtacagatgggtactcgtttcgtgaccacggaagaatgtgatgcctccgatattttcaaacagacttatatcgaggcaaaacaggaagatatacaaattatcaaaagtccggtgggaatgccgggtcgggcgatattcagcaagtttatccaaaaggtgaaggaagggcagaaacagcctaaaacgtgtatgtgcaagtgtatcaaaacgtgtgatataagcaagagtccttattgcattattgcggctctgtacaacgctttcaagggaaatatggataatggttatgcttttgccggggcgaatgccttccgggctacgaagattgtttccgtgaaagagactttccgttctttattggacgagtttaatcgtgctatcaataaataatataatcgggagtgtccaaaaaactttcgacactcccgattatattatttttaaagtttataaggtctataaggttccccctgcggggcgttttgtttgcggcagctagggttgccgaatctaaaattatcacgttctccaccagatactgtacacggcgaatatggcaatcgtgagtaatcccgtgtaaatgatgattgacgtgtattgcatatgagaaggatgtttcacgagtttacgatcttggtggaatcttaccccgttggcaatgccgtctatgcgaagacagaaacggtatattccataagtgacagctcctgcggcaaaaccaacaagcgttccgaaaagtaagtcaccgggataatgtacccccacgtatattctcgtgtaacaagtcacgatagcccatagcatgaaaaaagttgttaaagccctgtttttgaataataacatcatgaaacaagccagagcgaacgtgttggccgcatggcaggaggggaacccgaattttcctcctcgtttcccgttgacaatatgcacgatgtcggcgatggccgggtctcgtgaaggccggggccgctcgaatatgggccgtaaaatggaactacacgtctgatctgctaatgcgacaaggagagcaaacatgagggttgtaaatatgaccattcggatgttcatgtttttatacaagacgtacaggatggatacgtaaagaggaatccatacgagtttactcgtgaatatgtacatgaaggaatcccaataaggagtgtgcattccgtttaaggcaagaaataccgtacgatctagtgcttgtagtgattctaacatgggattttgaatctataagtttaaataaataatgttcagccgctatttgaggggatgattggagagcaaatatatcatttttcggtatatttgcaaaattgttcggcaatatggctttgtctggatggttttgtcagttgtaaatgaatagattacgaattacaaatcggcagatgccggattttttaattttgatgagtttatggtaatatttccgaatgcaaagattaatatagggttgttcgtcacggagaagagatcggatgggtttcataacctggaaactgttttttatccgattgatcttcgggatatattggaaatcactgagatgaagggagagaaagggcgttgcgtttttacttccacgggaatcccgatagattgcccgccggaaaaaaatttggtgagcaaggcatacgctattctggctgccgagtacgatttgccctcggtggatgtgcatttgcataagatcataccatacggtgccggactgggtggtggctctgccgatgccgcttttatgctggttgggttgaatcagcttttttccttggggttgaacgaggaacaattaatgggatatgcggcccgggtgggcagtgattgtccttttttcgttttgaatcatcccgtgtttgcttttgggaaaggcgagttgatggaatcgatagatttgtcattaaaggactatcatatggtactcgtgaaaccgaatcggggagtttctactcccgaggcataccggggaataacgcctcgtgcagcctcttttgatttgcgagaattgggaaaattgccggtagagcaatggaccggggtgattgtgaatgattttgaagattccgtgattcctaaagtcccggagatagaagaagtaaagaatatattacgggatttgggtgcgatttatgtttccatgactggaagtggatcagccgtttacggattgttccgtcatcccgtggaggtagaaaaggcgtttccggaatatttcgtgtggcaaagcgagtgaatgagtttataaagtcgaaggttcatagagtccataaggttcgtagacctctgcggggtgctttgttaatggtagtttgtgctaccgttaaatataaaacaactctcctctccagctcccccttacacagggggagttagaggagatagttgttttaccctcttcctacaaaggtgtatataaatgaggatattccggcgaagatgaagctaagaccggtccagatgatgatgttaaatattccgaatagggggtaaaagacgatcatgaaggaaaagaacaaggtgatgattcctgcgatgaatatccatccccagcctctgatttttagtgatgacatctgtaatgattcggcaatgtaatcaatgcttttgaacatgagaataaagccgacgatgtaaggaagtatgtcttctgtgatgatcgggtggatcaataggataaaaccgataatcaggtcaagtaacccgatgaacaatccccatccccaatgccgggagttaccgcctgcaaaagcgttcatgatttcactgattccgataacaatgataacgatactgaaatacatggccagtccgaagtaggaagccaccgggtgccggataataccaatgccaaatacgaataacacgatacctagaatgaggtataaccatctgaatcccttggggccagtagatgttgttgcacttgttgtagtcatttctctgatattttttaagtttagtttatttctttatatgtgaaatgcattcaaaaagttgttatattgtcattaaaaataaataaccaaatgccgggaaatacgtttcagagtataaaaaagcgatgatgagaaaaattatattattcttgatgttgtttttagtaaactacatgattatggcacaaaagaaagagttgacagcggatgaaaaacaagtgattatttataaggggacggagaggcctttcacgggtaaatattatgatttcaaggcgaaagggacatacgtttgcaagcaatgcgggactccgctttatcgttcagaagataagtttgattcccggtgcggatggccgagttttgatgatgagatttcgggagcggtgaaacgggttccggatgctgatgggaggcggacagagattgtctgcgctcactgtggggctcacttggggcacgtgttcatgggggagggttttaccccgaagaatacccgtcattgtgtgaattcgatctcgatggaatttgttcccgcggaagaattgaaaatagacacggctatttttgccgggggatgtttttggggtgtggagtattacatgaaaaaggctcccggggtgcttgccgttgagtccggatacattggtgggaaagttgaggacccgtcttacgaggaagtatgtgagggaaacacgggacacgtggaggcggtacgagtgttgtttgatatatcgaagaccgattacgagacgttggcaaagttatttttcgaaatacatgatcccacgcaaaaagatcaccaaggaccggattacggagaacaataccgttcggaaatattctataatagtccggaacagaaggccgtggctgaaaagctgatacaggagttaaaagtgaaaggctatgcggtagtgacccggttagctccggctacaacattttgggtggcagaggattatcaccagaattactatactaggaaagggactttgccttattgtcatggatatacgaggcgattttgaaaaaatcatgtacctttgtttggataaatatttcaaaggataacagagaatttatttatataaaagaaaggaattgaatcatgaaaattgcagtaccaacaagagaaaatgttgttgatgatcattttggacattgcgcatattacacgctgttcacggtagatgacgataaaaatatcacggatacagaaacgcttccttctccacaaggatgcggttgtaaatcgaatattgcttcagtgttgaaagaaaaaggggttaccgtgatgcttgcaggtagcatgggtgacggtgctttaaaggtattaagtgatcagggaattaaagttttccgtggttgtaaaggggatgtccggaaaatagcggaaggttatttaaaagggtttatcctggattccggcatcggttgccaccatcatcacgaaggggaagaacaccagtgtagtcatcataaagagtaagggaaaccccttactctttgtttattttgacaagaactttgtcgattcgagcggcatccatgtccacgatttcaaactcgaagttataccaggtcaatttctctccggtctggggaatatgttccaaaatctttaagatcagtccacttaacgtgttgtagtaatggttcgcataaagacattccatatcaaaataggccaagaaatcatagaaaggacattggccgtccacgagataagtaccatcttcccgttgcacgatgtccggctcttctccaagctccggcaggtctccgatcaaggcttttagaatatcctgtaacgtgacgattccttcgatacttccgaattcatccgtgaccaatccatattttgtgtgtccttgtttcaagtgttccatggcgttatacacgctttgattctggggaaaatactgaggtgggcgaacgatggattttagattaaaatccggggtatccattcttccaaaaaggtctttcaggaaaacaaccccgacgatattatccaatttcgtgtcagccaccgggtaaatagtgtgaagatgtgcgtttaccgtttcccgtagtgtttcgttactatcttgtatgttcaaccagatgagatcactccggtgtgtcatgatggagccgagatcccggtcaccgagattaaacacccgttccacgatgtcttgctccacttcttgaatctcaccttcggcggtactttcttggatgattgctttaatttcctcttccgtgattttgttctctcccgatttgttcaatcccaatagtctcatcatgaatgacgtgctggcagagagtaaccacacgaaaggtgaggctatacgggaaagaatatccatcggggcggcaattagttttgccattctttccgcggcgaccattcctatgcgtttgggtacgagttccccgaaaatcagcgtgagataagtcacgacgattacgataagcgttttggatattagtaatgcgtgaggttgtaacacctctattttttctacccatactgccaagtctccagcgagggcttgtccggagtaaagaccggtaaggataccgattaacgtgatcccgatctgtatggtcgaaaggaatcgatccggttgatttgctaattttaatgctctttgtgcggatttgttcccgcttttggcttctgtttcaagacgggatttacgggcagaaaccatcgctatttcagacatggcgagtaccccgtttaaaatgataagtcctatgatgattagaaattccatatattaattttaaattttaaattttagattccagccgcccaaagtcagcgctttagctaccccctttaactcccccttgcacagggggaggaaacgctacaatgtaacattgaaacgtcttcttgcgtccgttgcttcaccggtgtaagggggagccagagggggtagttttttccattctgaattctaaattttaaattttacattactctaaattttctcaacttttaattgtctcggtcttatgattaggagtgagggtaattttgcaaaaagttcctgatcttttgacagcttttcgcaagtggtataactcatcactaataaggtttctttattttcaataaaagtgttcatggttaatggtttgtctagtacgaatttgtttgaatcgatttgaacgaaatcattcatgattctggattttagttgtttatccacctgttcgttgataaagcaaattcggatggtcatgctttgttcgcccaaccgggttctggcgtaattgaagagaaacaagtcgtcttcactatcaacgagaagtaagatatgggaagcctgcgtgaaacctctgttcacgaagattcccacggaacaatccacgtgatccatgatagattccagtttttgccggagtagcgttcccggtaaatgtaacgggcgatcttttaattgtttcagccagcgggaaatcgtggtgaatcttttacccagttttccgggggccgtgctattgtcctgcatgaattgttgccctgctccgacgaacaggtagtccacgtgttctttcttggccacgtgaaccatttcctgaattagtttgtcggttacttgataacgttcgtctacctgtaaattcagatggcgagcctcttcccgaagggggataaaactctcttcagcaaattcttccgctttggtaggatttaagtctgttcccaacgtgaagtgcgtggcaataagttgactgttttgcagccgatgtcctagtaaaagatcagccatacccagtaaggttctaccggtttcgggacgaccaaaggagagcaacactttctcgtggtgatgggctttttcctcttgtttggcaaatatcttttccacgagcgacaacatgggggttgccatgaacgtggtcaataaagacatgatcaataataccacgaacatttgggcagaaagaattcccatctcgaacccgatgtttagggccacgagttgcatgagtccccgtgtgttcatcagcgtgccgacgataagactatctttccagttttcgcccacagcccgtgctgccagcgtacaccctccaaactttccggcaatggctaccacgatgaacagtaagcacacaccccatagctccggcgtgttaatcaaaccgatttccgtgtgtaatccagaaaaggcaaagaataggggaagaaagaataccaaagaaatgtcttccaccttttccatcatgactttacggaacccgatgttcgtgggcataaccaccccggcgataaatgccccgaaaagggcatgaataccaatgatttctgttgctaccgacgaaagtaccagaaacaagaatatgaatcccacgaaggtcttgttgatgacttccgagttggcataaatatccccgattttacgcagaaacggacgcatgaccataaacatgaaggcgatatagacgagcgttaaggcaatggtgtagagggcgctgacgaaactacccgctttagctaaggcgattacgatggccagtaaacaccatgcggtgacgtcatcattggctgccgaggctatggataacattccgacagggctctttgtcatgttacgttcctgcacgattcgggccaacacggggaaggccgtgatactcatgcttatcccgatgaacatggcaaaaggtaaaaattccgcttgttgtgccccgtagtcagcgtatacccagatggcagctaccactcccaggaaaaaaggaaccacgattccggcatgactgatgaccagagtttcgtttagtttgtcttttatgacactgaaatctaactctagtccgatgacaaacataaacagaactaacccgatctggcttaataggttcaagttcatcagtgattcaggagggaatagtgcggcagagaattccggaaagaaatatcccagcaacgaaggtcccaagacgattccggccacgatttcacccataacaccgggttgcccgatgtatttgaaaaggaacgagaaaatacggacggtgatcaaaatcacgatgatttgtaacaacaagatcgttagtgagtttgtcaggttgtcggaaatgattcgtttgaatagttcaaatgaactcatttccgtgtttaccgtactactgacttctgaatgatcgatatgttgacccgtacaaagtgcaaagtaaatcaaagcacagaagacggtcatcatgccgagatatatccagtagtttgtgctattccttttcatgatcctcaatgatttttacactactttctgtttttcattcgtttgaacgcccggaatatttctcccacccaaagtacaagagacgtggcgagcgtgatccagatccattcgacccaagtcaatgggatggtcctgaaaacggaaccaccgaagttgactacgagtatctgtcccacgataattgccattcccacggtgaggaaaccttcgcttttgaatatatttttaaaggcggaatcatttgttccgaaagtctttgcattaaacatgttccagaactgtaacatcacgaataccgtgaagaagatcgtcaggttacgaagtccttccggtgttccggcctcaatacctccggcataattggagagtacatatagcaagccgagtaggataaccatgaacgtgattccggtggctaatatcagtctctgcatttgagggacgatgataaaggcattcgaatttctcggttttcgtttcatcacttccgggctaggcgggagtgaggctaaagccccggcggcaaacgtgtccatgatgaggtttacccacaacatctgtgttaccgtgatgggaagttccgagccgaacaaagagcctagtaatacaataatcaaggctgccacgttaatggtaagctggaacaagataaatcgttgaatattttgatatacagaacgtccccacatcacggcagaggttatactactgaatgagtcatctagcaaggtgatgtcactggcctctttagccacggaggttccgctacccatggatagacccacgtgtgcatgattcaaggcgggggcgtcgttcgtcccgtccccagtaacggccacgatggcttgtttttgttgtagcaattgaacgaggcgttgtttgtccatcgggcgggctcgggacatgatttttaaatccagtacccgatccaaggcctctttatcggttaattgtgcaaattcaactccagtgatcacgttccgatcggtatctttttctgtccacagaccgatttgtcttccgatctcttttgccgtacccggtgtatctcccgtcaccatttttacttgtattccggcatcaaaacagcgttttaccgcgtccggtacatccgggcggatcgggtcagaaattgctacgataccaaggaaggttaattcggtgttgtataagcgtccgtctttaaaatgcgattcattatcctcgatgacttggtaagcaaaacccagtgtccgcatggcttgattttggtattccagcaattggttctccacggtcgttttgtaattggcgatcggttgcccttccccgtcgatcaatgcgttcttacattgagcgaagatgatttcgggagctcctttcacgtatagaatcttttttcccatgacgggagagtcaaccaatgtggccatgtatttccgttccgtggaaaaggttaactggtcgatcaccgtggcattttcccggagttcttggtaatttgcttgttgtccgtttagccagagtaacaaggcagcctcggtcgggttgcctaaggttttcactttgtccggatcggaaaagtcgaggaatgcagttgtattcacggcaataccctcttttatcagtcgggaattctcgttatcagctagttgttgatctttcagaccgtagaagttggttttgtacacggtcatctggttttgggtcagggttcccgttttatccgtacaaataacggttgtagcacccatcgtttcgcaagcatgcattttgcgaacgagattattggattttagcattttacgcatactgagggccaaactcaaagtgacgctcatcggaagaccttccggaaccgtcaccacgatcagggtaacggaagccatgaatgccgacaggattttttttcctaggcttaacgaaatccacgcttgcgggtcccaaggtttaaccccgaaagcccaaccaatggcgagcatgataaccaatgctcccaacccgtataaaatccagcgagcccaactgccttgttctatgcttttggggagttctttttcttttccccgtaatgcatgaacatcgtatatgacaggcacccatactttggcaagcatgatgattgccgtgataatcagtgccccgatcaatccgagttgtcctaactccggggtcggggatgccgggttaaagaagatggctttaatgaataggatggtaaacgtgaccgcggcaccgcagaatcccacgaccccgatgaattttgccagcgaatcgagctgtttgtcaagtggggtaggttcttcgcttttttccgaagatttttctgccacttttccgaattccgtggcgtctcccacggcaagtacctgcatgatcccgtgaccgtcggaaacggttgttcctctcatcacgtggttggaagggtaggtggcttccaagttgaattctgattcgatcacggttttattggcgattggttctccggttaaactggattcgttcacctgtaaggagattgcttcgagaagtatcccgtcggcgggaatctcttctccttgctccaaaagcacaatatcatccacgacaatatcttttttagggacttcatgtacattaccgttgcggataactttgatcaacgtgtcgtcattcacttgattcagcacgtcgaatttcttgtttgcatcccatacaaaccaggtggcgaccccggtcgcgagtaagatggccacggcaataccaatggtttccgcgatctcgatgattccttccgagaaatacatggagatggcgatacctcccgaaaggaataccgcaaccattaatatgcgaatgacgggatcttcaaagttcccgataaaaatctgccataaagagtcccttttagggggagttaacacgttggccccgtgtttttcacgactttccagtacttgtttatccgtgaggcccgtgtagtgtttacgtgattccatgttataatttaagatttaattattttttttacgtgttgaccgaataataagatacgtgaaaaagccaattccgacgattaacattacgatggaaatctcggtgaaatacttttccagtaactcttttcgggaatataaaaaatatccgacggtagccagtatcaagttccagataccacttccggcagccgtgtaaaatataaagctgtttaaaggcattttgactaatccggccggaagggaaataaagcttcttacccccggggtaagtcttccgaccagcgtggagcttttgccgtatttcaaaaaatattgttcggatttttctactttttctttggacatccgcaaaatctttccccagcgtgattccgcgaaagaataaatgaatttacgccctaacgtgtatgctaacacgtagttgaagagggcgcctagaaccgatccgattgtgctgaaaataactaccagcaggaaattgagatccccgtttgcagctttccaggctgcaggaggcacgatcaattccgccggaaagggaatgatggaactctcaatggtcatacatacgagaacactccagtagttcacgttctgcatataccaatcgagaatagattgaagccaatcgatcatatgttgtttctaaatttttaatgtttttatttgctctcacttgttataattatcgttatggttttgtcataacaacaatactttcagcgagtagatataaaaaccttgactatgtcgggtggtcagatattggataaagtgccgttcttttttggctaaagacaattttatcggaatattttttccactctgcatattgtgatgcgaatacacgtttgttttaggagttttattgaacccgaaacgtcgtccgtgggaagttgcgattccttcgtcggaacccaaatgaaggcctcgtgagagagtgtcgtagcaatgggcaatctcatccgattcggatagttgttctgtttgtgtaggcaatgctatctcgtcctcgttttcctcagtctgtagtccattgactatgagtagtaaagaaaaaatgaagatagatatatatacaaaaaacagccttttcattataaaattatttacaggctcaaaagtaatatatttttggatatatatccagtctcgtttacgctttttcttatcaataaatccattttattgcgtacctttgcggggaatcagaaatattcggatcatgacggtaaaaatgatattagcttgtatcgtggctctcttggcgttggtaaacccggtacagaaagttttaattgttacttcgttgcaggagaggtttagtcctaaagaacttcggtatatatctattaaatcatctattactgccgcgttgattctgatcttttttcttttcttgggaga

SEQ ID NO: 10711 - DNA, 33580 bp, Unknown
  gut microbiota DNA sequence
gacattaaattttttctctttagagtcgctaagatttttgcatgaaaagaatgaaattcaaaacaagaagaacacgaactccacctaatttttcacgtgagcccagaaaaaaagacggttccgcctgtcccgttgtcttacactccaaagatgtgagagtgcattaacactctctacgtaatttgggaattatatacgattttgcagtaaaaagaaaaaatcgttgttttatgctcaaattctttcatcaccccgtgccaagtgagcctgaaacggtctcggattggctacgttcgacagataacgagcaagcaagctttctatctgtcctcacttgatcacctttatgagttgatatggtgtagtttcctgaaatcgagtaaacccatttcaggaaactgcactggaacttgatggggtggtcacgggagactagggtgaggattagactgggagattgtaaataaaatagagagaaattaacaggaatgtcatttttttgaaggtgataaatattatttttgtaagagttataaaactaagcacgatgatggagaagacagtttattttttgggggcgggtttttctaaagaagcgggaggtttggttcaaaacgaaatcatcaagaccattctggatgaggattttacacgggataacgagcgcttgattaaagctaagaataactttattggctttctgaaggaagagttacatatttacgaggatcactattgtagcgtgcaattagaggatatattcacgccaatagatcgttgtgtctgggatggactttctattggtcgttacagtgctaggggattggtggagttacgggaggagtttaatgcgctgatgggagctgcggtgaattacagtttccagaaaaaccgggcttgctgtgattatatagatgagtttgcggaatatataaatcaggttgcccggcagcgtatggaggacgggatggatcgggtggcggtgattacgacgaattgggatgtaatgtttgaccatgccttgaaacgggccatcgaaaacgggcacccggagaagttgagcgtggtggattattgttgctacgtgagttcgtgggaggcaaatgacgacacgattaaaccggggctacttgccgtggggtatggtgggtacaatattaaattgctgaagttacacgggtcgatgaactggtttcaatgtcccatgtgccagcgtatgtacgtccggtttggcgaggagatcgagatcatgaaggctgcgtattgtcggcactgccgaaagaattatggtatgtcggagattaattcgatcaagttacaaagcaatttgttgttacctacctatttaaagaatctgagtaatatccagattaaattggtctggcagaatgccgcgattgaactgtcggaggcaacgagaatcgtgtttatcggttattctttgccgtctgccgatttcgagatcaggcaattattggcgaggatgattcgtccggatgcagaaatacaggtagttctttatccagataatcctcatgtggaggcggaagcggagcgataccgaaattttttcggtagtcggatttcagaacaggatatcatgcggttgacggtaccggaatacgtggggaagttaaaagaaatttagaatttagaatttaaaatttaaaataaaagtggtatttatactctattatggtaggtctggatgctttatttttgtatgtataaagaaatgtacaattcaaggaaagaatttatgacaagttatcatttagagtcagcatgttgcgggactacttttgaggataaagagtgggagttggaatgtccccataaggatggtgcggctttgatctatgcaaattatgcaaaacgtcaatttgaagtgagaaatgatttgtccggtatttacaggtatgcgaattggatgcctatttgccggacgctggaaggttccggggctcctgtgacttacaagagcgaggggctggccgagtatctgggcctgtctaatttgtacataacgtttaacggttattggccggaacggaatgccatgatgaagaccggatctttcaaggagtgtgaagcatattctgtatgtgcacgaaataacgcttttaatgacaagattatggtggtggcttctgccggaaatacggcgagggccttcgggcgtgtatgttcagagaatcatataccgttgttattgtgtgtgccggaagataatttggaggcaatttgggcagatgggccgtggaatgattgtgtgaaattggtttgtgcggcttcgggatgtgattattttgatgcgattcatctatctaatattatatgcgagatggagtttttctatcctgaaggtggggctaagaacgtggctcgtcgtgacgggatgggaacaaccgtgttgtcagccgtggaaacaatcggtcgtatcccggattattatttccaagctgtgggtagcggaacgggagcgattgcggcatgggaggctaacaaacgatttattgccgatgggcgtttcggttcgcattttatgaaattgatggtttctcaaaacgcaccgtttacgttgatgtatgatgcatggaaagcggggtcccggactttgttggcattggatgagaatatggctagggagcaagtgaaagagatgtgcgccaaggtgttgtcaaatcgtaaacctccttactctttgaagggagggttgtatgatgcgttggtggcaacggggggagatatgtttctggcaacgaacgaagagacgatggaggctaaggtgttgttcgagcagttggaaggaattgatattgaaccagcggcggcggttgctttggccagtttgatgcaatgtgttcgggagagacgggtagaggaggatgccgtgatcatgttgaatatcacgggaggaggaattgcccgttataaaaaagaatttaatccggtgatgcagaagcctgatttggtgttcccggtaaatccgaacccggagatggtaaaggagaaagtgagagagttgatcggaaagtaaaaaatatatcaaaaaccccgtaacgaaagttgcggggtttttcgtacctttgaaattcgaatattttcaaagaaaagggatatgaatagactgaaagagcacaaagggataaatttgttgcttcgatataaaaaagaaatactccgtcgtatggattgcctgctggatttggactatcattatatggtgttgcgcagggattacgggaatcgtttcgtgatcacggagttcttgcaaaaagcattatccatcgtggtggtttcttttaatcgttttatcaaggatgcgtgtacgatttcggcgtcggcactcacgttttattctatcctgtcgtttatcccgttgatggcgttggctttcgctttagctgccgggtttggtgcccgcgaagcgttggagaaagagtttatgatacagttgggggataaccaggagttcgccggacagttgttggggtatgtctcgaaggcgattgaccatgctaagggcggggtgatcacgggggtcggtatcgtgattttattgtggtcggtgatcaaggtgctgaatagtaccgaaatgacgatgaatcgtatctggggggtacgcaaggggaggagtttacggcggatgttcacggattatttttcgattatctttatagccccgatcctgatgattctcgtgagtagtctgaatttgttcatgacaagttccggttggcaggagaatttcccgttaatcagttctttcttgcaaattgtgatcaaattactgccttatatgctggtgtggatgttgtttattttcctgtatatgttcatgccagcgaccccagtgaagttcaagcacgctttcgtggcggcgatgattgccgggacggtttaccagatcattcagtggttttatattcgtttccagataggcatgagttcttatagtgccatatatggtacgctggctgccttgccgttgttgctggtgtggttgcagttaagctggagtgtcgtgttgtggggtacggaattgtgttatattctccgaaacaggcacttcatgtacaagaacgaattgttcggggatacggcttggatggagacattggaatgtgcgctgaaggtcatgaagtttgtggctagagtgtacgtgaagaacggagagggtggtccgagtctggggatgatcaacaaggagttgaagattaacaccggaaagttgcgtatcgtgttgcaagagctggtggatttgcatattctggtggaggcgaaggaagaggatgattatttctattatccggcctttgatctgcataccatgtcggtgggagatattatcgttcgtttttcgagagtggatgaaagtcgggatgagatttggaaaaaacaattcaagaaaaccgtgttgtccggttttgcaggcgatcggttgattgtggattctggggctcagcaataacgggaatgcttgcgttttaaagtctcgttttttcttgtatatctggtaaaacttttatatattgtcgagcaaattgaaatgaagtatgaggaaaagaatcgatttagagtacattttctcatcgtcggtaacaatattgttctcccgtctaagttctgctcccggtttggcggagtggttttccgatgatgtgaaacatgatggaaatatcttcacgtttgtgtgggatggtattggtgaagaagcggagttagtggatatgaagaaaaattcttacgtgcgcttcaagtggctggatgcggacgatgcggacgaattttttgaattttcgctccacgtagagcctttgacggaggaggtcgctttgatcatcacagatttcgtggatgctgatgaagagggggatgccattgaattatggaataaacaggtcgaaatgttacatcgcacggtgggtggataaagtttttttctatctttgtgaattcgtttatcacgagtaaagtagaaaataagaaaaccaatataaggtgctaaagatgaagaagctccacctgtttatgcttaaaagttttgtcggtccttttgtggccaccttttttattagtatgttcgttttgatcatgcagttcttgtggcgatatattgatgatttggtgggaaaaggattggaaggccatgttatttcagaattacttttttacgtgtcattgactctcgtgccgatgggtttaccattggccgtgttgttggcctccatcatgacgtttggtagtttgggggagaattacgaattaacggcgttgaaagcggcaggtatttccctgtaccggattatgaaaccgttgatcgtgctgatcattattttcacgattgcggctttctttttttccaacaatgttcttccttacgctaacttgaaggcgagtagcttattgtacgatataaaacgacagaaaccggaattatccttgaaggagggagtgtttatcaatgatatagaggggtatagtattaaggtggataagatcgacaagaagtcgggtatgatgtacaagatgttgatttacaaccatacggatagaaaaggtaattatgagatgacaattgcggattccggtatcatggaggcagacccgacgggacgttttatggaggtggaattgtatcacggttacacgtacacggacgaggggttgaagtcgaataataataaaacctatcctttccggcgagtgcagtttgacaagcagtattttgttatcccgttaggtgataaggatttgcagcgtacggatgaagacttgttcaagaatagttacgggatgttaaatattgcccagttggatagtacggtttcggccctgtctctacgattggatagccggaaacaaaggaaagcgcacgatatgctccgggagaattacgtgaggaaacaggagagaaaccccaagcgggatagcgtgattcgtgaagagacgagaggggttgtcaagaatctggatagtctttaccagacttttgacgtggaggaacgaaaaaacacgattgaccaagccgtgcagcttgcccggggggctcaaacgagtcacatgaatgatttatctatcaataaacgggacgaagaggccgttcgtaaatataatatcgaatggcatagaaagtttaccttgtcatttgcctgttttattttcttctttatcggtgccccgctggggggtattatccgtaaaggaggattgggggccccggtagtggtttcgattttcctgtttatcgtgtattatattatctggatgatgggggaacgagcggctcgggaaggggtactggaaccttggcagggcatgtggatttcttccgtgatcctgttgccattgggtgctatattgacttacacggccatgacggattcggctgtcatgagtagtgaatcgtatactaatttcatcaagaagatcatcggtttctttaaaaaaaaagataaaaatgcgtgaattgagaatcgtgtatatgggaacaccggattttgcggtgtatccgttacagaagttgctggaggccggacacaaggtcgtggctgtcgtgaccaatccggataaaccggcggggaggggacaaaagattcaagagtctcccgtgaagaagtttgccgtggagaaggggattcccgtgttgcagccggagcgtttccgggatgaacggtttttagaggagttgagggcttttcaagcggatttgcagctcgtggtggcattcaagatgttgccggaggtggtttggaatatgcccccgttgggaacggttaatttgcacgcttctctgttgccggattaccggggagcggccccgataaactgggcagtaatgaacggggagacttgtagcggggtgacgacttttcttttgaaacacgagattgataccgggaatttgattttccaagagcgggtggagattgagccgaacatgacggccggggagttgcacgatcaattgatgtacacgggtgccgatttgctggtaaagacggtggaagccatagctgccggggattacccgttgctggatcaggtagggttgctggccgggcgtgaaccgaaacatgcgcctaaaatattcaaggaggatatgaaggtggattggacacttggggtggacgctatttttaatcatatacgaggactttcaccttttccgacggcgtggaccgagtttcgaaacaagaagaacggggaagtcgtgtcgttgaaaatttttgagacagagcgaatcgtgaaagatcatgggaaagacgttggtttatcaacggataataaaacttacctggacgtgttggtagaggggggagtcattcggataaaagagttgcagttgtccgggaaaaagcggatgaagacggaagagttcttgcggggatttcatatagaggattactctttgtaatcaatttactatgcgtgtcaggcgagaaactatgcgaagaccgatccttaggttagggttcgggggaagtgtgttactcgctttggtgattgggtggtggtattttctatcaaccccgttgtttactgtaccttattccacggtgattttggataaggagggggagattatgggtatgacggtagcgagtgacgggcagtaccgggtgtcgggcagggggcgcctttccatgaagtatatggccgctttactatgtttcgaggataagcggtttttgactcactccggggtggacccgttggcgataggacgggcgttgtggttgaacgtgcggagtggttcggtcgtgagtggcgggagtacgttgacgatgcaggtaattcggctgtcacgtgacaacccgccccggacgattccggagaagatattggaaatgttgctggcgattcgtctggaacagagttacacgaaatgggagattctgaatatgtacgtggaccacgccccctttggtgggaatatcgtgggaatacaggctgcatcactaaagtattttaatcgtcagccggatgaattgagctgggccgaggcggcattgcttgccgtgttgcccaatgccccggctttgatgtacccgggaaagaatatgcccggtctgaaaggaaagcgggatgctctgttgtgtgaactttatgaacagggatattttgagcaaggggatctggaaatggcgatggcggaacctttaccggaacaggtgtatagtccggagtgtatcgcacctcatttgctggcaagagcttacgggcagcgtcgtggagagatcagccagacgtttattgattcccggttgcaggagcaggtgaatgggattgtgaggcggcatattgatgtgttgaaacacaatcatatctataatgctgccgtgttggtagcgcatatcccgaccgggcaagtacgggcttatgtgggaaacgggccaaaggtgcgtgatgacgggggcaatcaagtggatattatcacttcgaatcgtagttcggggagtattttgaaaccagctttgtacgcattgatgcagcaatccgggtatatcttgccggggacgatcgtgtcggacgtgccgtcccgtttcgggggatatgtcccctcgaattttaacaaggatttccaagggattgtccctgccgataaggcgttgtcaatgtctctgaatattcctttcgtgcgcttgttgcgggagtacggggtggagcatttctatgatgatttgaaaaagatggggatcacgacattaaatcggaaggcggagaattacgggttaagtttgattttgggaggagccgagtgtaagttgtgggatttgtgcaatatgtacggggggatggcttcaattttgaggcaatataccgagtgtgacgggactagttttaaccacgagtttcgacgtttacgactttggacggatgaacaggtggatagtgtcgtggtgcagaataacgtggttaacgctgccgcagtatggcttactctcaaagctttgcaggacgtggaacggccggacctggagtcgggatggaagaattttgcttcttcgatgaatctttcctggaagacgggaacgagttttggcttccgggatgcttgggcggtaggggtgaatccggaatacgtgatcggggtgtgggttggtaatgcggatggcgagggacgtcccggactgatcggggtacgggctgcggctccgattttgtttgaggtggcctctttggtgaggacagatgcccgtttttacatgccgaaggaggagttatctgcggttgccgtttgtcgtaagagtgggtatcgggcatcttctatatgtccggagacggatactatttacgtggctcgatccggggaaaaaacagaggtttgtccttaccatcgattagtgaatcttgaccggacgggtaaatttcgggtggattcggaatgtgaatccgtatcacgcatgaggatagaaccttggttcgtgctgtctcccgtgcaggagtggtattatgcccgcacacattcggattacaagaaattgccgccttatcgtgtcgattgccagcgggggcaggatgatgtgatggaaatgatttacccgcagcgaggattgcgggtgtttattcccaaagatttagggggagtggtacgtggtgttgtgtttgaaatggctcatcgagagccttccacgttggtgtactggcatattgacgatcaatttctgggaacaacccgttatcatcaccaattagaggtgaacgtagcccccggacgacatacgctttatctcgtggatgcgaaggggaattcgctacggcagagttttgttgtcgtggatggggaaaaggattataaatgagttaatgcttgccgggttttaggaaatcatttttgctgatcttggtgtgatgtttttctttgtctccggattttacgacaatagttaccgaatctttccattgctgaaggtttacaagtgatgaaatatcacatgaaacggtttcgtagtcggtctgagtttttgaccaatcatcgggagtattcgggttgtagtaaagttgtaatttcagtgaatcctgagtttgttcttgaggatcatatactaaactgattttaccttgaattttctctccggttatcgagttaaatgtggaaaaacctgcatgtagatcgaaataaccacggtagccatagcctatacccaataatgagggtaattgacaattctcggcaacgtttgtgtcattagcttcctcttggctaatcgggtgaattacctcgtattttgaccacgtgacgacatgggcattgttgataaacttttcaccgttcgtggaggtttcccagtcttcctcgttataataaaagctgaaataacctctttccgcatcagcgagatttttgtcatatgagattaccagtcccccaccatccaggtagcaatagaaaccgtttgttgtgtccccgataattgtggcagtactcataaagcctcttgagccgtcatctttgttgtcattgcaactagagcctattattaggcatataaatagggtaatgattactggtaaattcttattcatacataattgattataatacagcaaatatagcaaaaatgcactgcgagagtgcatttttatctgaattttgcactatgagagtgcatttccttcaatgaatattttatgaatacttctattatttcctgttcacgtctctggaactagcctgagcggtaggcataatttggatgtcgttcaagcagatatgagccgggcgtgtcacggtaaacacgatcgtgtcggcgatgtcttctcccgtgagaggggtaacacccttgtacacgttgtctgcggcttgttggtcacctttgtaacgcactacggagaattcggtttcgaccattcccggagcgatgttggttaccttgatgttgtgtttcaacatatcgatgcgcatggctttagaaagggcatccacggcgtgtttggtggcacagtatacattcccaccaggataaacttccttgcctgccacggaggcgatgttgacgatatgtcctttttcatttttgatcatcaaaggggctacttcatgggtgatgtaaagaaggcctttcacattggtgtcgatcatgcgttcccaatcatccaaaatcccatcttgaataggagaagttcccacggcaagacctgcattattgactagaatatctatatttttccactctgtcggtaggttgctgattgcgttgtgaacttcctcttggttacgaacatcgaattgaagagccaatactttaatgccttttgcctttaattcatcttccagtgcagctagacggtcgccccggcgtccggtgatgatgatgttatatccgatttcggccaacttggttgctgtagcctttccgataccggaagtggcccctgtgattaatgctatcttgttcattgtaattattgtttaaatctgtcgtgcgaaggtatgatttttttcttattttcgcacgaaataatagtttcaagttacaggttgcaacttgcaggtttgtttccggacgaatagcttttgagcttgtaacttgtaacctgtaaccagtaacgtggcaaagccaccatattatgtataaagagatagaattgaggattacgccggaagaggcacatgatcgggagattgtcaatgagctgttggcaaggatgttgcacgtagatcaggagagaatcgtgcatgtggagattttgcgaaaatcgatagatgcccgtcaacgcagggttgttattcaactgaaagttggtgttcatctggatcgggtggaacagaaagaacgagtatttgtaccccaataccgggatgtttcgtctgccgggacggttgtcgtggtgggtgccggaccggccggtttatttgcggctttacgcttgatagagttggggaaaagaccgatagttttggagagagggaaatgcgtggaagagcggaaacaggatctgaatcgtttgtacaaaaccggggtggcgaatgaagattcgaattacggtttcggggaaggaggggccgggacgttctcggatggtaaattgtttactcgctcgaagaaacgggggaacgtggatcgtattttggaaatcttggtctatcacggggcgaatcctaatatattgattgatgcacacccgcatatcggtacggataaattaccccaagtaattgtgaatatgcgtaagaccattgaaaaatatggtggagaagtacgttttaatagtcgggtgagagatattattatagagcagaaccgggtgaaaggagttgtgacgggtgatcaggagattcgggcagaacacgttattcttgccacggggcattctgcacgtgacgtgtaccggatgttacaggctcggtccgtgttgatgcaaccgaaggattttgccgtggggcttcgactggaacatccgcaagaattgatagaccggattcagtaccataacccgcaagggcggggagattttctacctgctgccgagtatagtttcgtgacgaatatggatgggcgaggggtatactcattttgtatgtgccccgggggagtggtcgttccggcttgcacgggacccgaacaacaagtggtgaatggtatgtctgcatctggtagaaacacggcatgggcaaattcggctatggtaacctcgatcggggagagtgaattgaatgggatgaggtacaagggattatttgccggattggaatttcaagaggatttagagcgggcgtcttgggaacagggtggaaagaacttgtatgctccggctcaacgattaactcattttctgagaggacatttaagtgaaaatttaccaaaaagttcttataaaccgggagtacaggcaacctcttttcaagaatggttacccgaggtcgtttaccagcgtcttcgtggagggttggagcaatttgggaaaaaggcccgagggttcatcacggagaatgcccttctgttgggcgtggagagccggacttcttctccattgagaataccgagggagaccgaaaagatggtgcatcctgaaattgtcgggttatacccttgcggggaaggagccggatatgccgggggaattgtctcggccgcgatggatggagaaggctgtgcagaggcaatttgttaagaaacaagaagggcctgattggttataaccgaatgtgttaaagtgactttgtttttttgataaaaaatttgcattgatcaagaaaatatctacatttgcgaatgtataaagaatttattagttctaatcctaaaactgtctattatgaataaagctcaattaattgacgcaattgctgaaaaagctggtttgacaaaagcagattctaaaaaagcattagaggcttttgtagctacgatcggagaatctttgaaaaaagatgaaaaagtagcattggttggtttcggatctttttctgtatctgaaagaagcgcaagagcaggtagaaatccgcaaaccgggaaaacaatccaaattccggcaaagaaggtggtgagatttaaagctggtgctgaattagaaggccaactataattaccatttaagagatttaaaagggggtgttttgaggacaccctttttttgttcatcgacaagttgtaggtttttcagttgcaagttgcgaaaaacggagaaaaatgaacttgtaacttgcaaacttgtaacttttaacgtgacgaagtcaccttaaaatagcattatgcatactgtaaaagaacaggttgagtatcttagagagtttgtgacggactataaaaatgacttgttccgtcggttaattgcggaacgaacaagttatgtcacgatggtactcgaagatttttaccagcaacataattgtagtgcagtgttgcgttcgtgcgattgttttggaattcaaaatgtacatgtaattgaaaatacgaattctttcacggataattccgaaatttcgatgggagctgccgattggttgacggttcatcggcaccggaagagagagaataacacggtggagacgatcgagatgttgaaatcacagggataccggatcgtggcaacaactccacatgaacgagatacttttattgatgatattgaccttcacagggggaagatggcttttttcatggggacggagttgacggggttgtcggatgacgtgttgtcgagggctgatgagttcgtgaaagtgcccatgtatggttttacggagagttataacgtgagtgtgtgtgctgctttattaatgtatagcgtggtacagcgtttgcgacagacagatatagattggcatttgccggaggaggaacgctatcaagttttgtttgcttggtacaagcgttcgattaaggcttcggctcagatattggaacgatttaatcataacaagtgagagatgtattatttgaaatgtaaacactgtaatcacctgaacgaggtgaagtccgagtacttagtggtatgtggtttgtgtaaccggaaactggaggataattacaaggattggaaagtgaaacatccggagaagtcgtttgaagactttcagcgagaggtatgcctgacagaagaacaggtgaagaaaggagatacgataaaaccaaccggtaagagagggaataaaaagggggtgattgccgggggaatagggggaatactggtgatgttgatgattttgcttgtaataaaggggatgaaggatagttatgacgagttgtatggagatggtgatactccggtgttggagcagcaatggtacacggggacatacgcgggaggtgcgtctcttgcgacccccaaggcaatgaagtccgtggggaacgtgatgaataaattgcccgaggaggtgcgtcctttggttaaagagatgcaaacttttagttataagggaaacggattggaattcatgtatttatataccgagtacactcctgaagttgggcaggttgatttagagggtgctgtgaatgggggattgaatcagttgaagaatcaacccggggtattcgatttgaaaaatgatattgcttacgtggaggagggtggtttgagcggggtcgttatgcagggaacatacgtgcaaagagggacggaatatgaatttaagattactttatacacgcccggattgaaactttatcaatttatttccagtaataagaaaggagatgacacggctagaggtgttgtgcgtcgaatatatgattcgttgaaaatcagcggacatggaacatcagaaacaggaggtgcagaatgaaagaacaagtgtatttattggaacagtttgacgatataaagatattgcgttacgatgtccccgcttttgagggattgtccttgcgggaaaagttatttgtttattacttgagtcgggcggctttggccggaagagatattctctgggatcagaataataaatataatcttcgggtccgggcggctttggaaagtattcttcgggcatatcaaggaaaccgggagacagaagagtttcaggcttttctggtgtacgctaaaaaagtgttttttgctaatggagtacatcatcattactcgatggaaaagtttaccccttcgtttactcccgaatattttaagtcacttcttcgggaagtgggagcgcaacagttgtatgaggaagtagaacgtgttatctttgatccggaatatatggcgaagcgggtggtactggacgaggggaaggatctggtgcaggcgtctgccaatcattattacgagggggtgacgcaagaagaggtggagaaattctacggggagaagaaaaaagagaatgcgttgctttcttggggattaaattctactctggtacgtgacgagaatggacaactaaaggaacaagtgtggtttgccgggggaaaatacgggaaagaaattcaccgtatcgtggaatatttgaagaaagctgcggaatatgcttgtaatgcgcatcagaaagaggtgatcgagttattgatccagtattacgagacgggtgatttgtccttgtttgaccgctactctattgagtgggtgaaggaggtggcagccccgatagattttatcaacggttttattgaagtgtatggagatccgttagcgtacaaggccagttgggaatccgtggttcagattatggacgaagaggcctgcgagcgtacacgtaaattggcggataatgccatgtggtttgaacggaatgcaccgattgacgagcgttttaagaagagtgaggtggttggtattacggctagagtggtacaggctgccatgctgggtggggattgccatccggcaacaccgatcgggattaatttgccgaatgccgaatggattcgggagcgttatggtagtaagtcggtaacattggataatatcacgtatgcgtacgaccgggcttcactgaattccggggtactggacgagtttgcctattcggacgaggaaaaggaactggtgaggacgtacgggtatgtcgggggaaacgtgcataccgatttgcatgaatgtctgggacacggttccggaaagatgctaccgggcgtgggacaggaatcgctgaaaaattattactccacgatagaagaggctcgtgcggacttgtttgcgttgtattacgtgatggacccgaagctggtggagttgggggtaattccctcgttggaggtagcaaagagcgaatattgtaattatatccgcaacggtttgatggttcagttgacccgggtgaagttgggaaataatttggaagagtcacatatgcgtaatcgccagttgattgcctcttgggtttacgagaagggcaaggcggataacgtgatcgagcgggtgagtcgggatggaaagacgtatttcacgatccgggattacgaggctttgcggaagttgttcgggaggttattggccgaggtgcaacgggtgaagtcggaaggtgatttcgagggagctaggaatttgatcgagaattacggggtacggattgatcccgtgttgcatcaggaagtgctggaacgttatcaaaaactgaacgtggctccttatgccggttttgttaatccgaaatatagattggtggaggaagaagggaaagtgatggatgtaaaaatagaatacccgacagattttctgacacagatgctggaatacggggataataaataatgatgatgtttatgttgcaaatgacacaggccgcgataaccctgccgttgacggacccggttttgaagttcctgctgattttggtaattatcttggctgctcctttattgttgaataagttgaggattccccatttgttgggattgattattgccggggcaattatcggaccgaatggttttaacctagtgttgcgggatagtagtattattctttcgggaacagctgggcttttgtatatcatgttcttggcggggctggagattgatctgggggattttaaaaagaataaatggaagagtttgaccttcgggatgtacacgtttttggtgccgatggccttgggaacgcttgtcgggctttacgtgttgaatttttccatgttgacttccatattgttggcgagtatgtttgcctcccacacgttgatcgcttacccgattatcagtaaactggggatcacgaaggataaggccgtgggaattaccgtgggagggacgatgatcacggatacgttggcattgttggtgttgacggtgattgtggagatggccgtgggagatgtggatgattggttttggtacaggctaggggcggcaattatcctcttttttgctttcgtgatgatcgtgttcccgatcgtgggacgttggtttttcaaacggtgtgaggataacgtgtcgcaatatatattcgtgctggtcatggttttcttgggggcttacttggcggaattggccggactggagtctattatcggggcttttcttgcggggatggcgttgaaccgtctgattccttcgacctctcctttgatgaaccgggtggagttcgtggggaacgcgatctttattcctttcttcttgataggggtgggaatgttgatcgactaccgggctttctttaccaactgggacacgattaaagtaggggcggtgatgatcgtggtggccaccgtggctaaattcggggcggcttggctcacgcagaagacgttccggatgtcggtggaccagcggcgggtgattttcggattgagtaatgcacaggctgcggcgactttggctgccgtgatggtggggtataacgtgatattgggagagactccggcgggagagccgattcgtctgttgaacgagagcgtgttgaatggtacgattttgatgattctggtcacttgcacgatggcatctttctcggcgcagaaaggggcgcataatatcgctatgaatgacgtgtcggaagagaaagagggaacgggggaacatcaggaacgcatcctgataccggtgtcctacgagaagaacgtgaccgagctggtgaatttgagtacggcgatcaagtcgaagaagaataagaacgggctttttgccttgaacgtgatcaacaatcaggcatcggacgataaggccttcaaacaatccaaaaaggtgctgaatatggcggttacgacggcttcggccacggataacgtgttacaggatttgttgcggtacgatctgaacgtggcgaatgccattatcagcgtaattaaagaacagggtattacggatttggttttgggattacatcagggaaaaggcgtcgtgtcctcctttttggggaatatgaccgaggcgattttgggacagagtaacgtgaccacgttaatttatcgccccatacaacctattgccacggtgaaacgtcatctggtggtggtgccggcccgggcggaaaaagaggtcggtttcccgatgtgggtgaataaagtatggaatattatccacaattcgggtgcgaaggctgtgttctatgcatcagaagacacgacaatgtacttgaaggagatatataaaaaaaggccgatcgaggcagaattttcgtcctttgatgattgggatgatttcttgattatgtcccgggaaataaagagtgacgatactttgtgggtggtgatgagtcgtcgggaacggctgtcttatcatgcaaatatgagtaggattcccaattatttgaacaagtatttccaatccaatagtttcgtgttggtttacccgatacaggcaggagagacaaataatcggtatttggtatagttgaaaagtaaaatttaacgcgctgtccactccctataattggggagtggacagcgtgtttttacccgattttgaggatgtgggttttcatgatgtatttgtaattttgaaaacttgaaatatcataaataattctataaactaatgaataaacttggtgttgagtcaattattttcaatatttgcggtaaaaataaggatatgaattcacatctattttccgcagatatgaaactggcggacgtcattcatgctgattattcactgttgttactgttacatcggtttggaataaatctgggattcggggataaaacagtccgggaatgttgcgaggcgaatcatgtttcgtgtacgttattcctgatgatttgtaacgtgtatagcaacgagcaatacctgccgacggagaaagagatcgagggaataggtgcgaacgtggaccagttgattgcttacttgaaaaattctcattcttattacttggaaaaccggatgctttctattcaggagcagttaaaagagatttctgaagggtgcgaacagcaacatcagcaaatattgaatctttttttcaatgaatacaagaatgaggtgattcgtcattttgattacgaggaagtgacggtcttcccttatatctcgaatatggtgaaaggggctcgtccggaagattacgagatcggggtgttcagggagaatcatagtaatattgatgataaattgaatgatttgaagaatatcatcatgaaatatttaccgggagacacgttgtcggatatgcgtatccgggtgttattcggaatctttgccttggaagaggatttgagcaaacattctttaatcgaggataaaatacttgttcctttagtaatgaaattagagcaacggtatgcaaaacaataataaaagttataggattgttattattgagccgtccatgattatttcaaccgggctgaagaagttgatcgaaacgaggaatgagtttgaggtggtagcggttgttgccgattgttttcattgtctggaaagaattaatcatttgaatccggatattatagttattaacccttcggccgtggaattgaagaaacggcaacatctggaagagttgtttgaaggggtgaaggacacggctttcgtggcgttagtttatcagtatatcgatcctgacattctgaaacaatatcacacgacaattgatattgccgatgatggtgataagattgcacagaagttactacattcaatcgatgcgttgagtactccggctgatttgcttgataagaatgaactctccgaacgggagaaagagattttgatttccctggcaaaggggaagattaacaaggagattgcggatttgcaccatatatcggtacataccgtgattactcaccggaaaaatattattcgaaaaaccgggattaagtctgtttccgggcttacggtgtacgctattttgaacaatctcatcgatattaatgaggtggagtgatgttttgattgaaatatccctattataagggattgcgggaaagggtggaattgttgatctttgtaatgttaataataatatgatttttttcttttcaacgtaagccattgaaagaattttgccaaaaaagactgtttagctataaaagttattcagtctttttttatttggggcgtctccgtgtgtacccttgggattttgggagtatgaaagctgcatacccgtggttgaaggaatattctaggcttgttaaatctaaaataatttaaaatatggttattaaataatcatcaaattcttatcatattgttagccgctcccattccgctcccattcctcccctattccgctcctattgtaataataaaatattgtagaattgtaggatatgttaacgttcggataggtgtataataataacttgatcacgtgaatatagctctattcggtagaaactttacctgatgatcgatttcactaggatagaacctagtttctctctgcggtttgtacgggcgggaacggatggttacttttgctcgttttctatcaatttcgagcctttataagcgatggcgtacaggatgaacgtgagtagaatcagtccggcgataaaccactgccaaccgaaatggtcgagaacgactccggtggctgatccccatacactggaccccatgtaatagaacaggaggtagatggagatggtgaccgagcgtttttggaggttgtagtcgctgacgattcggttacagatcacgtgtaccacgaagaaattaaacgtgaaaatggccagtccaagcgtgacgatccagaagttgttaatgtatagcaagagcaatcctgccacggaaagtgcgatgattgttttcagtattttgaaatggttgtacaatgctgtcaattttgccgtggcgatcgagccgaataccccgaacaggtacatgaaatagatatagtgaattaggtacggggagaagttaaacggttcttttaccagataaaagccgaggtaattgtacaagctcacgaatatccctaacatgagggaaccgatcagatagaaggggatcaatttcacggagacgatcaagtgaaggttggaaacgatcaatgatttgaaactttcccgcttgggtttgaaattaactgaacggggactgaatatcaggaatgatatggcaaatatggcacataatacaccgattgagacggaggcgatgcgccacaagaattcactgctgagataggaagaaattactcgtccacccattcctcccaaggcgtttccggcaatgtagagtccggtgatttttcctttattccggggttgaacttcttcagatatataagccagagatacggaagtggctcctgatagcaggaatcctttcagggcgcttaatgctaccaacaagaagaaagagggcgaataagagcagattaccgaaaagacggctgacgataatagcgccgcgctaatcagttttttccttggaatcgagtctgccacgaacattgccgtgaacagtcctactaccattccgagcgtggagaatgatatggccagactactgtggctggctgataatccaaactcttgagccagatctggcaggagaggttggaaatagtataactgggcaaaacaggagaaaccggacaagaagacacaaatggagatcttgcggtccttggtcatattctccggagtgataattacgtgacttgtattcatgacttttctttatccggtgcaaaagtacgtattctatgagctggttattcttttgcggagaagtttttcatcggaaactttcttttctttttctcgttagaatgagtatcagaaaacaagattgttaaacagataaatttgaaaaagattatgagaggaaggattttaatggtaacgttatggatggcatcattatttgtttttgccgcttgtcatgatgatgacgacgatgatgataaggggtatacccccggaaagagtgtcgtggccgcttttgaggcgaagttcccgaatgccgtggccgtgagttgggagaaaaaaggagtgtatgaaaaggcggaatttcatcagaacgggcaggaaatggatgcttggtttgatgcatccggccaatggatgatgacggagacggacgttctgtttgccaatcttccggcagaggtgaagacggggtttaacgaaagcatatatagtgcttggcaagtggaagatgtcgatatgctggaacgtctgaatatgcccacggtttaccgcttagagatagagaagggaaatgaggaaatgttgatttatttcaatgagaagggagagctggtgaaggaggtaaatgaagaggcttctactttaccgacggcggtgagtagtttcattacccagcagtacccgaaggctttggttgttacggttgaccgttggcaggatggtatgttggaagtcggaattttggatgatagtttggtgaaagaaattttgtttgaccggaataacggttggatgaagacttcttggccggtgttgaagaccgatgtgccccaggtggtgcttgacgtgttgaagggcgaggcgtataatagtttttccattgccagcgtgcaatacatagaatacgcttccggtagtgatgtttaccattttgttttgcagaaagaacattcgatggatataagtgtagaaattgatcctcaggggaatttggttttagattgatacatatgattaatgggagagggagttgtatccaaaacggatatgactcccttattttttgtctcatctttacctcttacagggagattgacggttgaaaaatttatttgagggggacggaacaagatattattaaactacgtatgtttgcgtagttttaatatacaaaaacaaaaaatgaacaaggagagattccaaggaatctagcaattatgaaaacaggtgtaagcgatttgccccgatcggtgaatcagggaaatgagttcttaatgttacgggaaaaaaagcacagagttaggattgaaggagagggattcgtggtgcgtgaatggcgtttttcggattgtgattctttagctgaaaatgccaataatgagaaaatttggaataatgttatggatcactttccgcatccatacacgaaacaagatgcttttgattatatcagtatggttcacgccatgcctgctcccccgatgcgatttgcgattgaggtggatgggaaagcagtaggaagtatcgggtttggttcagaaggagacattgaacgggtaactgctgaaatcggttattggctgggagaatcttactggggaagaggaatcatgcctagagtcgtggctgccgtcacgcgatatgcgtttgaaacgttcggctaccaaaaactttacgctttggtttttgattacaatccgggatcaatgcgtgtattggagaaagcagggtatcagttggaggcggtgttgcacaaggcggccgtgaaaaatgggaaggtgatagacttctattattacagtatcctgaaagagaattaattaaaaaagcagtatccttgcaagatgctgctttttttaatttcatgtttaccagttgatttcttgaatacccttacttcgtagaaaggcattggctttactgaaatgtttacaaccgaagaaaccatactcggcagaacggggagaggggtgtacggtggttaacacaagatgtttgcgagtatcaataagtgacattttttctttggcataacttccccataacataaaaaccaagttctcccgttcatcacttaattttttgataacggcatcggtaaaaatttcccagcctttgtctctgtgagatcccgtttcgtgcgcccgaaccgtgagtaccgagttcatggggaataccccctgggctacccaatggtccagattcccggaagtcgggatgggggtccccaggtccatgtgtatttctttaaaaatatttgccagagagccgggaatggctaccccatccggtacggaaaaacataccccgtaatattggcccggattaggatagggatcttgtcccaagatgacaatttttactttttcaaaagggcaggcgttgaatacatgaaatatctggtgtcccggaggaagtacatgagctttcttgtattcactcttgacaaacgccactaatttctcgaaatagggtttgtcaaattcatcctgtaagcgttgttgccaactttcttctatttgaaccttcataaatgcatttgggttgctatacgaaggcaaaagtaaacatatttttcattcgtttatttccattttttcagaattttattgttttacaaagccttgatgttcatgattggtttgatcgtgtcgatgatcgttgccgtgtcttgtatcgcctgcatgatcaagtccttgtctttatacgccatcggggattcatcaagggtttgtcggcagacggaggtggaatagatgccttccatttctttcgtgaattcgttcatatccagtgttttcagtgctttgtttcgggcaagtacccttccggctccatgaggggcggaacagttccagtccgggttactttttccttcacaaatcaacaaaccgtcacgcatattgaatgggataaccattttttcaccttgataggctcgaatggctccttttcggatgatccagtcggtcgtgtcgatgaaattatgcatggagtaaaccgtgtccacggcttggtaattttcacccaagtctttgaatatggcttttgccatagctttatggttaaattgtgcgtaagtttgagcaataaccatatcgacaagatattcatacatatcttctttttcgagcatatactcctttttcccgacgtggtaacgtttgtttaattcttccagttttttgggaatatcacttgtcggtagtgtattacgcgtgataaacttgaattcttcatggtactcttccggaagaacggtcgttttatgcattttcttggcatgataattacacactttcaacccgaaatgacgagaaccggagtgaatggtcagataatgtgaaccatctttggcagattctcctagctcgatgaaatgatttccacctcctagtgtacccacggaacaatagaaggtactttctttgataccgatttttttacacaagcgggagatatattctttatcgacttgaatggaatctttggtttctccgaatcgctggaaccatttttgttgaaaggcatgaaggttattattcacggtttcaaaatagggggtaatccaccagtcatccaagttcttttcctttcggatatgcatccccatgggaatggaacgccggatggcgtggtccagtgttgggaatctttcttcttcgattcgctggtttaatttgaacgtggtgacggaacaaccgatgtccacaccaatatagttcgggttgaccattcgtgtcacgggcatggtgaatccaatcacgattcccttacccacgtgagtatccggcatgattcgtacttgtacaccggtagagatttcttggttcagaatgttccggatcaactcgatggcttcggtttccacttcgtcaataaagattttacaatcttgattatatgttccttttaattctatcataatttttgtttttaatatacgcggagcaacgggcaaacaaggatcgtacgggattcgaacccgtggtgaccactttaacgaagtaaccctgttttacggcatcctgttttagtaatttaaaagcaaggctacaagcgataagagactgtttcctgctctacccactgagctacactcccttgttcgtagcttacagatcgtggaagtggcgggattcgaacccgcgacccgggcgttatatgcgaagtaactcttgtctacggcacttgctttatattgttgttttaaagaacgcttttatatttctattttcattatttcgttgacaaccgaggaaccttgttcgatataatatatcatgtcgaatattttttcactccacccgctgacgaggatcacgttgccgttatctttggtcatgttgttcccgtaacctctcaagtcaaccgtatagaccctcacgtccgggttgatcttcaggtatttctggaaaaggcggttgaagttttctccccgatttcctttgtgatcgtaccagttgcatccgtcaccaacttgacagtcagagaatataacgattctgtctacaatcgtttttgattttatcaaatattccatgtagtcgaatattcctctttccgttgccgggccgcatttcttggcggcttggttaatgatgttgaaattctcgaacacgtttaccgagcgactcaagttcgcatcaattaaccgatcaccaaacaatccgacgtaagtgtctttgcatttgttccaatacaacacggcaaacaagttggcaatatccgaagttttccgttcgctcatggccgacactagggatttcccaccccggtccccgtacatgcttccggagttatcggatagtatcacggtttttccctcgcgagtcgagatattgtcacaactgattaccagcgctttttccaaagctgccaaggctttctttattttcgctttttctccttcgaatatagaggtttctttggccagtttgtctatttccaggaatgctgacaaataacggaaaggcatttgttttgcttttctgatccggtattcgtttgtcaggatattcaaggtcatatccaatgctttatcagtgcttttcgtgacgatattccgcaagtttcgtaatagagccatgtaacccacttgaccgcttgacactagttcctcccatttttcggaaacagcttgggctttcactttctcgttttcgaacgcttgtttacccagttcggataattcggtttcccacgtgtaggggatagctaggttacccgatacgattttgtcaaatacagcttgttgtgcttcatcctttgctttcgggtgaactagaaacaatgcgtctcgcaggcttacagccgagttggcattgtatttggcgaattgatactcgtcaaacctgttgaacgattcgatcaatcctttttgtatttgttttgacaattggttcaactttttgctcctttcccgtttgttggcgatttggtaataagcgagaatctcggtgatttcgtcagctcgttttactacacccgcaacggcacgtttcacaatttcgttaccggaatacaatcttgccaattcaacagccagtatcatcggtaccgaacgcaagttcatttccgtgcgagcgtatacagcgagtctggctacaaactcgggactgcatttcgcgatcaggtttttgatcctgcaaaccctgtccgtgtttgattcatagtatgaatcatcgaccacgcaggtgactacggttgaatagagttccatttccggcgtcattttgtaagccttggttcccatgtaattcacggtagtgtcttttcctttgtttgtaaaattgaacttcataattgtatcttttttcgtttcacaccacaaagatgcatgggtaggtgcgcaagctttttgcgtaattgaaattattttcatatttttgaaaaaataatttttatcctgttcttatgccagcgaatcgtaatgccctaatccgttataaaacaatagataactgcctgcgtaataaatatagaagatggacgctcgaagatttgattgacgcgtgttccgatgccttgtacgagtacgaggggatcacgaagggaatcagtcggcgcacgattcagatggatatacagatgatgcgtagcgagaaattgggttataatgccccgatcgtggtatatgataacaaatactataaatacgaagacgaggattatagtatcacaaacactcctttgtcggagcaggatttgaaagtgatgtcggaggccgtggaggtgttgcgtcagtttaaagggttctcttacttctcgaatatgggggatattatcagtcgtttggaggatcatgtgacttcagcccgtcagaaaacaatcccggtgattgatttcgagaagaacgagagtctgaaggggattgattatctggatatgatttatcatgcggtggtgagtaaacaagtgctgcggatgaaataccggtctttcaaggcccgatccgcatcctcgtttttgttctatccttatttactgaaagagtaccggaatcgttggttcgtgttcggggtaaaacagggaacatccgtgcttgtaaatttggcacttgaccgtattcataaccttgaaatcgctaaagaggaatcttacagggaaaacacggtgtttgatccggtcacgttttttgacgatcttgttggggtaactaaaaacacgggatcaagggctgaagtggttcgtttttgggtagatcgactcaacgctccatacgtggaaaccaaacccctgcataagtcgcaacgggtggtggaaagacaaaaagacggggctattgtgttcgagatcgaggtggttataaatcaagagctaagacgggagatttgtggatttgccgaggggatccgggtgttagcaccacctatgctggtacggcagatggcatccaagtttcaacaggcaaatgagctatatcggcagagctgatttttatattccttttttgatgatggtataaccaaagaatcctttttccaaggttagagttctggttgcgttagtacgtgtcttgttataggtggagagtgaaaccgggagtttctttcgtgttccgttttcgaaaattacttgcaggtaatattcttttctttccccggccggaacataacggtgttttccgactctacgggtttgcttgtgagtttcaatatgttttgagagtatggttactttttcttcccgggtagaagacggatctgcgagcatgaagttaccgcccaaaatcatgagataacagaaagcgcttgcgtgaaatagatggcatataccatttaagattttattatcggaacgagttagccattgccattttttatataaaaacagagttgcgatagcgagtataagagccatcgagagtggttcccaccaagcaatcagtgtctcctcgtaaatgacatatccgaaagcccaagccagtatggcgactagcatggttacgtaaggaacgattttaaagaataacgctttcatacggccgcctccatgtctgctcgacttttactacgtgttactaggaaaactccggagaaaacgcaaataacagcgataatttttaacaggttgaacgagtccataccccaataaacggcaacacagcttgcgacaatcggttgaacatagcaatacatacttaccacggtaggacgtaaatagcgttgtccggtaggtgccaacaagtaactgacgaacgtgctacccagcaggataaagctgagaccataccatatattgggttcaagtgacaaccattccagatgtgttatgtcttgaaaagaaaatggaatgatacatattgctgcataagtgaacatccatttcatgagtgtgataggagagtaacgactgatgagttgtttgaacagaacaagatatagggcaaaactaagttcggctgtgaggcaaacaatatctccccagatattactgttatgagttgttccactggtattttggttacttacgatcaataataaggctccggaggcacctagaaatatacccgatactttcttgtttgtgataggctctttcaggtagatcgcagcaatgatcattgttagaataggagtacttgttgtaatgatggaggcatctactggggaggtcataccaagtcctatggtgaacaatccttggttgaaaagcactcctaacatggaggcgaagaatagtttcaacaggtcaggaggggacacgtgttcccgtttggtgaaaatagaggcaatccagaataaaattgcggctccgataacccggatttcgacaataatgaaaggtgttatgatgctggtaataagtaccattttcgagatgggagacatcaatccccacatcatattggctgtggtcatggataaatggccttttaattcatcctttttcatcttcttgtattcattttgcgggtacaaaagtagaataagaaaaaaaaatcccagtataatttgaataatttatgtattatactaccgaaataaattgcaggatattggacaaaaccaagataaagatgacttaaagccgagatatagctgagtggagtcatctttatcttttagttatccccttgttacgtgttggttgggggatgtcctagaataattaagggattgaaaatgccatttaaaaagtatcttgtgaatcaagaagaaaaaacagaagaattttactgattaatttcttctgttttttgctatttactggatatcctttacggctttttataaaagtgttagaattttagtttttattacattcttttttatttttgatatggatacgggggataaggaaattctcgatctccaatatattcgtatgacattttgccatctttctctgtttccctatatattgatatccaaaaagtgatttcttgaggatatggtaaactgattatttcgtaagcagaatggtaatgtgattcgcgatagagacgataatcattttcggcatattttaaatacatgagtatcatgtatacccctggctcacaaatctgaatgtctattatttgttttacgacatttttatgtgttatcacgtaggaaggaagattatcccagaaataaatgtattcaggattagatggatttggagatggaataggatcttcataaagtgcgtaaaaatcaagtctagtctttgaactaacaggtgaatcatacgtgattttccaatcccacgttacgttatttccaaacccgtatttgaaggtagctgttgattgattcagtcctttgactatataagctgatattcgtttcaaattctctcttaaataaacagtagtaggtccagtataagaaaccgagagctttgaagtacctttgaaatgaacccaatattctcccatcttattatatccgcccccgtgttcatggctacacactaattctgatcggctatatgtagctcttgttgagggatgttcggtttcgttaatgtaaggatgaagcttttcattacgagtgaatggtttaccatcgtaaaaaacgatagcaccagaatctaaatatctttccattcgtaagttttcgttttgtaaatattcaaggaaataattgtatttttcttcggggattccttgctctgtggcagatgctaaatctatcaagctagtaagttttccttcttggaaactcacgttttcgagtaaagttctgtcattttgtgtcaatttttccagtggataattggcatagtcaatatagccaatttcaggttcaaagatctctgaattgcctgaacaactcattattaaacatgcccaaattaatagatgattttttttcataattcaaagatttattagtttgacaataacactatactgtatatgaatacagcatgagcgaaatatattggaaatatgaaaacttaattataatttcaatattccggcgatagcatatgaatccctataaatacgaactttattggaacgtccaaacactaacttgtatcgtacggggattagatttccttggtttatcaccacaatttgcggatcattccctttgtagacagaattataccaaaaactgacttctattcgacctcctcggtgttgtgtttgcgtgtaatcaaagattttatacttggcactttgcatttgctcgacaaaatctttctggtaattgtttaattcatcttgattatcgtattctgtgaaagagagcagggagtctccgctcacgtggatatattccggtatgaacatacgcttgtaattggtcgtaagtgttttgggcatttcaataacgtagttccggctgtcgatttttgctttgatagctgttgtaattacttttttcgctgaattttgatttagcgaggcgcatgacgatgacaatataagaatgattatcgtcaaaaatgagagcgatgttcttttcatggccatgatgatttgaaaaaaattattaaatgtactttttacgtcaattctagcatactgtaaatatataaataaaattagaaataacaaaataaaatgatgcaaaatagctatgaaagctattttttttgaatagaaatatcaatgaaaactatatataataaatgcatctataatactgtttattttaagcatttatataccactttgtagcgaaatgtgtttttagcaattttgatataggtttattgtaaacttttttacggataatacagtagttatattagtttattcattttgtagaagtgcaaacaaaacaaataataacaggaacgtactgcgaatatacaatttagatccgtaaagttaaaatcattctttctttttgtgtacatttgtctatccaataacataatatggtaaaatcatgaaaaactcaattgtgtatctaccaagcgacaagcaagctgatctagaggttcttgttaaagaggtattaaaacggctgtatcaaacagtgtttattattcagtatggtagttatgcaagagataattatgtccatcgtggagtacggggtggaggtattcctactgttaagatctccgattatgatattttattgataacaagcgggataaataataagagagccgaaaccattttggataatgtagaaggtatattttttacaggtaaggattttgatcgggatgcacttgttccgttta

SEQ ID NO: 10712 - DNA, 369 bp, Unknown
  gut microbiota DNA sequence
ttaaaaccatactatgtagagttaatttacaaaactagcatcaaatcaacagacaggataagaataaatgatcctgatggagtctacttactggcaaaagagattttaggagatagaatggaacatcatgaggaagtttacttgatcttgttaaatcaagcttcaaaaatattaggagtggctctagtaagcaggggaagtatcaacaaaacagttgtggatataaaaattatattccaacatatcatcctctccaactcttctagaatcatattatttcacaatcatccttctggaaattgtaaaccaagtaaagctgatgatgaattgaccaaaaacataactcaattatcatctttagcaggagtt

SEQ ID NO: 10713 - DNA, 35491 bp, Unknown
  gut microbiota DNA sequence
ctttggaacagatactcaaaaaacatccagaaaacatccagaaaacatccagaaaaccaaaacaacccaacaacaaataattgatgcaatcaaagcaaatccaacaattacaagaaaggaattgatttatctgttaaacagtaccgagggaagtataaaacaccacttatctcaactaaccaaaaagggaataattaaaagagaaggctccgatcggacgggcagatgggtcgtgaatgaatatccgcaataaaagctgttaactcaaaaacgaacacctttttcttctaattcagaattccaaaattcctcttttgagattaaaaacctatatttgaaacccgataagaaaaacgtttcttattcgtttcaacatcaaaatatatatttacgattaaatgttagcatacacatatataagcaaaggaaacttcagattccaagagaagccgatacctcaaatatttcaaaataagattgtatttacttataaaatgagttcacaataaccactacatatcctccaacgataggcaaaccctatcaatctgatattttggcaataacttattcttaagatgctctacttttgctgccaataactctggcttgaagttcttcttttgtcgctttacttctgccgctactgcttgatttttctccaatttcagagcaacaatatcaatttcgttctgattacctttaggttcccaccatgaaccaatggctctgtactggaaactttcagcaaactgctgtttgaaatatctttccagcatgatgcccgaataagtcgggtagtctgatttgataatagcctgtaaaccaataaagttctttatctctatcagggagcgatgacggtcgaaataattgaaccaaaaacgaataaagttgtcctgtatctcatatcgaacagcttgacttccctcttttgccaatattgggcgttgacgaacaatgatgttgtaatcttcaataagtcgcttgatttgaccgcctatgcttttatctcctaatgcagtttctatttcgggttgtgtattgacaccgcccgaaatggcactcaggatagagaaataggtggcatagtttttcccaaactcttctatcaacaggtttttcccttcatcggtaaaaggagagttttcccgaaccataaatgaaatcatctcgtctatgttcaatgtgatgttgtcgcaaaacaactcaacatacttaggaactccacctgtaaaggtatagagcgcaagcaaatcatcattggtgtaacttggattgtaatcacgcataatttctttcagcgtgtttaaatcaaaagccgataatttgatgatattgtctgctctgccgaatagaggctctttattgttctggaatattttctgcatcaatgaataaatagagccggatacaatcagattcatttttgatttctttcgataggtgtcccatatattctgcatatcgctatacaccgattcgttgatgttgtagaactcctgaaattcatctataacaagattgaacggtttccgcgaagccaactccattagatattggaacaaagaccgaaaggtgcgtatttcagcaggaataaaagtatcaagcgattgactgataataggaataaattcggagcaaagcgttgcttcgcttttacgaccaacaaacagatagacagtcgataagccttcaattgacttcataataaggctagtcttaccaatccttcttcttccggttactactgtcagacgagaatagtcgctgaacgataaattttgtattcgttgcaactctgccaattcacttgttctattataaaacttcatgtttttatctctgttatttccgtaacagttacggcggttacaaagatagaaaaaagtttggatatgccgtcatctttctctattttaaaccaataaatactttttttgaatactaatccgttattaccgtgcaagtcagagagcaagtgaccgcacaagtctacccaacaagtttagtcgtaatgaaaaacatatatatagtataattttatcttatctacatccttatattcagcagattatcttcaagcgaaagatataaataatttgcattgacgtacaaatcgtgtcctttattgcaaattatttattagcctccaaacaaatgggagtaagttacccagcaaataatggtaaaataaaaagaatatttaacctaggatttatacacaaatatattccaaataaaggacaaataagttccaaatactacctttttctcagagctcattcgaagctcaaacgttgatcatccataacgggatgactaagccacgtgtaagcttcgaatgatcttcgagaaaaaggtagtttctctattacatttccattctttttctcctagttctcactagaaacgcaaactttgcggatataaatcacggggaatacaaaattttcctgtttgcgaaaacatataaagccaattcggaaaaccatctcacgtaaatattacaatccctttaatgatttcagaattttctcgaactccggattcgaaggacgaggcatatttaaatgaaccactttaccctctttatccaacaaaatataacgaggaatcgtggtaacctgataataatgtacaaaagagagccacttccggtcgaacaccaattgagtaccctttaaaggattttgttctaaaaactgaatccactccttcttattgagatctatcgcgatactaacaaaaaagatattcttctttttaaatttctcttgaatcttctccagataaggaatctcctttttacagggagcgcaataagtcgcccaaaaatcaatcaaaacgtatttccctctaaaatcctttaaagaatagattttcccatctttatcttcatattcaaagtcgggagactgatctccaacttttgccccttcttctccatcagcaaaagcgttgatagaaaacaacatacacaagcaccatacaataattttcataactgatcattttattatttgttcatactcatttatttcaatatcataaaaaccggaagacttaaaatcccccaacaaatatttcgcaaaatgcgaacgcaacttattctcaaaataccaggcagaaaccccatcatacgagtgccgcccgcgtggcaacaacacgaactccacatctttgccatgattaatgaaagcatccaccatgcgaatcgtttgcacaggatgaacattcccatccataccgccgacaataagcattaaatgacctttcagatttttagccagttccatatttgtgggcaaatttgctgaataaaccgatttttcatgaattatcacggaatctcgcccgtctttcgtttcgagtttctcctctatcaccttcacttcctcgtcgatagcataatgactttccacatagaactgcgagtaaatattattatcatgattacccgccgatgatacacatgccttataaaaatcgggataggtacaaatcgcggcggtagacatcattcctcccccggaatgcccgtatatccccactcgatcaccgtctatgaaagaatgacgagctatcaactgctccaagccacatttatcgtctgccaaagcatgatcacgaatactattgtaaccgaaggaatgatactctcgtccccggagcgggagtcccccccgatgattgaaagcaacaacgataaagccaacctgagccaaagcctcattcgtagatcccacttcaaatgttaacgggacattatccgtctgcggcccgggatacacgcaagaaataatcgggtatcgtttcgtggaatcaaaatcgaaaggtttccacataacaccatacaaatctgtttctccatctgcagctttcactgaaaaagtctcaggcatcttccacccttgtttatacatatcattcaagtccagttcactcaacttaaaaaccagatcaccctgccgagtatccctcaccgtaaattgatagggaagatccggacgtgaaaaagcatctattataaaccttttacttgggcagaatatgacattatgcgttgcttcttcaggagtgagaacaaccatttttcccttcccgtcaacgttagctttacaaatcttcgcgtaactgggattttccccgggagtaacgccatacgcttgaaaataaaccgtccggtttttctcgtctatcgagacgacttttcctgccgtccagttacccgaggttataacatttttcaagttaccttccccgtcgtaatggtaaagatgtccatgccccgtacgctctgaccaccagattatatccttataatcatttaagaacgtgatcgaagctaattcaatgccgatatacggatccccttcttcatgaataatgacttttacatctccggtcgaaagatctacttcacaaacgtccaacatcgtatttcgcctatttctacgttccagatagagtttatttgctttcgtatccgaatgaagtatcctcatttgctgatcttgccacttatcaattttcactttcttttgcgtctttgtgctcacgtcatatagcgttatttcattgtacagcacaacagaatctccgactaaaattattggtgaattctgagccaatggccgtcccttcaaacaatttatgtaagaaacctctcccaaaccacgtaaatcttgacgaaacagacaaaagtttttagaatcatcaaaccaaagaggtgccaaaggaacttcttttgtcgtctccctctcatccgtgtaactaaacccggggattccatcaaaggttaattgcaccacggtagaatcttgtaagtcccggatataagcattatgccctttaccaaaaacctgataccttccatcaggtgaaatgccggtatcaaacctcatcctcctaggcatcatatcggaagggttaatctcctttttcgtgtaactcaattttctagtcttccggttatattcgaatataacatttccgtccatccaattgagtatttcccctcccttgttgaaataaattttccaaaaaccaagtttcttcggatcatatttccttcccgtggctttttccatttcagcagccaagtaaaccggatcccataacttctctacctttctcgcctttaaatccacataataatatttttcttctccctctttcacttcccgaaaccaaaaatcatcgctcccctgggtgaagaatggagttaattgatcactattccaagggagcctatttgacttggctttttctgcttgttcataatttgcattttgggcaaataaaccacacgacaaattaagaaagaacaaataaacaataaatttcttcataagatacactattatttttgaaagattttcatgatttcatttcgcaagggttccactttcgcccctgctgtaataatacgattattctcatcaattaacacaagatgagggatcccgttggtgatattatacagttggcacaaagagttttcccgcttaaacccctccaaattagatccttgaatccagatcaaattctcttcttctatcgcttttacccacttttccttgtcatcatccatagaaatccccacgatttcaagcccccggtcgtgaaactcctcatagagctttttcaactgaggagtaagtgcccgacaaggtgcacaccacgaagcccaaaaatcaataatcttcattttagccttaatcgaatataaggtaaaagatttcccctccgcattctgcacggtaaaatccggagccacctgtcccgcagctaaagcctcctttttacatatttgctcatttatcgctttccctaaagcattttgctgcaactctgcggacaacagaccgaatcgttttttcaattcatccaaagggagcctctcggccctattggccagttcacatagggcgatataggagtctgcatgttgagtcagaaacgcttctttctccacatcggcagcctgccgcagagaatccacaaaccctttcaattgcaggaaatgttcactttcaggattcctgattgctaccatatattcatcccgcacctgagcgacagctttcgacaggttgatgtcgatagccaaatatttattggcaagttgctgcgtgtcaccaccacccgaaatttcactgaatcccagattaccaggatccaatttcacctcgtactccttatcctctaaataaattacggtctgagcaaacaccccctcaaccgacatgattcccaccgtcaattcgggaacactcccttgcatctcgaatttcccgtccttaatctccgccacagacaacgtatcacacatttttccgttataagtaacaagagtaacttttccctcttgcacatctcctattgttcctcgtattttatatccttcagaagaagtacatcccataatccccatcccgatcaaaaagatcgcaatagaactaatttttctttgtttcatacaaatttatcctgtgatttatttacaatcatcttaatttcaaaaggcagtcctgaaatgccagaaacttgcagtccccttgttcaattattcatccagaatttcagcgtatctctgcaaattgatcccgtaagttgttctcatgtattccacgaccaaatcatatttgtcattaataatccgattccctacctgatccaatggatcttcggcatcaacaggatacatctcccgaacttcctcttccgggtaagtcattgccacgcggatcatattcaaaaaatccaatcgcacacgttcttccacggttcctgcaacaggccccggattttcatcatacacgatagagccccattcattctcaaacaaccgggtaatccaaggcatccatgtcggagcgccataagtttgccttccattcaaattggttatcggtttaaaatcttcccctaattgagaagcaaaacctctacgtttgtaagcattatccggatctttatcacacaaatcaattaatatgttttcagcatagaaatactccggcaaataaggattctcttctttccattgctcaaaggaaatataacgcctccctattttggtctcataatccgacatcccggcaaaacctggtgcgacctcataatctcctgtttcaaaacgtgttttcaaccccggataactaaatgtacacgcaaccccatgaatctgttctgaagtcaaaccagcctccaattcatcactcgtaaaactcaaactccaataatccaacccatctttcttaaattggatatgattcttttggtaggtttgcgaacgaggatttccatcattaaaatcatttaccaagtagagataatagggtaatgacctccgatcctcttctttattcttatccatccctcctaacaaccattcttttactaaatccagatatatctgtatttcctcattactaggagttgtacaaacataaatcggatcgttataaattggagttgtccacatccgatttaaatgcgtactatctacatttttataaataatatacatcccccaatctttagctatttgttcaatctccctatcccatggatcattcccttggggaaattcaaaatcaagcaaatctactctttgcacggtccccactccatcatcatccgtacatgaagccaagcccaacaaggccagcaacaacaccctatatatttgttttatcagcataacgcaattcgattaacatttaaacatcattttctcggttcattttgctccaaaccagaattatattcaaaagcttcattcggaagctgaagcgtgaaaccaggatcatttttctccaacacatactcggaagcattgccggaagcatcataccaaacatgttttatctcttccattccatagcgacgcaaatcaaaccaacgatgattctcgaaacacaattctcttcgacgctcatcccggacaaaagcgatcaactcatccgcggcactaatatccgtactcacaaatgccgcagcactaaaccttttcactcgtaatttatcaagcaaagcctgagcctttatttgaaattctccatttcccgtttctttataaagcattgcagctccctccgctgcgttcaaataagcttctgtaaccttaaaagcaacgccccactttccaccattccaagaaacctctatattgtaattactaacagcctcaaatttactcacggcctttttataccttggagtatatccgtaatctattacttcccacattaaataatgatctcgccgtaaatccgtaagatcataagttcttattaaattatctgaagccacggcagggatataacttgtgaaacctttatctccactataataaacccttgttagtggcagttccaatacatctccttgattcccaaacaaaaatataatctccggattttcccaagtataataactcctataagtaggattcattttctcattgggtagaggctctccatttaaatccaatacttcgtaaccataatcggtaataactttttccccgtaagccaacgcctgcgcccaattctccatgtacaaatacacgcgggaaataagtaattgcacacaaggtaaattgatccggttattttgtaaactccactctccttccggcaatgtcttaaacaaacgttccgcttccaataaatcttgtattatccgcgtataaacttcctcaaccgtgttccttttcattccgcttgtccccatctcggccgtcaacttcaaaggtactcccggcgaatctttacccacagagtaaggttttccatacaaatttatcaagtgaaaataaaaatatccccggaaagccaaagcttgagccatgaccctattcctttcctcttcagatccctgcacctcatcaatataatccaaaacagagttacatccaagaatttttttgtacacttccccgtaggtattatatccactaaactcatctttcatgtttttagcccacgtgtaagccatccggattttatttatcttctcttcctcagaagcattcgccttccaaaccggccgaatagccacatcgtcatcgaataaccccaacaccccgtaaaactgcccatcactatatcccggtcccatatatacttctcccagcaacaattcgtctaatgatttaactaatttgggaacatattcactctgggatttaggctccaagaaatcaccacatgatgccataaaaaacatggtcaccaataacccgtattttatcattctattcataaaaacctccttttaaaaaccaacagttacaccaaaagagtatgtcttgggctgcacgctatctcccaattccggatcaaaaccatgaaactttttatcggcaatcacaaacacgttattcataattgcgttaagcgataaacttttcactcctattttcgcgcaccattcctcattcatattccaagtcaacgacatttgttgacaacgcaaaaaatcggcatttacaaccatcacgtccgactgtccccacatatcatacacgttatacgattttccatcttgaagattaatcatattaggaatacgaccggcataaactcccggaatatttgtatttttctcgtctccgggcactttccaacgtttcttcagatccttactcaaatttacgttagataatggaatattgccgctcgcgggatatggattcggcaaccttttcttggctcccaacaacaaagaaaaattcgccccgaacgtcaaacctttccacctcaaacgagttgtcaaacctccagtgaaatctggctcggttttaccagaataaacaagtaaatccgtgtaatcggaaatttcccttaaaacaagattattatcttcatttctcacataatccccctgctcgtcctgctcaaaaagtaaattatattccggacttccgtcattcggattgatacctttaaaattatatgaccaaaaactagataccgcatatccctctttcaataccttatcagaagatcccgacaaataatctctcagcgtaatttcactaatcgattgggtttttgccttattccaatttttagatgaatttaacccgatcgtccaagcccaattcttcgtacgtattggtgtaatattcaacgtgtactctactccggaattcacaatacgcccaccgttcacctctgttccttccctaccatactctaaggctattcgttgattcacaatattattggacgttctcgtgtaatattccaagttcatcgtgatccattgaataaattgaacatctaaaccaaagttccaaatcttcgtacgttcccaactcaaatggggattaggaatacgaaagatagtcgacatataatcaccataataaagtttcgtggtccccatgctcaatattaattcaggacttattgaattcaccgcatttccctgaataccataggacactctcatattgaactggttcaatatattagaaatactattcaaccaaggttcttgagcaacattccaagaaagcccgaaagaataagtcgggtcgaaacgtttattctgatcctgcccgaagcgattggaagcatcattacgtatactggcattcaacacgtatctatttttataagagtaagccaacgtggcaaacaaggaaaatttattatccgtcaacgtgctacgactccatcctgctccatcatacaaatcctctaaaattccccatcctgttacaggagcattaccaataggcaccaactcctttattggtgtcggtcttataacactctcgcctctttctgccacgtatccataaattttttgtcccctattctctgttttagttgacgacacttccgtacctatcaataagttgatccgatgatcttccttcaacgttttctgaaaagtaatcttattctgaacattccaccccagtacatccgaatttccattatataattcccctccggatggcaacatcgctgctttatacttatccgaaccaaacatttccgagccgaaatcataccctctataattcttggccacgtaatgggtttgttctcccgcataagactctgatactccgacattgttatttataccacccacaaattcataccttaaccaaggtgtaatatcccatgaaaaattcaaattcccgtttatttgagaggacttattctttgaataactatgttgcatctcattcaaaatattaaagcctagcaacacaaggttttcattatacctgtaattcgctctcaatttttgaaaatactggttaccggcatcatcataggccaacacggaacggctggtagatgtcgcatattccaaaggattaacacctgccgcatatccccaagtccgattaacactcccgatcaagctcatatccacacgaaccttgggatgcaattcaattccgacattaatacgtccactcagatttttcgcatcattatccttttccactccagcttgatcactgtatcccaaggaagcattatacacgattttctcgcttccaccggatatactcaaattatggttatgactaaaagaattacgagtcaacaatttaaaccaatccgtattcgtctgtcccaatctttgtatagccatttctgcctcttctttagaaatttgcttggcataaaacagggtcataattccttcgtacgtgttcaaagactccaccggaacattttgatacacggctcccgcggcaaaagcttcccgactaaactgaatccgttcctcagaattcatcaaattaaataacccgtaatgaggacgagctcggaatgaaaacgttccgttataatttaccgtcatgcgatcagtttgtcctcttttagttgtaatcacgatcacaccgttggcagccttagaaccatagatagcggtggcggaagcatctttcaacacggttattgtctcgatatccgccggattcaaccaggaaatctggttacccagtatatttttcaaatcatccaccatcatatcatcctggttcaagggaagcggatctggctgtatcacgccatcaaccacccacaacggatcttgattacctaaaatcgtggatgttccccgaatccgtattttaggactcgttcccacgcgggaactcgtgttcatcaccatcatcccggcaacccgtccctgcaacatctggtcaatggaagtataggccggcatcataacatccgaggcctttaccgtcgtgacagaacccaccacatcactcttgcgtaatgtctgataccccgtcacgaccacttcttccatcgcctgcacgtcctcttccaacgtaacgtttatttcccgcttatcgccacatatcacttccttggtcttcatcccgacgaaagagaagatcaaagttgcaccttttttaggaacaaaaattgaatacttgccttccgcatctgttgtcactcccgtcacggtacctttcaacaaaacggttacccccggcaaaacaacattatcagtacccacaacctttcctcgaacaacaaccatctcttccggtccattcttctggtaatctcgatgtataataatatgtttatctcgaatttcatacgtcaaatccgttcctttcaaacagtaatccaaaatttctcggatcgaagcattctcgaatttataatctttcaaccctatccgttgcacctcttgagtattatagacgaaagaatagtcactattcttctctatatgaagatacacggtacttatcggcacatgtttaaaagaaaacgtgaatttcttctcttgtccgaaacttacaatcggcaaactaaagaaaatcaacaacaacaaagcacgctgaagccttgctaaaagtttcaatttttctcgcgggtaaagcccgcttttcccttttttttccataaatttgtaaattatttaattcttaaatataagaagaacttaaggggaatatgggtggtgccgattcccctaagttttatctacttacgattgttattgtattccctttccgggaaaaacgaatatctcccgtccgagacaaaatatccaaaacagtatctatattatcatactttttaattcttgccgtcaacatcatattcctagcctccgcattagcgaaaaagtaatcaaaattataccatcgagccaattcatccataatacgttctaacgtggcctgatcaaacatgaaatatccatccttccaagaagtgaaatagagagtttcgacatccaacacacgggaagaatcttgatcaatacaaacttgttgccccggaacaatcacgtaagactgccccctaaaatccttcacggaaacactcccgcttaccaacgtggtttgattcacttgattcgcgtaatctttcacgcaaaactccgtacctaacaccatcacttccgaacgagaagttttcaccacaaaaggcaacgcctcatctcgttttacatcaaaataagcctctccgtttaattccacaaaccgaacatcacctgtaaatttcaccggataacgcaatttcgttccggaattcaaccaaactttagttccatcaccaagtgttaaatgaaactctgccccctgaggaacttccataatattatacgttgtacttgaaggagcaacagaatcttttgtttcatacacggcttctcccgccctgttaacccgaatagaaatttcttctgattgtaataacgtatcttgctgactcaacaccacgcactcacccgtggacaaagtaagtaaagcccgtcctcttcctaccgcttccgtcgttggcagggaatgcccgacaacatcccgatccccttttcctaaccaggtaactcccaccgtcacaagtagtaacacggaagccgcaacagctattcttcttatattccgcaatctcacccttctatttctctccttccgcacgttttcaaaggattcatttaactttaattgtcccaattttttgcgcctttgttcataggcaaattcatccaataaagaagcaaacaaacgtctgttctcatcagcctcctctaaccacgcatccaaacgtgtcacttgctcctgagttgccaccccctgaatcaaggcaacaatacaatctgctatatcgaaatttttatccattatgattattttactccaataactctcaatgaactcaaaaggggtaaaagaatttagaaaaaaattatttaactaacgttccaagcgaaaaaaatactatttttgaactatcaatcgataatcattcaggtcagagacggggcaaatgaacaacatacaaaatatatatgaagaatctcggtataaaattctatttaatgaattctatcccgcacttgttcaatttgctttctcgttcataaataacgaggaagccgcaaaagatattgttcaggaaatatttatccgaatctgggaaaaaaaggtcaaatttgaaaacgaattactattgcgtaaatatttatacctttccacgcaaaataaatgtttcacttatttacgggatcgcaaagttcaacattaccacaagcaacaaattatagacaattaccaagaacaagaggaatcgaacatcatccacagcctgataaaagaagaagtatatcgtcaattactttcctccgtcgagcaactaccaccacaatgtaaaaaaatctgtttactcacgttagacgggaaaaagccctctgaaatagccaaagaattagatttaaatgtcgaaacagtaaaaaagcagaaaaaaatagcattaaaacgcttacaagacaaattccggatattgatacttttattatcaacaacttgatacttgatccaaatcgcttgaataaataacatttggtaactaaatagatagtgatatataatatcttgtaaaacctttctttaccattggcttaggacaccaactggataccaacacaacacgaaccaatcatatacatagatcaatgtacatgttatgtatatgccatatttatgctatgtcaatgctctagggaaaggatagcccaaccatagttattcatcggacaagggtttctccatacttccttttacacaccttcgttatttcgctgattatttcgtacttttgtcccgtcatcatcctccatcatgcaaatcctcaaacaatataacaacatgaagtcgaccaatatcactcgagaagaaatgtgggctaaacaacacttatcaatacatgatattgattacgccgtgtgggaacgggataaatccatgcttcataaaatggctagagttagtcgaaattgcacgtttgtagttgatgtttacaaaaataaatacgtttacgcctctccacattttgcaaacttactaggttatgatgaggacaaaatcgccaccttggagaaacagggagattacctggaatcccgatttcacccggatgattttgatcagttggttgatttacagatcaaactgggacaattcatttataacctgcccgtagaacaacgcaatgattattgtaacatttacagctttcgagtacgtaatgccaagcaacaatacgtgagagtaacgaataaagtgcaagttttggaacaaggacgtgctgggaaagcatggcttatactaggcaacatgagtatttcaccggatcaaaaggattcaggacaggttgcctgtaccgttctcaacctcaaaagtggtgaactattttctccaacgttattattctctccgacaatccatctaacagaacgagaaacagcaatattgcacctgattcaaaaaggattactaagcaaagagattgcccataaactccaaatcagcattcacaccgtgaatatccatcgacaaaatttactccataaactggaagttcaaaattccattgaagcaatcaacaaagggatagaattagggatactaaaataattagacaaaatcaacgtagaaaataaaaccttagtaaagatagctataaataactatttcctcctccatgttgttgaattaactttgttcttcttttcgcgcaattttaattaaaacaactaggaggctatggtgttcaataaaacggaagaacaggaaaaagagtatttacgacagattatcaacattataaacaattcaattaacaacacggacaagtctgttaaagaacacgttgacacgttacaagaatacaaggaatatctatgggcaaataaagatattgatccacacgagatacgttctatgcgagaaagtatactacaccattttgcaactggcgagagtgttattgacaaacgcaaacgactagggaaaattctagatattccctatttcgggcgcatagatttcaccgaaagaaaagagggaagcgaaacaagggtattatatatcgggattcacacattttacgatcccggtaaaaaagcgaacctaattcacgattggagggctcccatatccagtatgttttatgaccatgaactgggtgccgcttcctatttctccccaaccggaaaggttgagggagacatttctctcaaacgacaatatcgcatccgtaaaggtcagatggaatacatgatcgagagttcattgaccgttcatgatgatgttctgcaaaaagaactaagttccaataccgacgataagatgaagaatatcgtgaccacgatacaacgggaacaaaaccggattatccgaaacgaagatactcaaacactaattatacaaggggtagcaggatcagggaaaacatccatcgccttgcatcgcatcgcttacttgctttacgcgcaaaaaggagaaatcacctcaaaagatattctcatcatctccccgaacaaggttttcgccgactatatctcgaacgttctcccggaactcggcgaggaaacagttcccgaaaccagtatggaacaaatcctttcgggggttcttaacaataaatacaaataccagaatttcttcgaacaggttacagaattattagaaaagccaacaccgggatttattgaacgaattcaatataaagcatcctttgatttcatctcgcaactagagaagtttattcttcacatggagaaccactattttaaagcaacggatgtcaagctaacaaaatatattaccgttccggccgaatttatcgatgagcaatttcgacgattcaaccgctacccgatgcgccaacgtttcgagacgatgacggattatatcttaaaaatgatgactttgaagcattatttcaaggtgacaacaacagaaagaaacctgttgaagaaggaaatacaaaagatgtttgccggaaacaacgacctccaagtttacaaagacttcttcatgtggagcggaaaacccgaaatgttcaaaatgcacaagaaccgtacactggaatatgcagacctagctcccttggcatatctccacgtagccttagagggactccctgccccttctcgaatcaaacaccttttgattgacgagatgcaagattactcccctatacaatacaagatgattcaaaaactttactcctgccggaaaaccattctcggagatgcttgccaatcggttaatccctacggttcatcaacagccgagatgattcaaaaagcatttgtcacgggcaaggtaatgaaactttgcaagagttatcgatccacgttcgagatctcgaatttcgcacaaaggattcaagcgaacgaagacttggaagccattgcccgacatggggatgcacctaccgtactttctttcaagaatccggaagaagaactttccgccatctcggggataattaccacattcaaaaagtcgaattacaaatcacttgggataatatgcaaaaacgaagtgcaagcacaagaaatcacggaaagacttaaatcacacacggacaacctctatttcctctctcaccagagtacggctttcgccaaaggaattatcatcacctcatcccacatggcgaaggggttagaattcgacgaggtgattattccacaaacaaatgccagcaattacaacacgcttattgacaaaagtatgttttatgtagccgcaacgagagccatgcacaggctaaccatcacgtactgggacaaaccaagccgattcattccttttcccaatccttacacacgtcaatccactcccgggaacgggaacaatcctccagctccttgatagacaactcgacagcactattacttgtccccgctgccggataaacaatatcaaagcgtttaagcgaaacgtccaaaaacacttgtgtttcctcgggaataacaaacgggcagactcctccgggggcatgcccgacatattgctccaccaattctcccggtatcattttcgctttctgatgaaaatactccttgtattttttattatcaatcctggcatccccggccgtaacaaccaatatcggcttctctcccaacaggaaagacattgttttagcaatacgctccggctcacaccccacggcaacagccgcttcctccacggtagcactcgactgggccagttcatgaaccctttgtcctaaaccaaggctatcaaaatattgttttactttttccagtgacataacaattcctctgcaattatcgtctagcaaagataaagtaataaaaataattgtaatcgaaggaagtaaaaaattatcccgggtttgagacccgggataaactgcaaaatccaatttattacttttgagaagtaatttctgccaacaaaagagttttatcagactggttcttcacgttcacgatgattttcatctgttcaaagaatcgctttactttctcgtcaataccggagacataaatcatttttataccacagtccactaaccactggataaaataattcatattccgatttttcacttcactattctttatagaaacgactttatcatcttctgtcgtaattgttgatactttaatcgccttttctccaatattttcaccgagatggcagagctggttatcttcaaaaaacaaagctgctttcataattttatccgaatggtttatatcattattatcacaaaaatcacaccagaattatacgaatgaagaacaataaaagtttatttttattctttaatatattacggattttctgaaaaatttcttctactaaaaattccacttttgaattatctttgtacgctgaaaatacaatgatatgaatttgatgctacccctttccgtgttttccaaattacaaatgtacatgaccttgctatggatcatgttcctctccggttgccagaataccgaagaaaaagagatcgtgatcatatccaccaatgacatacacgggagaattgaacaattctccaaactggccacattcgtgaagcgcatcaaggaggaacacccgaacgtgattctggtagatgccggagatcgattcactggcaacccatatgtggaccatgcgaaagaaaaaggcttccccattatttcgctaatgaacgacttgggctacgaggtcggaacattaggaaatcacgaattcgatttcggacaaaaaattcttcgggccagaataaacgacgcaaccttcccgattatctgtgccaatatcaattcctcccggggagaactggacagtattcctccttattatataatcgagaaggacggtatcaagctgggtttcattggtcttgtacaaacggagacagaccaaataccaagtacgaacccggaacgtttaaaagatattacctttgaccattatctcgataaggtggaagattacaaaccgctcaagcgccaatgtgacgtactaattggcctcacgcaccttggagtggacaaggattccattctagcaacacaaatgccagaactagacataattatcgggggccatacccacacgttattggaaacctcgaaagagataaataacgttataatcggacaaacaggactcaagttgcaatacgccggtctgaccatattaaaattcacaaagggcaagctcaccgaacgttcttaccaatcctgcctgattgacacaattacacgggttgattcttgcataacacgaaaagtcaactatttcatggagcaacccgaatttaaagaagttatcgggattagctccctcccgtttaaatctcaagaaagtatcggtaatatcgtgactgacgcaatgctacgttcaactgtatctgatttcgccttctacaaccaagggggcattcgtctttccgcacttccccaaggagacatcacgctggaaacccttctctccatagaaccttttggtaaccatatcgtccttcatgacttatctttaagcgacataaaagctttaatactaaatcggttcaatcaagatggccacgtgatagacttgtatgtatcacccggcagttacacgattattcaagatcaacagggaaaaggaacagacgtcattcttaaagaccgtaacggtagaccactcgttgagaaagcctcctataaagtcgccctcaataactatgtaagcattcaatacgactttcctgacaagggaaaaggactacatacagatatttccattgtaaacgcaatggttgattttatccgggcaaacacccctctcgttccaacaaacaagcgtacttacctatcgactgttaaataacacaatcgcaagacaggctctacacggtgcgggaattaaacattttctattattttaaaaaacgttcaataaatgatacgttaaaaagaggaggccggataattatctaaacacaagtcttttaatacagattgttgacaatcagtagatattaaaaatgaacgttgttttttgaacattcaatatttttactacatttgagatcaataaaggaacgttttatgatatcacgacagatgttgtaataccattttacttgtatggattaagtgatatttcccggaagggaagtgtgataaaaccttggtatgagcgaggaagagatgataaaagcgatacttaaaggtgatcagaaagcctttaagttattggttgacaactatcagttgatggttgtcaatacttgtcatgctttcgtgcatgatcgggatgaggcggaagatatttcccaagacgtttttatccaagtctttgaatctctaggtaagtttagatttgaaagtaaattatccacgtggctgtaccggatagcagtgaatagatctattaatcactgcaaatcccctaggggacgagccataaaagtcgatatagaatcatggaaacaacaagaggtggcacaatcgcctgaaatgccacaacaacaattattggaagaacaagagcaactggaattattacaccgggctattgaccgacttcccgaaaatcaacgcacggcgttaattctaaacaagtatgaagaactttcatacaaggaaattgcagagatcatggggacttctctctcctccgtggaatcacttcttttccgtgcaaaaaataatcttgagaaaatattcaacacgaaataaaagacattgtcatgaaaaagatgaataaaaaatatttgatttactgggtgaacattattctgctgatgttgaatacggctctcctcgtattcttttgttttactcccgacaaaacagtctacaagaatgaagattccactatatccaacgaattcttacgtgaagaattgaatttcacggatgagcaatataaactcatcaacgaattagataaagatgtcctaagaagacaccaaaccgtattaaagctactctgccaaagacgttatcagatgttgaacgaactggcaaaacccaatccatccacggaagagctgaacaaaattgccacgtccgtgggacacttgcataaagcactgaaaacacaaacagcacgacatttactcaatataaaaaaggtatgcaccccggaacaatcgaaaaaactcgaaaaaatgttcatcgatttactggagattaacaaacattgttcggaatgtgcagaaaaatgtacggatcaagaaaaatgcaaaagatgtaataagttccaccattacaagaacatagaatccgattcactagagacaaacagagattctacaaaaaatattacgaaataatgaaaaaaagtatcttgccagcgcaagtttttataataaagtctgtcatataaccaaagagagaaaaatcatgaaagttgaagagatcatcgaaaaggacaaagtaagggaagtgcgtgaggacttttataacgggatcatgaaaaagatggcccgaaataaagtggatgatgccggtccggtgatccgcaaaagacacctaggcatgagcattgccgcaggaattgcactaggcattctggtgggcagtatacaccaccacatgcacaagaccgatcggcaagtggcaatgcaggagtggctaggaaagtataatattaacgacactaaacttgaatgtattgaggacagactttttaattaaaaacagctaaacctacaagatcttactatgagtttgaaaaaattgttttttttaagcacggtcatctttttgatcgggcaaatggacctctttgcccaatctgaaaaggtcagcctatccggaactatacaagatgcaaaatccggtgagacactccccttcgttgtggtcaatatcaaggacttaaatctatggaccacttctgacattaacggaaaattttctttcaagaacgtaaaaaaaggtgaatataccctaaccgcttcttgtcttggttacaaagattatgaaatgaaaattaatctaagtaaaaatatcgagaaatacattctaaaattagaggaacaaaccctagcactaaaagaagtcaccgtgaccgcaacatccggaaacaagctaaacagttcttcctctattaaaaaagcggcattggaacacgtgcaggcttccagtatcgtggacgtgatgcaattactacccggatcgttgaccgttaatccaaacttaaacgacatctcgaaactgacgatccgggacgtcacgggaaaagatgctaccaacgctttcgggactgccgtgatcgtggacggggcacgtatgtcaaatgatgcaaacatgcaaatgacctctaccgctctatccaatcaaggcataagcacttcggccggaaccggaatcgatgcccgccagattgccgtggataacatcgagtcgatcgaagttatccggggtatcgcctctgccgaatacggagacttgaactcgggagctgtaatcgtcaagacaaaggctggaaaatcccccctagaggtacgtttcaagacagacccgaaaatcaaacaggtttacgcaggcaaaggttttgcattgggagaaaataaaggatttctgaatattgatgccgattacgtgcaatcacagaatgacattcgaaccccggcaaaatcctataaccgtttgaccgcacaaatcggttattccaacgtgttcaatccgcaaggaagagcttttagtttgaatgctaagcttaaaggtctaaccactttggacaaacaaaaaagtgatccggacaagcaatctgaagaaaagacaaaagttgaaaatcaagaaatcagtttgaatatctacggaaactggatgataaacaaagcttggttaaccagcctgaaatacaccgtggccggatctctcggaaaacaatacaactgggaccacgaacaacatacaactgtcggggctgcaaccacaaattccatggaatcaggagaacacgtggccggttttcttccctatgaatattatagtgatctgaaaatcgagggaaagcccgtttacgcacaagccaaactaacggccaacatctccgggaaatacggaattttctataataacttcatgttaggaggtgaatggagtacaaaaggaaatgaaggcaaaggaaaaagtttcgacccgaacaatccgccgacccagaacattcgtccccgttcattcaaagacattccctacatcaatgaatacagtggtttcatcgaggacaaaataaaaattgaaataggcaaaaggtcaatagaactttctgccggaagccgattcaccaagattgacacgaaaggagctgattttgacgtgatcgtggatccacgttttaacgcccgagtaacattattagaaaatcgctggaacaagaaaggatgggaaagcctaagcattcgtgttggatggggaatccaacataaaatgccgacactagcctacttgtacccggacccggcttatatagacaaagccagtttctcgttcaaagatgacgctaatgatcataaattagccgtgattaccacgaatgtattcgaaacggacaatgaccatttgaaaattcccaaaagtaacaatttcgaaattggggtagatttcaaagtactaaatattaatgccagtttagcttacttcaaagagaaactgacccatggatacaaccaagccggctatgccgttccctatcaataccgggaatataattacagttccagcctgaccaacccggaatacgtaaacggagaagtcgtggaaaacgggacttccgtgggttaccgcaccttgaaaacattcggagttttccaacgcccagataacggaatcaaaaccgataaatgggggatagaatactccttcgatttcgggaagatcgacgtgatcaagacatcaattcttgtagacggggcattcttccacacaaaaacattcgacaatagcctcaaaatgattcatgaatcccgatatataaacaatgaaccttatccctatgtcgggttatacgtgggtggtaccaatgtcggaaatggaaatctttatcaacgcttgaacacgaacttgcgtttagtgacccatattcctcaattacgtcttgttttcacgttaggtgctcaatgcgtgtggatggataaatcgaaagccttatcgaaataccagggacaatgcctagcttacatgaaagacgacaacggcaacattattgaaggaaatgtagaaaaagacaaaacctataacaagtatattaatccggtagcatacatggatcaagacggtactattcacccgttcactgaaacagaagcaaacgacccggtattccagcacatgatcaaaagcgggaagtccacttattttgtggaagattcccttgatccgtatttcatgttgaacctgcgtatgacgaaagaaatcgggaaatttgcctctctttctttctacgcaaacaacttcaccaatgccaaaccttggagatattaccaatccagcggttctgactttagagtaaacagcgacattagtttcggtgccgaaatcagtctgaaattttaacggattaaaaaaggaataaagatgaaaacatatcatatacttacacttctggtcgtattccttttcacgggatgtttgaaagaagaaaaaatgagtatcgaggccttaatcaaggtgaatatgccggaaggttttgaaagcatgaacccggaagggattgacgtgaaactatacagcacaacttccggtcttacttacacaagcaagtgtgacgcctccggtatcgcaacatttaacgtggaatacggtttctacgaagcagtagcccaacaccgggaaagaggagaaaacacgatcgacattttcaacggaagaatggaacgaatcgtattaagcgaaagcgcaaaagatggggaaacttacacgataaacctgactcatgctaaattacagcagttaatcatcaaagaggtttactacgcctcttgtaaaaaagatgacggtaaaaactatggaaaagacgcttatatatctatctacaataattccgacgaaatcgcttacctagacagtctctgcatcggaaccgtaaacccagtcacgagtaacagtcctagtaacttcaccaaaccggacggaagtttatgggatgaaattccactatttatgatggcatggcaattccccggtacaggtacagattacccattacaacccggagaagagacgatcatcgcaatcaacgccatcaaccacatggatattgcctcacaatccgtggatctttccaaagccgattttgcattctgggatccgctgttaactgctgcatctgttcccgcaccgggagttgaacctttaaacatgatctggagaaataacggcacggcatttaccatcagtttgaccggaccggccatgatcatcttcaaaattccgacatccgcagccattagtgcacaagcctatgcagaagactccaaaaatcttcaactggatccggtaaaacccaatgcctctcaaaaatacttgatgatccataaagattgggtaattgatggtgttgaatgcgtgacaagtgccagtaaagcaaacaaacgaattccgaataacattgacgccggattcacctatatcccgacgagtaacttaggtaattccgtttgtcgaaaagtagacgaagttgtcgatggcagaaccatatacatggactccaacaattccagcgaggatttcgaagtagttccgaacacattaaaaaaatagatagacgaactgtatctaaaaatgaagattatgaaattcaaaaaaatatatacacttggtctgggtctactcatcgccgggatgtcggcagcaaatgcccaaactcaagacaacgagaagattttttaccggatggatcgggtcaaagccaacaatccctggacaaagtctttaaactatgccggattaacattcaacgagaatcaagatttcactatcgtagaacttgattttcaatatgggaaaggtagttttagaaatataaatgctcctcacgcgttcaataaaacaaacctacaaacagaatccttccgaagattgaataaagtattcttctacgggaaattcagttttgactacatgaatcgtcttaaaatgggatggtgtaatgttatcgacccgtaccgctccccaatattctttgcagacagtatgccgggacgccagaccatggagacttacatcctggaaggcggtatcggctacatgctcgggaaacgctggagcatcggagccaaaatcgattacttaaccgctagtaacgccaagaaaaaagatgcccggaacaaaaacacgtacatgaacctgaaagtgtacccgggagtggtttaccgttcccaatacctgaacttgggactgaacttcatttaccagaaagaaaccgaaaacattgacatcaggacaattggaacaggacggacaccggagctcctttccgttgaagggttgtggttctacacgtcggaacaagtaaattcaactaccagtattatccgggacattcgggatgaatccttgggcggtgccgcacaagtggaattccattcccgccgaatccgcttctttaaccaattctccatgttagaaaagaaacaggaagttttcaaggccaactacaataaagagcgcgggggagaaatgaaacaacgtgcgtataattacaccggggctttcaatgtcagcggagaaaaatacagtcactatattaacctgcaagccgatttttcgaacatgctaggctacgagaacatccaacaaaaagaagtcataaaccaaaacagcacttggacacaattcgggaaaaagaataaatcttccatcgaatccatcgtttacgacgcaaattacaacctgttccgtaatcgcaccgcatacaacagttgctggaacgcacaaattggggctaaaggcttttacgcggaaagagtgtaccgtctctaccctgccaaattccaacaaatattgagaaacacagaaggttacctttcactcgaaaaaaacttcctgttcaaaaaaggaatgctggattgcggcataaatggtgcttacacgattgggggaggcacaatgctaaaaatgaaactggaagccgaaacggtcttgccgaatattgacgaatacccacaacggaaagacttactggaacaggaattcgagtacatcacgtcggataaaattgccggaggagtaaacgttcgctacacctatttcctcaacaaggaaaaagggatgaacttgtacgctatcggtaatgtcaattataaaaagtccaccagcggcctgtatgacggtaagaactggacaaccttacaagccacgataggactatcattctagggaatcacaaataacaaatatagcaaaaagaaatgagcaagattaagaaaaatttatggagacacgtactgcaactgggtgtaattgcagtcattgccggattcattctgaaagtatttttcggaggagaacctgccaacgttgaagcctattgtccgttcgggggcctacaatccctcgtaacttacttgaattcaaacacgctggcatgtagcatgtcgatcgtgcagattatgatgggagtaaccttggcaatcggtgttattcttttcagtaaactattctgtggctacctctgccccctgggtacggtaacggaatggatggccgtgttacgcaaaaagatgaaaataaacatcaacatcaccacgggttcagttgttgacaaaatcctaagagcaatcaagtacatcctgttattctggatattctacatgacaatttccagcagtgaactattttgtaaaaactttgacccgtactacgctattgcaaccggattcaaaggcgaacttaccgcatggatggcggtgatttctatcgcctgcttattcctgggtaacttgtttatcaatatgttctggtgtaaatatatctgtccgctcggggcattaagcaacgtgttcaaattcacacttacctttctggggctactgatactctcgttaatcctaggttatttcggactaccgatgcaatggtactggttactaggtgcaagctgtgtaatcggttatatctttgagatcgtttaccacgagagtaaagtattcccattactccgcattacccgagatgacgaaaaatgtacccattgcggtttatgtagcaaaaaatgcccgcaacaaattgacgtggcaaacttgaaagtcgtgaaagacattgattgtactttatgtggtgaatgtatgggagcatgtaataaaaatgctttacagataaaccgtaaaccggcattccgatggttacccgcaattctagtcgttgttctcttcttcgtcgggctgtggatgggtacccattgggaattgccgactattgacgaacgttggggagatccggcaaaattagaacacctcgaatcatttgaacgtgaaggaatgagaaccgtaaaatgtttcggtagctccaaggcatttgcagcccgtatgaaaaacgttccaggtgtctacggagtaacgacctacgtgaatagattcgctgtcgtggtttactatgacccgagtgaaacgagtaaagaaaaagtagaaaacgccatgtttaccccggtgaaacggaaactgaatacacctcctgccggagtggaacaattaaaaataatcactttgggcgttgaaaaactatttgaccagatggacgtaaccttcttgggaaatattattcgtgaaaaagaaggcttctatggaatccaaaccgaatatgactgcccggtaaaagtgaaattattcatggatatcaataaaccgatcgacaaaaaagaattaagaagtattatcgaaacccgtgaattcgaaatgccggtacatggcggcggggtcaagaaaatcgaatgtgactacgagctggtaaacatctcgaatcaagtggatacgatcggtcgtcaggaattcctcgaaatgatgttcccggcaaccaaatcacgtttccaaatcgccttgaagaaatacggggaagatgccgccacggccgtttacgaaatgccttacccgggattagacaaaccgttagttcagcgtcaagttccctatttgggaagtttcctttccacccaagatggagtgatggaactcgccacggcactgaacggcgatacaccggttatccggatcacgtacgtgaaagaggtactggacgatgataaaatctgggaaatccttcaaacaccgaaatgggaaatccattacacgaacgggacgaccaaagaaattgatgctactctaaccttcaaaacaccgggtaaaaccgtcgaataaacacttgtttccaagaaggagtgtcaaaatccattttgacacttccttcacgggaaactcaaaacaattttaccatgctttcatcttgccagagtaatccaaatggattaccccgcaagacttatatccatacaatttgtaaatcaccatgataaaatacattatctacaccatattattcaccttgaccatcagtcccttggtggctcaggacatcggtgcagaccaaacaatcccaatggatcccgatatacggatcgggaagttggataacggactgacctattacatccgtcattccgagaatcctaaaaacaggggggagttctacattgtccacaacgtgggggccatgcaagaagaggacaaccagaacggcttagcccatttcctggaacacatggctttcaacgggacaaaacatttcccgaaaaaaaacatgttggaataccttgctagcatcggcgtacgattcggaaccaacgtgaacgccttcacgtccagaaacgtaacggcatacaatatctcagaagttcccttagttcgggaaacaatcatcgataccgtgttgctgatgcttcacgactggtccagttatatcacctgtgattcggctgaaatcgaggctgaaagaggggtcatccgggaagaatggagaacccgggacattccccgtacgcgactatcggaacaactgaatcccgtgatgtacaaccactcgaagtacgcaaaacgcaacgtgatcggggacataaatatcatcatgaacttcaaacgtcagactttgttggatttttatcacaaatggtacagacccgacttgcaggccgtgatcgtgatcggtgattttgacgtgaacatgatggagagtaaaatcaagacaattctatcaccactacctaaagcactgcatccggtacaaaaagaagtgtattcggtccccgacaaccaagagcctcttgtcggtatctcgactgatccggatgcaggtgccatggtggtcagactcatgtacaagctagaccttccttctcccagcgaaagacaaaccgtgaaggcctacaaaaccgacttgaaaagaagttttatttccgaattattcaagaagagaatcatcaacaaagccgcacaaggaaatccctatattcgtcagggatcagtcaattacacggatttaacacccgataaaaagatggtgttcatcatgggtgccgtgaaaaataataaagtcaatgaagccctgaatgaactcgctatcgaagtggaaagaataaaaaaacatggattcacaccggatgagttcaatgaacagcaagccaatatgcttaaatccgttaaactccagatggaccagagaaaaaaccttaaaagcgtggatatggtgaaagcttgcctagcccatttcaccacgggtgctccaatcccatcaaatgattttcttgaaaagatgtccgtctccacgttacaaaatctaactttggaggaactgaaccgtacagccctagagatgttctctgatgacaacatacttatcacggtactcgggccccggcgagaaaacatcagttatcccaacgagcaagagttaatcgccaccgttcggaacgccaaggaccaagacctcacaccttacatccatcggacactgaaagacactcggctaatcacgaagacaccacaagccgggaacatccgtgaagaaaagaaaaacgacacaatgggaaccattgaatggactctttcaaacggtgcaaaggtcatcataaaatcgtacccgacgaaaaaagatattgttgacatcaaaggattcagccaaggagggacctctactctaccggaagaagaactttccaatggattcatggccaacaatttctgccaactcatgggagtgaagaatttctcacgaagtgatttaaaacaaatcaatgtcggtaaagtaatctccattacaccggaaatcggggaatatcacgaaacattaagcgggtacgcagccaaacgtgacctggaaaccttgatgcaaatgatctacctttacgtcacggaaccgaattttgaccaacaagagtttaaccgccagatcgaaaaaataaaaagcacgctaaataatcgcaagggcctccctaaagccgaatatagccaagagattcgaggcgtgaaatacaaccagcatccaaggaaaacaagtatgacccttgaaaaagcgaacacgatcaccttcgaaaagacaaaacaaatatatcaagaacgttttgccaatgccggagacttcacgttcattttcacgggagacattgaactggaaaaattaaaaccgctcgtggagacgtacattgcctctctaccgacaacaggaataaagcaggaatacaaagataaccacgtgcgttacgccaaaggaacaatcatccgtcatatagagaaagagttgacaaccgacaaagcctcaatcagcgtgctttacacggcaaaactcccttactccgccgacaacaaaatcctctcggccgctttctgctatatccttcgggacaggtacatgaaatccatccgcgaagagaaagggggagcatacagcgtaagtgtgaacgccacggaagaggctgttccgaccaaccagatcgcaatagaagtgaatttcgatacggctcctttcatggccgatgagatgctggaaattgtccaaaaagaaatcgacgatcttgttaaaaacggtccttcatcttccgaactggaaaatgctcaacgctattttaacaagctttacaagaccaacatttccaccaatgcctattggcaggaaactttatcagactattacctacacggaattgacaatttcacgaattacgaaaacaagatgagcaacctaactccatcagatattcgtaagttcgccaaaaccgtgtttggacagaaaaataaaatggaattcgtattactaccaaaaaaataacgggatgaagaaaataacatttatcaaaagcattattgctactctcttaattgcaagtagcacgtttacagcaaaggcagacgaaggaatgtggttgatccatcttatggctcaaaccaattacgaggcaatgaaagccaaaggagttgaactctcggcagaagaaatatatagtgaaaccactccttccttaaaggatgccatcgtggccctggatttcggaagctgcacgggaagcatgatctccaaaaacggtttgatgatcacgaatcaccattgtgcttacgacgacatccagaagttgagtagtcttgaacacgattacctaaaaaatggtttttggtcaaaaaatcaaagcgaagaaattcgtataccgggtaaaacagtcatgtttctagatcgggtgatcgacgtcacggacgaataccgagaagtactgaagaatttcgagaaagatgacggaagcatcccatacacatccagaagagccaattccgtgatcgagaaaaagtacgcaaaaaaaggattcgaagcctcatgtgcggccatgttgcgcggcaataaatattacttattttactataaggtgtacgaggacgtgcgtcttgtagcggctccccccacttgtttcggggcattcgggaaagacacggacaactggtcatggccacagcacaaaggagattttgccatgtaccgagtgtatggcgacaaggatggaaatcctgcaaaatactcaccaaataatcaaccgatcactccgaaatacgtgctacccgtgtcaacagccgggattaaggaaggtgattatgctatggttttaggttaccctggatcaaccgcccgctacacgccatctttcgggataagcgagaaaattaacatcacgaatcccgccatgatcaaggttcgagacatgaaactagccatcctacgggaagccatgaatgccgatgagaagatcaacatacaatacgcttccaaatacttcatgaacagtaactactggaaatatgccattggcgaatgcgagtacacgaagaaatatgatgttgttggtatcaaaacagcagaggaggcaaaactaaccgcatggatcaacgctgatccgacacgcaaagctaaatatggtaacctaatcgaggaacttcgagcttgttacgcattcgccgccccctatatggccacgggcatctatcaccgggaagctatcgtaaacggggctgacttgacccgcttggcaatgcgctttaaaggatttgaaagcaccatggaaaaacaaggatgttgtgtcctacacaaagattgtgctcaatgcaaaaacctaagacacttctgcgaacaatattttaaggattacgacgaacaggttgaccgtaaaatctttactgccatgatcgagttgtacgtgaagaatatcgacccgaaattcttcccggaagagatcggtaacctagtaaaaaaattcaaaggtgattaccaaaaattgaccgattacgtttacaaaaattccatactaacgacaaaagaccgcttgtttacttggctagacaagggcgttgataaaaaaacaatcgacaaggatccggcatatctaatcacgaagtccgcacaaacgaaaaactacgagttacgtgattatttaaaagacaatagtcaaaaaataggaactttacgcacactttacatggaagctcttgtcgagatgaacaagggaaccgtgcttcctccggacgcaaattcaacgatgcgaatcacttacggaacagttggcggttactcccccaaagatggtgttatttacgactaccgttcttctatcgacggctacaaagaaaaatacgtggaaaatgaccctgaatttgacttgaacccggactgttgggctgccatccaaaaaggagattggggacgttatgccgacaaagacggcaaactttataccggattcgccacaaatctcgacatcacgggagggaattccggtagcccggtgatcaatgccaagggagaattaatcggtttggcctatgacggcaactgggaatccatggctggagacctctattataaccctaaatataataaatgtgtatgtgtcgacattcgttttgtcctatggattctagacaaatacgcaagggcttcaaatttactaaacgagattagcattgttgaataataaaaaattactatatttgtttggtcaaggagtgagtaatcttgatacgaaaagcacactacgattatttaatgtttttaatcaatcgatcactgaagcacgcaccaaaaaagtgatcttagtttgattccttgacatagcggtctccgagtggggccgctttttgcgtctaatcattacactcgcccatattacaatatacactct

SEQ ID NO: 10714 - DNA, 48251 bp, Unknown
  gut microbiota DNA sequence
ttcgaaagagcagggagggaaaaatagttctttcatagaatttcattggtttattgtcggctaaccttctcacagtcttatacttttttcaaaaaaaaagatagaaatgtttggtggtgatggataaagttgctacctttgcgagccaaattgaataaaagtaactaatttaaaagtacttgtatgccaactattcaacagttagtaagaaaaggaagaacaaaaattcaggacaagagcaaggctccggctttggatgcttgcccgcaaagacgcggggtttgcgttcgtgtgtacacgacaaccccgaagaaaccgaactcagcgatgagaaaggttgccagagttagattaaccaacgggaaagaggtgaatgcctacattccgggagaaggacacaacttgcaagagcactctatcgtgttgatcagaggtggtcgtgtaaaagaccttccgggagttcgttatcacttggttcgcggtacattggatgctgccggtgtaaacggtcgtttacaaggtcgttctaagtatggcgctaagagaccgaaaaaaggtgctgcagcagctccggcaaaaggtaagaagtaaaaagattaattgacaggagttgtttatgggttgttcccgaaaagttgagtaaatggtcgtgagaccgttgaagaccggtaagggcagcgaacgaacaaattcgtaaactagaagagatgagaaaaagtaaaccaaaaaaaagaatcctgttaccggacccgaagttcaacgacgtgttggttacccggttcgttaatgatttaatggtagatgggaagaagtctatcgcgtttagaattttctatgatgcaatcgacattgtagacgagaaaatggccaagaaggaagagaaacctgcattggacatctggaagcaagctttggagaatattactccgcaagtagaggttaaaagccgtcgtgtaggtggtgcaacattccaagtgccgatggaaatcaacccgatgagaaaaagagctatctccgtgaaaaatatgatattgttctctcgcaaaagaagcggaagaaacatggcagaaaaactagctgctgaaatcatggctgcatacaaggaagaaggagcggctttcaagaagaaagaggatattcatcgtatggctgaagccaacagagcttttgcacatttcagattttaattgaagggataagataaatggcaaagagagatttacattttacaagaaacatcggtatcatggctcacattgatgccggtaaaacgacaacaactgagcgtatcctgtatttcaccggagtgaatcacaaaatcggtgaaacgcatgacggtacggctaccatggactggatggtacaagagcaggagagaggtatcactattacttctgccgctactacctgtttctggaattatcaaggtcagcaatataaagtaaatattattgacactccggggcacgttgactttaccgttgaggtggagcgttcattgcgtgtgttggacggtgctgttgcattgttctgtgccgtgggtggagttgaggcgcaatcggaaactgtttggcgtcaagctaataaatacggtgttccgagaatcgctttcgtgaataaaatggaccgttcaggtgctgacttcttcaaagcagtacgtgagatccgcgaaaaattacacgcgaatcctattccattacagttaccgatcggtgctgaggatggattccagggagttatcgatttgatcgagatgaaagcttacgtgtgggagaatggtgaattggaagctacgatcaaggaaattccggcgaatttattggcagaagctcaggaatggagagagaaattagttgaggccgctgccgttcaggatgaggctttgatggagcgtttcttcgaagatcctgaatcaatcactgttgaagaattgaaagcagtggttcgtaaggccgttatcgctatggacttttgtcctgtgatgtgcggttcttcattcaagaacaaaggtgttcagaacctgttggatgctgttatcgcttacttgccgcacccgctggatattccggctgctgctggtaaaagaccgcgtacggaagaggctgtgactttcgagattgatccggaagccccgctttctgcattggcattcaagatcgctactgacccgttcgtgggacgtttgtgttacactcgcgtttactccggtaagatcgagtctggttcatacgtgtacaacccgcgtacagagaaaaaagaacgtatttctcgtttgttccaaatgcactcaaataaacaacagccgaaggatgtaatcgaggccggtgatatttgtgcttgtgttggatttaaagatattcgtactggagatactctatgtactgaggaaaacccgatcgtgttagagagtatgactttccccgagccagtgatcggtatcgctgtagagccgcttacacagaaagatactgacaagttgggtatggctttgtctaaattggcagaagaggacccgacattccgtgtaaaaacggatgaagattcaggtcaaactgtaattagcggtatgggagagcttcacttggatattatccttgaccgtctgagacgtgaattcaaggttgaatgtaaccaaggagctcctcaggtggcttacaaagaggctattaacggaaccgttgaacatcgtcacgtgttcaagaagcaaaccggaggtcgtggtaaattcgctgacatcatctttagaatggagccggctgaagaaggcaaagaaggtttgactttcgtgaacgaggtgaagggtggtaatattccgaaggaatttatcccttctgtagagaaaggattcaaagatgcgatggctaatggtgttttggccggttatgaacttgttagtttaaagatcactttgcttgacggttcattccacccggttgactccgatgcgttgtctttcgaaatggccgctaaaatcggttataaggaagccgctcaaaaggctagacccgtgttgttggaaccgatcatgaaacttgaggtggtaaccccggaagagtatatgggagatattatcggagacttgaaccgtcgtcgcggacaggttgaaggaatggaatcaagagctggggctcgcgtgatcgaggctaaagtgccgctagcagagcaattcggttacgtgaccgttttgagaactttgtcttccggtcgtgcaagttcatccatggaattctctcactacgctgaagttccgaagggtattgccaaagaagtggtagagaaaaataacggtagagtagaactattataagaattttagattgctgatttacgattcgagagtgatcgagaatcgtaaatcttaaatcataaatcataattaaaaacatgagccaaaaaatcagaattaagttgaaatcttacgatcacaacttggttgacaagtctgcagagaagattgtaaagacagtgaaggctaccggagcagtggttagtggtccgattccacttcctactcacaagggaatttttactgtaaaccgctctacgttcgtgaacaaaaagagccgcgagcaattcttggtatgcacgttcaaaagattaatcgacatctacagttcaactgcaggtacgattgacgccttgatgaaacttgaattaccgagtggtgttgaagtagagattaaagtttgataacggcgaaaacctatgtcgttattaagagattgaaaacctatttttaaaaagagaaaaaagagatgccaggtttaattggaaaaaaagtcggaatgacttccgtattcagtgccgagggaaaaagtattccatgcactgtgattgaggccggtccatgtgttgtaacccaagtaaagactattgagaaagatggttacacagcaattcagttgggttttgatgacaaaaaagagaaaaacacaaccaaaccgctaagtggacactttaaaaaggcaggcacaactccgaaaagaaaactcgtggaattttcagggtatgatgtcgagtacaagttaggtgatgtaattgacgtgaacttgttcgaaggaacagagtacgttgatgtagtcgggactagtaaaggaaaaggtttccaaggtgttgtgaaacgccatggatttgccggagtaggagaggctactcacggtcagcacaaccgtcaaagaaaaccgggatctatcggtgcttgttctacaccgtcacgcgtgttcaaaggaatgcgtatgggtgggcaaacaggtggtgacagaataacggttcagaacttggaagtgctgaaagtgatacctgaaaataatttgttattggtgaagggttctattcccggagctaaaggttcatacgtaattatcgagaagtaatggagttaagtgtattaaacattgccggacaagagacaggcaggaaggtagagttaaacgacgctatcttcgggattcagcctaacgagcacgctatttatcttgatgtaaagcagtttttagcgaacaaccgccaagggacccacaagtcaaaacaaagaaatgaaatttccggtagtacccgcaagctgaaaaagcaaaaaggtaccggtggcgcccgtgcaggtggtatcaagaaccctctgtttagaggagggggtagagtgtttggacccgtaccaagagattatagcttcaaattgaacaagaagctgaaaagattggcccgtaaatcagcactatctgtaaaagccgcctctaatgcggtaactattgttgaggatctcaacttcgaggcaccgaaaacaaaacagatgattcagctgtttaacaacctgaaattagataatcgtaacatcctgttggttaccaatgatatgaacgataatgttctgttgtcagctcgtaacttacaatacgtggatgtgatgagagttagcgatcttgcaacttacaatatcatgagagctaagagtcttgtgttcgttgaaagttcagtgcagggcctaaatgaaatgttcaatcttaatgaagagtaagacatgcaagtaattgtgaagcccattttgtcagaaaaaatgactgcattgactgacaagcagaacagagtagcattcgttgttagcaaagcagcgaataaattagagattaagagagcagttgaagcgatgtatagcgtgaccgtgaaatccgtgaacacgatggtgtaccaaggagatgctaaatctcgttacacgaaagcaggtgttatttccggaagaaccgcttccttcaagaaagcaattgtgaccttagcagaaggtgatagtattgatttttttagcaatatttaattaagatggctgtaagaaaattaaaccctgtaactcctggtcagagacataaggtagcgattacctttgatcagttgactacagatagacctgagaaatcattgttaggaccaaagagtaaaactggtggacgtaataacaccggtaaaatgacaatgagatatataggtggtggtcataaacaaagatacagaataatagattttaaacgcgacaaggataatgttccggctcgtgttgcaacgatcgagtatgatcccaatcgtacggcgagaattgctctattagtgtatgcagatggagaaaaacgttacatcgtggcaccggatggtttgcaagttggtcaaaccgtgatgagtggtgcaggtgttgctcctgaagttggaaatgcattgttcttatctgaaatcccattaggtacaatcattcataacatcgagttaagaccgcaacaaggagccgtgatggctcgtagtgccggttcttacgctcagttagtagcaagagaaggaaaatacgcttcaatcaagttaccttctggtgaagttcgtatggtactgttaacctgtcgtgcaactgttggtacggtgtcaaattccgaccacgcgttggaacgttcaggtaaagcaggacgtactcgctggttaggccgcagacctcgcgtgagaggtgttgtaatgaacccggttgatcacccgatgggtggtggtgaaggccgcgcttcaggaggacatcctcgttcaagaaaaggcttgttggctaagggttacaagactagagctcctaagaaacactctagcaagtatatcatagaaagaaggaaaaaataactgattaattattgatgttatgagtcgttcgttaaaaaaaggcccttttattgatttcaagttagagagaaaagtattggtaatgaatgagtccaataagaaatcggttgttaaaacctgggctcgtcgttccatgatctctccggacttcgtagggcacactatcgctgtacacaacggtaataaatttatcccggtattcgtgactgaaaatatggtaggtcataaattgggggaattcgcgccgacacgtacatttagaggccatgctgataaaaagaaaaaataatgcatggtaaagttgaactaaagaagatgtattaaaatgggtgcaagaaaaagattaagagcaaatcagaataaagaagccaaaaaagagaaggcttttgcaattcttcgcgattgtcctacatctcctcaaaaaatgagattggtggcagacctgatccgcggagtagatgtacaaaaagctttggatatgcttaaattttgtcctaaagaagctgctcgtagagttgaaaagttgttgctttcagcaattgctaactgggaacaaaagaacgagggtaaacgtgttgacgaagcgtccttgttcgtgcaggaaattttcgttgacggtgcgggtatgttgaaaagacttagaccggctccgcaaggaagagcacaccggattcgtaaacgttcaaatcacgtgacgatcgtgttgggaagcaagacagctgttgaaaacattacaaaagaatagttagcatgggacagaaagttaatccaataagcaatagattaggaatcatcagaggatgggattctaactggtttggcggtaagaactatggcgataaattggtggaagattacaagatcagaaagtatctgaacgcccgtctcgctaaagcaggaatcgctaagattgttatcgagagaaccctgaagctaatcacaatcacgatcaacaccgctcgtccgggtatcattatcggtaaaggcggacaagaagttgataagttgaaggaagagctgaagaagatcaccgataaggaagttcaaattaatatcttcgagatcaagcgtcccgagttggatgccgtgatcgtgggtaataatatagctcgtcagctggaaggtcgtgtggcttaccgtagagcaatcaagatggctatcgcttctaccatgagaatgggggcagaaggtatcaaaatcttgatttccggtcgtttgaacggtgccgagatggcaagagccgaaatctacaaagaaggtagaattccattgcacacgttccgtgctgatattgattacgctcaggccgaggcattgacgacttacggccagctgggtatcaaagtttggatttgcaagggagaagtttacggaaaacgtgagctggttccgaatgcattggttggcgctcagaaagagaataacaaccgtccgaacaatgccggcaaaaaaggcgggttcaaaaagagaaaaaaatagtcttttaacttttaaatagatcaagagctatgttacagccaaaaaggactaaatacagaagatcgcagaaagggagaatgagagggaatgcccagaggggacatgaacttgcatttggatctttcgggatcaaggcgttggagaatatgtggattgaacaacgccagattgaagcagcccgtgttgcagtaactcgttatatgcaaagacagggtcagatatggattcgtatatttccagataaacctattactaagaaacccgctgaggttcgtatgggtaagggtaagggatctccagaaggattcgttgctcctgttactccgggtcgtattcttttcgaggcagatggagtaccgtatgcaatcgctaaagaggctttgcgcctggcagcacaaaagctacccatcgctactaagttcgtggttagacgtgattacactgagtagtcgtgagactattttgaatttcgaaacgaaaaattgtaagagaaatgaaaacatcagaaattaaggatttaaccactgaagagataagagaaaagatcgagacagaaaaagctgccttgaccaagatgaagatgaaccatgctgtttctcctcttgagaatccgatgttaatccggacgacaagaagaaacatcgctagattgatgacggagttacgcaaacgtgaattaaataagtagtagaaaaatggaaagaaatcttagaaaagagcgtaccggtcttgtggtaagcaacaagatggacaaatctatcacggttgccgttcattttaaggagaagcacccgatttacgggaagttcgtcaacaagaccaagaagttcactgctcacgatgagaaaaatgaatgtaacatcggggatacagtgagaattatggagacccgtcctttgagtaaaaccaagagatggagattagttgaaatcattgaaagagctaagtaatcatgatacaacaagagagtagattgaccgtagccgacaacagcggtgctagagaagtgctttgtatccgtgttcttggtggtaccaagaaaagatatgcacgcgtaggcgataaaatcgttgttgccgtgaagaacgccatcccgaacggtgaagtaaagaaaggttcagttagtaaggctgtggtagttcgtgtaagtaaagagtacagacgtccggacggatcttatatccgctttgatgacaatgcttgcgtgttattgaacaacgcgggtgaaatgagaggaactcgtatcttcggacctgttgccagagaagttcgtgagggttataccaaaattgtgtcattagcccccgaggtactttaagattttagatttatgattttggattgcagacgaataatcgaatttcttgaatcataaatcgtaaatcataaatcataaataatttatacgatgagcaagaagtttcatataaagaaaggtgacttagttcaggtaaatgcaggagaagacagaggaaagcagggaaaagtgcttgaaatgattccggacaagcaaagagctattgttgagggtatcaacttggtaagcaaacataccaaacccaacgcaactcacccgcaaggaggaattatcaaaaaggaagctcctattcacatttccaacttgaacgtggttgatccggttactggaaaaccgacaaaggtaggacgtagacggaatgccgaagggaaattagtaagatacgctaagaaatccggacaggaattgaaatagtaaaataaataattgcaggttgtcccagagcaacttgcaattattaatttaaatttgtagctttgcagccgcaaatttagtataatatgccgtgaggcataataatcaaataattataaatgaaatacgtaccaaattacaaaacaaagtataacgaagaaattgtaccgactttgatgaaagagttcggatacaagtcagttatgcaagcacccagattggagaagatagtaatcaatcagggcgtgggatcatccatccaggataagaaaatccttgagttttcaatgaacgagattgcaaccattaccggccaaaagcctgttgcttgtaaatctaccaaggacgtttctaactttaaattacgtaaaggaatgccgatcggtgttagagtaaccttgcgtaaagatcgtatgtatgaatttttagaaagacttattgtttccgcgcttccgcgtattcgcgatttcaaaggaatcaacaataagcttgatggaagaggaaattacacattgggaatagaagagcagatcattttcccggaaatcgtgctggacagtgttcacaagatcatgggtatgaatgtaacgtttgtaacttcggctaataccgacgaagaggcttttgctcttctaagagaatttggattaccatttaaaaagaactaaaaaaaagcgaaatggcaaaagaatcaatgaaggcccgtgaggtaaagcgtgcaaaattggtagaaaagtacgccgcgaaacgagctaaattaaaagaggaaggagactatattggattaagccttctgcctaagaattcaagtcgcgttcgtttgcacaatagatgcaaattgacgggaagaccgagagggtacatgagacaatttggtataagcagaattcaattccgcgaaatggcatctgccggacttatacctggagttaaaaaggctagttggtaatatttaaaatttgaagagatgacagatccaatagcagatttcctgactcgtattaggaacgcagtaaaagcaggtcataaagttgtggatatccccggttcaaaaatgaaacgggaaatgaccaaaatcttaaaagaaaaaggatatatcctgaattataaattcgagcaagatggtgttagaagcaacattaaaattgctttgaaatatcatcctgaaacgaaggctcccgccattaggacattgacacgtgtttcaaaaccgggtctgagacgttacacgaatgtagaggacatgcctcgcgtgttaaacggattaggtatcgcgattttgtcaacgtcattaggcgtaatgtctgataaagaagctcgccaaaagaatgttggtggagaagtattgtgttatgtttattaataaaaagggcggaaaatgtcacgaataggaaaattaccaatagatataccacaaggggttacagttactgtaaatcctgataacacggtcgtagttaaaggtccgaagggagaactttctcaggacgtacacggagatatgatcgtgaaagtggaaggagctcacgttatcgtagagcgtccgtcagaagataaagctcataaagccatgcacggtttgtatcgtgccttgattcacaacatggttgtaggtgtttctgaaggttacacgatcaaacaagagttggtcggagtaggttacagagcaaatgctgaaggtcaagttcttgaattgggattaggttattcacacggaatcttcatggtgttaccgaacgaagtgaaagtaagtgtgcttaatgaaaaacgtgctaacccgattatcacgctggaaagttgcgacaaacaactgatcggtcaggtagcggccaagattcgttcattccgtaaaccggaaccgtataaaggtaaaggtattaaatttgtgggtgaagttcttcgtcgtaaagctggtaaatcagctaaagtttaatcacctgtaaaaaagtaatgttatggctttaactaaggtagaaagaagaataagaataaagagaagaatacgtaaagtaatcttcggaacagctgagagacctcgtttgtccgtataccgttcaaacacgcaaatttctgctcagttgattgatgataacgccgggaaaactctggtatcagcatcttctttatgcaaggagatcgctgaaaagaaaggtaacaaaacagaacaggctcaattattgggtgccatgctcgctgaaaaagcaaaagcagccggaattaccgctgttgtgtttgacagaaacgggtatttatatcacggaagagtgaaagcattagcggatgcagctcgtaacggtggtcttaatttttaaaagtaggcaagaatggaacagaagattaatagtgcagacttggaattgaaagacagattggtggctatcaaccgtgtaacgaaagttaccaagggtggtagaacgttcagtttctctgctattgtggttgtaggcgacgaaaacggtaccgtgggttatggcttaggtaaagctaacgaggtaactaccgctattgcaaaaggcgttgaggctgcgaagaaaaatttgattaaagtacctgtattgaaaggaactcttcctcacgagcaagaggctaaatatagtggtgcaactgtattcatgcgtcccgcttcttccggtaccgggttggttgcgggaggtgctatgcgtgccgtgttggaaagtgcaggagtgaaagacgtgttggcaaaatctaaaggatcatccaatcctcacaacttggtaaaagcaactttcgctgctttgaagttattgagagatcctcgtatgattgcacaacagagaggaattagtcttgacaaagtgtttaacggataaactggaagtaacgatggcaaagattaaaattacattggtaagaagtagaattggtagtgataaacgtcaagttgctactttgaacgcactgggcctcgggaaagtgaacagcagtgttgaacacgaaacttcaccgcaaatcatgggaatggttgctaaagtgcagcatctcgtgcgcgtggaggaagtaaagtaattgttaaacctattttaaagagtatacaatggatttaagtagcttaaaaccggctgccggatcaactcacagagaaaagagaattggtcgtggtcaaggttccggaaaaggaggtacttctacaagagggcacaagggagccaaatcaagatcaggttataaatctaagattggttttgaaggtggacagatgcctttgcagagacgtgtaccgaaatttggctttaaaaatataaacagagtagaatataaagctatcaatgtagggatgcttcaggctctggctgaaagagataatcttaccgtgatcgaccgggatgtattagttcaagccgggttaatgtctaagaacgatcttcttaaggtattaggtgacggagcgttaactgctaagcttgaggtgaaagctaatgctttctccgctaaagcggtagccgctatcgaggctgttggcggaacagtagttaaattgtaagattaaaaatttgggagtttaaagttgtttttaaaatagaattactatttttgaagcaactttaacaaaatcccaaatcaatgccttaaaagaaagaacttatgaagttatttgatacattaaagaacatttggaaaatagaagagctcaagactaggattctaactacgcttgggcttattctcgtttacaggttaggaacagagatcgtactgccgggtatcgaccctcatggtttgcaggctctgaaagatcagacatccagcggagtgttaggcttgttggatatgttctcaggaggtgctttctcgaacgcgtcggtatttgcgttaggtattatgccctacatctccgcatccatcgttgtgcagttattgggaatcgcggttccttatttccagcgcttacagaaggaaggcgagagcggtagacgtaagattaaccagattacgcggtacctcacattagttatcctggtattacaaggttcggcgtatcttacaaacttgaaagctcaggtaccggcagaggcttttgtatctactggtttttggcaattccagctcccttccatcgtgattatggctgcaggttcaatgtttgtcttgtggttgggagagagaattactgataagggaatcggtaacggtgtgtctatcattatcatgatcggtatcatcgctcgtttaccattcgctttcattgcagagttaacttccagagtttctcaacaaggaggaggtttggtagcattcttgatcgagttgatcatattattcttggtattctgcgggtcaatcctgcttgtacagggaacgcgtaaagtgcccgtacagtatgccaagagaattgtgggtaataaacaatacggaggcgttcgtcaatacattccgttgaagatcaacgcagccggggttatgcctatcatcttcgctcaggctatcatgttattgcctatttctttgataaactatgcaaattcggaatcattatccggttttgctgcagcgttttcaaacttcactggattctggtataacttcacgttctttatcatgattgtcgcgtttacttatttctacacggctatcacggtgaatccgatgcaaatgtctgaggatatgaagaaaaatggaggatttattccgggagtaaaaccgggaagaaaaacgatggagttcctcgataccattatgtctagaatcacacttcctggatctatattcctgggaattgttgcaattcttccggctttcgcccagatctcgggtgttaaccaccagtttgctcagttctatggaggtacgtctttgttgattttggttggtgtagtgttggatacattacaacaaatcgaatcgcacttgttgatgcgtcactatgacgggttaatgaaatcgggacgtattaaaggtaaaaatcctggaggacctgctgcatattaagaaataaattgtacttttgcggcatgatttttttaaagacacaggaggagattgagttattgcgggaaagcaaccaattagtaggaaagactctgggtgaggtggccaaacacattcgcccgggtatttcgacgttagagttggataagatcgctgaggattttattcgttcgaatggtggcattcctggatttctcgggtatggagggttcccaaatacgctttgtatttcagtgaatgacgaagtggttcatgggattccgtcctctcgtagtttggaagaaggtgatgtcgtatccgttgattgcggggttgtgaagaatggtttttatggggatagcgcctatacttttgctgtcggggagattagtgatgaagtgaaaaggcttttacaagtgacaaaagatagcttgtacaaagggatagaacaggctgttgcgggaatgcggataggagatattggttatgccgtgcagtcgtatgctgaagcgaatggattctctgtcgttagagaactggttggtcatggcgtgggaaagagcttgcatgaagagcctcaagtcccgaactatggacgaagaggacaaggatgcaaattgaagatcggaatggtgattgctattgagcccatgattaatatgggagcccgtaacgttttccagatggcggacggatggacaataaagaccagagatcatttgcccgccgcacatttcgagcatacgttggctatcagaaaaggtgaagctgatattttgtcaacatttgaatatatagagacaggaaattgtaaaaattgaattatggcgaaacagccttcgatagagcaagatggagtaataacggaagcattgtcaaatgctatgtttcgtgttgaactggaaaacgggcatattataacagcccacatttcgggaaagatgcgaatgcactatataaagatacttccgggagatagagtgagagtggatatgtccccttacgatctcacgaaaggtaggataacatttagatataaaaattaaattgttgagcaatgaaggtaagagcatctgttaagaagcgtagtgctgattgcaagattgtaagaagaaaaggcgttttgtacgtcatttgcaaaaagaacccgaagttcaaacaacgtcagggttgattattaatttagtaaaaagagtaaaagagatttatggcaagaatcgttggtgtagatttgccctcaaataagagaggggagatagctctgacctatatcttcggtataggtagaagtagtgccaggaccatattagaaaaggccggcatcgattttgacactaaagtaaaggattggaatgacgatcaactagctgctgtacgtaatgtcatcaatggtgggtacaaagtagaaggagagttgagaacttcagtccaaatgaacatcaaacgactaatggatattggttgttacagaggaatcagacatcgtatcggtcttccggtaagaggacaaagtacgaagaacaatgcccgtacgagaaagggtaaaaagaaaactgttgctaacaagaagaaagcaactaaataattgattagagattgaattatggcaaagaagtctacatcaaacaagaaacggctagttaaagttgaagccgtgggacaagcacacgttcattcatcttttaataacatcattatctcgttgactaattcaagcggacaagtaatctcttggtcatcagcaggtaagatgggatttagaggatcaaagaaaaacaccccttatgcagcccagactgcagctaccgattgtggtaaagttgctttcgatttgggaatgagaaaagttaaggtatatgtcaaaggaccgggtaacggtagagaatcagcaattcgtgctattcacgcttgcggaatcgaagttgccgagatcattgatgttacgccacttccgcacaatggatgtcgtcctcccaaacggagaagagtgtaagttaacattgggtgtaatttttaaaatcaaatagagatggctagatatacaggacctaagtctaagatagcaagaaaatttggtgagcccatttttggaccggataaagcgttagaacatcgtaactaccctcccggacaacacggtattgctcatcgtagaaagaaaatctctgagtacggtactcagttgaaagaaaaacaaaaagcaaaatatacttacggtttgttggaaagacaattccgtatcttattcgagaaagctgaaagtagtaagggagtaactggtgaggtattacttcaactgttggaatgtcgtttggataacgtggtttatcgtttaggaatcgctcctacccgtgcggctgcccgtcagtttgtttctcacagacacatcactattaacggtcacgtatgtaacattccttcatgtcacgttcgtccgggagatgttgttgctgtaagagaaaaatctaaggcactggaagtgattaacgaatcattgagaggtaatagaagtagcagatactcttggttagagtgggatgctgcagctatgagtggtaaactacttaatgttccggaaagagcagatattccagagaacattaaagagcagttaatcgtagagttgtattctaagtagtaaaataaaaatatatatggcaatattagctttccagaaaccggacaaagtaatcatgcttgaatcaacggatagattcggtaaattcgaatttcgcccgttggagccaggttacggcatcactattggtaatccactacgcagaatcttgttgtcttctttggaaggctttgcgattaccggtattaaaattcaaggtgtagatcatgagtttgcgacaatccctggtgtcatcgaagatgtaaccgagattatcttgaacttgaaacaggttcggttgaaaagaaaagtggaggacgtggagaatgaaaagttgaccgttaccgtttctggacaggagacgtttactgccggtgatatgaatcaattcctgaaagggtttgaggttttgaacccggaattggtaatctgcaacatggatacttccacgagcctagacatggagttgaccattcaaaaaggacgcggttatgttcctgcttcagagaatatgcctgcagatgccgagattggtgtaattcctatcgatgctatttacacaccgattaaaaacgtgaaatacgagattgagaactaccgtgtagaaggaaaaactgactatgaacgtttggttttcgacatcgagactgatggttctatcaatcccacggatgcgttgaaagaggctgctaaaatcttgatccatcacttcatgttgttctctgatgagaaaattactcttgaaacggaggataaatatggaaacgaagagtttgatgaagaggtattgcatatgcgtcagttattgaagacgaaacttgtggacatggatctttccgtgcgtgcattgaattgtttgaagtcagctgaggttgaaactttgggtgagcttgttcaatttaataagaacgacttgttgaagtttagaaatttcggtaagaagtctttgactgagttggaagcccttctggagaacaataaccttgaattcggtatggatgttgccaagtataaattagacaaagaataagtaaaatgagacataataagaaaattaaccatttaggtagaactagttctcacagacatgctctactttctaatatggcttgttctttgattcttcacaagagaatccaaacgacactagctaaagctaaggccctaaaggtctatgttgagccgcttttgacgaaagccaaaaacgacacgactcactctagaagaaccgtcttctcttaccttcgtcgcaaagaagttgttgctgaaatgttcggtgacgttgcacagaaaattgctaatcgcccgggaggatatacccgtattttgaaattgggtaaccgtttaggggataacgctgaaatgtgtatgattgagttggtggattataacacgacttatactgaagtgaagaaagaagaggctaagaaaactactcgtcgtagaagaccttctgctaagaaagaggctgctcctgctgctaccgaggaaactccggtggctgaggctccagctacggaagaaactccgaaagctgaataaagtattattctagataaaaaatgaccccgggcaatgcgtccggggttattttttaggggaacgattgtttggctgtagggagaaaattattcgtcgaaagcgatagaaaaacattttgcccggctcaaagctaacggaatactccgcagaatcgggccggacaaaggtggacgttaggaaatgataattaaaactcttcttccattatgttcatctcttccgaagggcgctgttgtttttgcttggaagctttcatgtttccgaagttatagcttagcgtgaaacggaaaaccccgccttttctccaactatcactatcttgtttaaatccgttaccggaagtgatgctgtgccaactacgggaattcaaaatgtcctgcacgcttatactaaggtttattttccggtcaaagaaaaacttccgggctcccagatctaagcggtaacttgcctcccggtggccttgggcaataatctgtttggagttgtagcttccggtagcctgtaacgagatggcgtacggtagcatggcattggcaatgattttacctgtccaggagaagttatcgtcccgttctcccgtaactggggtgtctgcacctgccgggaggtaagaaaagccttccagttcgttataatagaaattcagggttgttgtaaagtctaggaatttcagtagtttgttttttgccacgatttcggctccggcagaagaagattgtgtaatgttagctgacgtgcttttcatgacatctccttcccggtaacgaatacgttggatcacgtcgtccgtgttccggtagtaggtggagacggatagcgtgtgtttttcccaagtcttgatataattcaactcgaaggaattggaatattccggggaaaggtaaggattaccgaacgagatattaagggaatcggtcatgttcatgaatgggttcaattgccagcctctgggacgtgaaattcgtcgggtgtagttgacctgtatttcatgatttttcgggagactgtacgatagaaacaaactagggaataaactgaaatagtcatctttatatggaacggccgtggcctcggtttccccgtatcccagtgatttggtctccgtgtccgtgtattctccccgtaagcctagttgcagcccgaagttattcactttcgtggagaacgtggcgtataaagcttggatatttcggtcataggaatatttgttatacaacaattcatcaaagacggctgttgtttccgtttcaccggaataggtttccacgggacttttctggctgctaagcgtacctttgtaacctgcctccaacttactttcttctgtgaattggttcacgtagtctgcttgaaattcccagctttgtgaacggttgtcactttcctgtttttgccaagaagaggtttctttattttctgggtagagggaatgttgtttgtatgtactggtcccgtcagaaacccataaatcccacgaggcacgagccacgagattactgctttcgctgaattcatgtttgtagtcgaggttgatgttaccccctttggaggagttgtccgaatcgctgatacgttcgctactggtgaacgagccaggaacatcgctttcgtaacgaatggtgttattggaattccggttcccgaaatgtccgaatccttcaattccgataaggtcggtctgggtgaggtgtagcgttagaccagcccgggggaagagtgaaccgccatcccgattgttccagcctttctgattcaagtaggagacgggattaccttggtcatccagattaatacgatctgtattatctttaccttccgatttcctttggcggtacccgacgttaaggtaggattcaatcttaccactactataattgatactaccgctggcattgtacccgcctagaatatcggccccgacttgtaaactaccgtaatatccggctttccggtttttctttaaaataatgttgatgattccggaagtcccttccgggctgaatttggccgaggggttcgtgatcaattctatgcgctcaatgctctcagcaggaatttgttccagtatctgggcttggttatctgcggacaggcctgatgccttgccattaatccagatcgttacacttgagtttccccgtaaagagatttcaccctcgttgtctacctccaccgaggggatattttcaagtagctcgctggctgatcccccggcttgggaaatattggattccacgtcgaagacttttttgtcgatttcgaatctcatttgagctcgttggccaacaacttttatctcgtcaatcacttgactgtcttcttctaaaaggatgtttttcacgtttacgtttctcgctgtcggtgagatcatgaattctttttccacggatttgtaaccaataaacgaggcggtgagcgtgtaagtcccgttcttcactcggttgatacggaaaactccggttgaatcactgactgttccggttaacggggtttgagttcccgtggtccggatactcacattgacaaactctaagggtttcttcgttttagcatctataattcgtcctctgacacttcccgtttgggcaaaggtagatagggcaaataacgtgaagaagatagctaaaacagcttcttttactttactcatatacattttatacacaattgaacattccgtcgaagaatgaattgtttttaattacaaaccaaatcttcgcactattaagacaaatctttctaggaaaagtttattgcggggtcaaagtttatgacaaggaactttataaaccaaatcatgtgactttttcaattgttttacgtatcttagtcacaacaatttatttacgaacttttaaagttaagaggaatgtatattacagaagttattggaagagaagtgttggattcaagaggaaatccgaccgtagaagtagatgttattctggaatgtggggcgatgggccgtgctgcggttccgtccggagcgtccacgggagaacatgaagcattggaattgcgtgatggagacaagaaaagatatggcggtaaaggggtaaccaaagccgtgaataatgtaaatacggtgattgctgatgccttattgggaatgaacgtgaccgatcaggtaggaattgatcgtgttttattggaattggacggtacaccgaccaagagtaatttaggtgctaatgcattattaggagtgtctttggcttgtgcgaaagctgctgctaacgcattggaaatgccgttatatcgttacattggtggtgtaaatgcaaaagtgttaccggtgccgatgatgaatattattaacggaggatctcattctgatgcccctattgcgttccaggagtttatgattcgtccggttggggctgaatctttccgtgaggctttgcgtatgggagcggaggttttccatagtttgaagaaagttcttcacgatcgcgggttgagtacagccgtgggggacgagggaggttttgctcctgcgttgaaaggaacggaagatgccttggaatctattattaaagctattgaggctgccgggtataaggcgggagaggatgtgatgatcgggttggattgtgcctcttctgaattctataaagatggagtttacgattattctaaatttgaaggagcgacgggcgcaaagcgttcttcagccgagcaggtagcttatctggaagaattgatttcccgttacccgatcgattctatcgaggatggtatgagtgagaacgattgggaaggctggaaattactgacagagcgaatcggggatcgttgccagttagtaggggatgatttgttcgtgacaaacgtgcagtatttgaagaaaggcattgaaatgggatgtgctaattccattttgattaaggtaaaccagattggtacattaaccgaaacattggatgcgattgatatggctcaccgtgccggctacacgtcggtaacttctcatcgttccggggagacggaggatgcgactattgcggatattgcggtagcaaccaattctggacaaattaagacgggatcattgagccgttctgatcgtatggcaaaatacaatcaattactgcggatcgaggaagaattaggtgataatgctcagttctacggacggaaattcagcaagtaattgaaatttattttatagggaaaaagactcttatgacaattgttataggagtcttttctttttttggcaggataacatacctaattttatagtatatttgtaatcctaaaatcttaaaaacaaatttatgaaaaagtatgtagctgaaatgattggtactatggtactcgtgcttatgggatgcggtagtgctgttattgccggagcagaaatcggttttttggggattgctttcgctttcggtttgtctgtggtagcaatggcatatgctattggtggtatttctggatgtcatattaatccggccattacattaggtgttttcttgacggggcgaatgagtggaaaggatgctgggatgtatatgttatttcaagtcattggtgcttttattggttcggcgattctttacgtgatttcttccgggatggggttggaaggaacgggagcaaatatgtacggggaaggaaatatggttccggcttttgtggcggagttggtgtttacctttatctttatccttgttgttctgggatccacgagtgctaacgctcctgccggatttgccggattggcgattggtctatctttagttttgatccatattgtatgtattcctgtaacgggaacttctgttaatccggctcgaagtattgctcctgctatttttgaaggtggtaatgctttgagtcagttatggttgttcattatcgctccatttttaggtgctatccttgctgccggagtctggaaatatttcgaatgtcagaaatgtaaataaatagatatgaagatggggatttggttgagtccccatttttattctgattcttcctcttcttttttgggtttaccttccacgatcatgacgatttctccttttaccccgttttcggtaaaatgatcaattagttctttcaacgtacctcgctggaagtcttcgaaaagtttactgatctcgcgagctacacaagcatgtcggttttctccgaaaaattcagccatctgttcgagggcctttaccagtcggaatggtgattcgtagaatatcattgtacgttcctcttcagcaagagctataagttttttttgacgacctttcttttgtggcaggaatccttcaaaacaaaaacgatcgcagggtagaccggaattgacgagtgcgggaacaaatgccgtggctccaggcagacattctgtttctattccttgctcaatacaggtacgtacaagtagaaatcccgggtcggagattcctggtgtcccggcatcactgattaaggctatgtcttcacctcgtgcaatacgctcggcgatacgacttacttgctggtgttcgttgaatttatgatgtgagagcaggggggtgttgatctcgtaatgttttaatagttttgcggaggtacgggtgtcttcggcaagtacaagaggtacttcttttagtatacgaagagctctcagcgtgatgtcttcaagattgccaactggagttgggatcagatataatttagccataatagttgaaaattgatttcaatggtttacggaggcaaaggtaaggaattaatttcattgtgtactgcttaagtatgttttatgcggcatgagtttgtctagggcaggctagagagggtattttgttaatatagaattattttgtataatattaatttacagtaatttgatggcgtattttgggttaaacaatcagtaatgtaaaaaaaaaatcacgttttctttggtaggaatgaaatttgccgtatatttgcaaccgctaaagcaaaagatggtccgttcgtctaggggctaggacgcaagattctcattcttgtaacacgggttcgattcccgtacggactactagagcaaagagcaaaatatttaacgatggtccgttcgtctaggggttaggacgcaagattttcattcttgtaacacgagttcgattctcgtacggactaccgagattttagtgggttttatggtccgttcgtctaggggttaggacgcaagattttcattcttgtaacacgagttcgattctcgtacggactacaaagttgaattaaattaatttgtagagatggcaaatcatcaatcatcagaaaaaagaataaggcagactgagaaaagaagattacacaatcgttattacgcaaagactgctagaaatgccgttagaaagctacgtgcaatgaccgaaaaggagactgcagcagacttgttgccgaaagtttcggctatgttggataaattagcaaaaaaacatattatccacaagaataaagcagctaacttgaagtctagtttagctttacatgtgaataaactgtaattttactatcttaagatattgaggtaacaaacaatttgtttgttacctctatttctatgtgtcgattgatcttgagaaattacttctcgagatttttttattgcaaaaaaatagctacattgccagttgtaaagaaaaagttatgactggaaattatatcccgatttcctcgtgggcggaagatgataagccccgggaaaagatgttgtcgaaaggtgttaccgcactttcgacaaacgagttactcgcaatcttaatccgttcggggagtggaggggaatcagccttggatttgtctcgccggattttgacggatgctagtaatgatttgaatacgctggctcgtctttctgtatcggattttatgaatcgctataaaggagttggaatggcgaaagcggcttcgattattgctgccatggaattggggcgccgccgggcattgtcgacggcaagggaggaaccggcgttgacaaccagcagggatttgtacgattatctccagccgttaatcggtgatctggatcatgaagaattttgggtcgtaactttatcaagcgcttgccgaatgaagtcatgcgatcgcttgttttcaggaggaatagagagtactatcattgatattcgtatgatattccggaaggtgctggaatcaaaagcttgttccattgtgatagctcataatcatcccagtggtaatgatcgtccgagttcccatgatattactttgaccaagaaggtacaggaggctgggcgtgtattagacatcacattgctggatcacattgtcgtttgccctaatcggtattatagttttgcggataatgggatgctttaatcccattaaatgctgaaaagttgaatcggaagaatatcttttactatctttgtggcagctatttgtgtcacattggcattcgtaatgcttgtcaatgtggcatattgacggttggcagggattttgctttgaaagaatagcttaaaatgtttattcataaaaaaatatatacaatatggcagaagagaagagatcaactcaggagaacgagttcgaagagtcacagacgaacgatacggaaaaggaagaggtgaattcagaaaaacatcagggagaaactcacaaaaagaaagaagacaagtcttgtcgaaaagaggacaagcaattggaagagttaggacagaaactgatcgagatgaatgataaatacttacgtctgtcggcggagttcgataattatcggaaacgtaccttaaaggaaaaaatggaattaaccaagagtgccggggaacaattgctaagtaatattttacccgtggtggataacttcgaacgagccttgaagagtatgagtacggcgaaggatgtggcagctctaaaagaaggggtggatttgatctatgctaattttaagtcttttctgacacagaatggcgtgaaagaaatcgaaactgaaaatgttgattttaacacggatattcacgaggctgtaacgacaattccggctccaactccggagttaaagggtaaagtgttggattgtatcgagaagggatattacttgaatgataaggtgatgcgttttgcgaaagtggttgttggtgaataaaatatagttgcgtggtaatggaaaagagagattattatgaggtgttgggggtatctaagagtgctgatgccactgagatcaagaaagcatatcgaaaactggctttaaagtatcacccggataagaatccgggggacaaggaggccgaggagaaatttaaagaagccgccgaagcatacgatgtgctgagtaacgaagaaaagaaacgtcgttatgatcagttcggtcatgccggagtaggaggggctggacaaggaggttttggtggcggcatgagtatggatgatattttctctcaatttggggatattttcggaagttttggtggctttagtggtttcggaggttttggtggtggccgtagtgcccgccgggtaaaccggggaacgaacttgagagtgaaggtgaaaatgaaccttcaggaaattgctaccgggattgagaagaaaatcaaggtaaagaaatacgtggcttgtcagcattgtaacggaacgggagcaaaggatgggaaatcctattccacttgttcaacctgtaaaggatcgggacaagtgacccgggtacaaaatacgatactgggagcgatgcaaaccacttccacgtgtccgacttgcgagggcgaaggaaagattatcaatgaaaaatgtactttctgtaatggagagggcgtgttgatgtcggaagaggtgatttctatcaatattccagcaggagtgggtgaagggatgcaattgtctttgagtggtaaaggaaacgcggctcgtcgtggtggtgtgaacggtgacttgatcgtgttgatagaagaagaagagcatccggagttggtaagagatgggaatgatttgttatacaacgtgtttatcgggtacccagaagctgtgttaggggaaacggttgagattccgactattgaagggaaagtgaaagtgaagattgaggcgggtacccagccgggtaaaatattgcgtttacgaggaaaaggattgcctgatgtgaacggttacggtaaaggggatttgttggcaaaggtgaacgtgtggattcctaagaatttgtcgaaggatgagaaaaaactcgtggaaaagatgaaagaggcggaaggctttaagccgggaagtggtgacaagaaaagtatcttttccaagatgaaagatttttttgattagaaataataatatatgattacactgacacaattagaatatgttgttgcggtcgatgaattccggcattttgcaacagccgccgacaagtgtttcgtgacacagccgacactgagtatgcaaattaaaaagctggaagatgatctaggtgtaatcattttcgatcggagccggcaaccggttgttcctaccgacatcggttacaaattgatagagcaggcaagaacagtgctggcctcggctcaaagaataaaagagattattaatgaagagaaacaggaggtggcgggatccctaaaaataggtattattcccacgctggctccttatttattaccgatattcatcggggattacattcgtcgttatcccggggtacaggtggaagtggaagaattaatttcggaagagattatccgacgattgaaacatgacacgttggacgtgggggtgttcgtgacaccttatcatgacgataagattgttgaacagcccgtgttttacgaggagatgatgatctacgctcaccctgatcatgaacttttgaaaaagaaagacatagaaacacaagatattgcaactcccgagctatggatgttgggagacgggcattgtttccgagatcaagtagtgaatttatgcgagatgcgaggaacgcaacataagaatttgccttttgattttgagagtaattctttagagaccttgatgaagatcgtggatcgggaaggaggatttaccttgattcctgagttagccacgttgtatatgacggaggaaaagaaaaagcaagttcgttcattcacggtgtctaaacctttgcgggaggtcagtgtgatatattcccgtcatttcacgaaacagaagttgattgatttgctttgtgaagatatacgccaagtggttcccccgggaatgttgaagaaagagaggggaaaaatcgttgaatggaaaaagataagataaatgtaatacccgaatatatggatagtatcaagaaaagttttttggaggcgcaacaggtgttagctgattttttggaggacgaggagaagttgaaacaagtcggattggcggcagagatattatcccgggtattgaaaaacgggggtaaggtcataagttgtggaaatggtggttccatgagtgacgctatgcatttcgccgaggaacttaccggacgttttaggggagatcgtcccgcattaccggcaatggcaatttctgatccgactcacttgacctgtgtggctaatgatttcggatttgagtacgtgttttcccgttatgtggaagcacacgggaaagcgggtgatgtgttattggcaatcagtacttccggtaattcagagaacattgtgaaagccgttgatgcggctcactgcaaggggatgttggtgatcgggttaaccggtaaggatggcggtaaaatgaagaatatgtgtgacgtgaatatttgtgttccttggaatgggtattccgatcggattcaggagattcacatcaaggtaattcatatcctgatcgagcaaatcgaggcgcatttgttttcggaataataaagaggtgtatatgtttttaataatataagttatgggaaataaaattaatgatcctattgtccgtttgatgggacttaggtacaagtcacatccgtggcatggtttggatattgggacggatgcgccgaacgtggttaccgcatttatagagatggtaccgacggacacggtgaagtacgagttggataaagtgagtgggtatataaaaatagatcgtccgcagaagtattcgaacgtggttcccgctttatatggttttttgccgcagacttattgcggagatttggtcgccgagtattgtatggcgcagaccgagagaacggatattcacggggacggagatccgcttgatatttgtgtcctgaccgaaaaaacgatctctcacggggatattattgcggaagttcgtcctatcgggggattccggatgttggataagaacgaggcggatgataagattatcgccgtgttgaaacatgatgccacatataatatttataatgatatttccgaattaccacacgtggtgattgacaggttacggcattattttttaacctacaaggatcttcccggagaggaacgacgcacggaaatcactcatgtctataataaggaagaggctttcgaggtgattcgcagaagtgccgaagattataaaaatcatttccaaggacttgaagatatactaagccgggtataatggcaaggtaaaaggtaaaagataaaaactaaaaaataaaagttgttttttcacttcacttttatcttttacttttttcatcctccccatccgtccttgtctagacttcggtattgtatggcctcggcaatatattgtggggttattttctcgttatggtccaggtcggcaatagttcgggacaatttgatgatccggtcataagctcgggcggaaagtccgaaacgttgcatggcaatctttagtagtgcaacacatttatcgtccagcggacaatacttttttagtagcggtgaggtcatctgggcattacaataaatccccgggtaagattgaaaacgttgggtctggatagcccgggcggcgatcaccctagctcgaacaacagagcttggttcactgtccgaggaattcgtgatcttgtcaagctctacgggaatcacttcaatatgtatgtcaatccggtcgagtaaaggaccggatattttcgataaatatttttgaacggctccgggcggacaattacattccttcgtgggatgattatagtacccacatgggcaaggattcatggatgcaatcagcatgatgttagccggatattccacgctgaacttggaacgactgatggtaatcttccgatcttcaagtggttgtctcaatacttccagtactgcccggcggaactctgggagttcgtctagaaataaaattccatggtgagcaagtgatatttctcccggttggggccaagatcccccgccaacaagagctacatcagatatggtatgatgcggcgaacgaaatggacgtgagatgattaaggaatgattattttgaatcttccccgcaacggagtggattttcgtcgtttccagcgcctcttcgatggtcatgggagggagaattgtcggtaatcttcgggctagcatggtttttcccgaaccgggggagccgatcatgatcatattatgtccgcctgctgctgcaacttccatcgcacgtttcacgctttcttgtcccttcacgtctttgaaatcaagcaagtcatcatcgggaaatgctgtcatgacttgttgatcgaaagaaatgggagagaagtctttttcctgtttcagaaaagcgatcacttcactcaaatggtggaaaccgtaaacttcaaatccttgaaccactgcagcctcgttagcattctggtaaggcagaagaatacctttaaaaccttcctttttggcgtgtatggcgatgggaagtacccctttgaccgcttgtaggctgccatccaatgacagctcgcccatgatcaggtatttatccagttgtgcgttaggtaactggtcattagccgcaaggattccaatggctagcggcaagtcgaaagacgatccttctttcttcacgtcggcgggagccatgttgatgattactcgtttacccggaatctttagcccgatttccctgagggcggaatcaattcgttgctggctttcttttacggcgttatcgggtaaaccgacaataataaattttgctccccaaagaatattaacctcgattgtgatggtcaaagcgttgattccgtacactgcacccccgaaaattttaactaacataccgtctgatcttatgttttacatacaggcatgtaagttatgattatttcacaggaaaacaatgcaaaataggttatttcttgcgatcaattttttcaagagaaaccttctctccgtcgaatacggcataactgaaatgcgtgatccagtctcccgtgttgatatagtgactgttggattcaagttcaagattgagaggcaaatggcgatgaccgaaaatgaaataatccacgtggtgttcttttaagatattccgacaataaataacgatttcttctttgtcatctcccagatagcccctagcctcaatttgcccgtttccttttagtctggaatgggatgaccatttattggctaaagtgattccccagtctggatggataaaccggaaacatctttgtagaaaacgattatggaaagcgttacgcaggaaaagataccctttgtcgttcggattcagaccgtcaccatgtccgataaggaaagactttccgtttatcgtggtttccatcatggaagtatgcaggataacaccacattcttttgccaagtagtcgaaagcccagatgtcgtggttgcccgtgaagaaatgtaccttaattccttggtccgtgaaattggccagttcggcaagaaagcgtacgtggcctttgggtacgacatgtttgtattcgaaccaaaaatcaaacatatcaccaagcaggtaaagttctaggcaatcaggtttgatgctttgcaaaaactccacgagcataatttctctctcccgattatctttcaatagtttggcacccaagtgtgcgtctgaaagaaaataaaccttcttaccctgcatgatgatatgttcgtccaatataattattttttcaacaagtcgttcaaacggtcttccaaacggctgccgtacaagtttttaccaacaatttctttcttttggttaatgatgtagtttgccggaacactcttcacgttccaagtcgaagctgcccgactttgtaacgctccttgatcccatacgcaaatccagttgatcttgttcgtttttatcacgtcttcccaaagaaatttgtttttatccagacaaaccatgtatatttccactccccggtttttgaacttgttgtacacgcttttcatctggtcaatgtactcttgactctctttggccgtgatcagcccgaagtcaagcacgatgagtttcgatttgagggagttcagtgaaatatctttgccattcacatccggcaggttaatatccggtagagacccttccgtgttgttaatcacggcagcaagttgttggttgcggatagcttgggatatttgtttcaagtgattcatgattgccttcgtgtattgggattcgggataaagggcagtcaaggatgatgccaccactttaaaatagtgaaggtcctcgaactcgtccatcactccgatattatcatcaattttttgatagagggcataataagatgccggagaggtggcgtgtttgataataaagtctcgggtgaaactgatctgtttgtttattgcctcttcccatgctttggcgtattcctgacgttgagcgtcgtactcggttccttgtgggagagcttgataggacctcttcaaagaatccgttagcgtgattgtacgggtgatttggaaattcaggagtttaatccataacgagttttcagaaccgtccacccagtaattatttttaatgtcattcagcgtaccgctgacttcaagcatctcgtccggactggcgatcaaggtcacttgctcattgttagaaaatcttaaagaatagaatgtcgggagttcgatgttgagtttaaatttaaactccccgtttttgttaatttttgttgagtcgattgtttttcttgaacttacatctatttgttccagatatactttcgtgttggctgcatctttgatggctcctgtaatctcgacattcgtctttttactacaggatgcgataagaactacgagtagtccaagtaatagtatttttctcataatttgttggaatgatataaataatctacatcttgatttatgaagttcgaaagtaatactttttttctatttttcacatcgtcgggtcagattttgaataaaaaaaccgttaattaattgttaagggtgtatttcggggaatcgaaaatcgaaaattgttttatttttgcaaacgatgaagcagaaaaaatggaatatatcagcactcttgctattgtttatctttttgttaggtacagtaggtgtgaatgtaagtagagtatactgccaacgttgtcaggaatctcacttgcatgtggtggttattcccgaagatattccttgtccatgtacacatggttgtgcttgttgtcatcaaaagtgtcataatgcgcacaagaagaattgtgataatgcgaagcaagaacatacttactataaggtatccggtgactgggcgatgtctcatttcgaggtacagttctgcgatatggtacaggagtgtaatttcatgatgtctttaccggatacggttatttctaatgtaaaatcttttaattctcctgttgcgtacatagacacttctccgcctttggagtttctatgtatttttcgttgttgattaaattttgatccgtgataaagatgctttataagtatctttcgacgagttgtgtgtatgcgtctgacttgactgaggtattatttaaaatttaatcaagagagaacgtgtttcgtggcattgggtaagagatatatccccgacacgttcctgaaaattgtggaatctatatgagaaatttgttcattataatgtgtttacttgcctctgttggcttacaggcacagaccataaaagggcgtgtcatggaagaaacggaagacggggaggtggcgttacccggtgcgaatgtttactgggtaggaacttcgaaaggatctgtttcggatgcgaacggggaatttaaaatcaagtgggaaaaggttgggaagttggttgttagttttattgggtaccagtcggacacgatagaggtaaaatccacggataaattcgtgacctgcacgttgaggtccggggagcagttggacgaggtgagcgtggcagcccgtaaacagagtaccgtgatgtcaacacggggtcctttgatcgaacaattaatcacgggcgaagagttgtgtaaagcggcttgttgtaacttgggcgagagtttcgaaacgaacgcctcggttgacgtgtcctatgccgatgcggtgacgggtgcgaagcaaatccagctattgggattaaccgggaagtacgtgcagatgatgaccgagaatatgcctaatttccggggattggcttctttgtacggtttgacttacattcccggtccttggatgtccgctatctccgtgtcgaagggaacggggtcggtgattaacggttacgaatcgatggccgggcagatcagcgtagactataagaaaccccgtgacccggaattgctttcggctaatgttttcacgagtagcgagggaatgtacgagtttaactccaatttcagtatcaaatttagtgataaatggagtactatgttccttttgcacggagactggatggaagaacctcatgacgggaataaagacggattcttggatatgccggaaaaaacgcaatacaacgtgatgaatcgctgggcatataaggatgatacttggtttttgcaattcgggggtaagtttatcgatgaggagcgaaatggaggacaaaccactcatggtgggcatgctcaggtggatgaaaactacgggttgtataaaattggaatcgacacccgtcgttacgaggctttcctgaagttaggttacttgatgccccagtacgagaacacgagtatggcgattctggtgaactattccgatcacacgcaggattcttattatggaccgaagatgtataatgccgggcagaagagtttgttcgtgaactacatttatcaatctattttcgggacgaatcccagccagatgtactctgccgggttaagtttcaattacgacaaatacgacgaagatttttgtgatccggtttttaattatggagaggatatttctaccgacttcataaacatgaaacgggaagaacgggtgccgggagcttttttccaatatacgggagaattcttggatcagcgttttatcgtgatggcaggattgcgctacgattatcacaatatcttcgggagtatctggacccctcgagctcacatcatgtacaaaccggatgaattcaccagcatcaaggccacttttggccgcggtttacgtacgccgaatatcttggctgagaacagttatttgttggcctctgccgcgaacttctacgtgaatggagaattgttgggtaagaacccggctttgctggacgatctaaagatggaggattcttggaatttcggggctaacgtgaaccgaaagttcgaagtattcgggcgtaccttgaatatcaatctggattattatcacactaaattcaacgatcaggtggtggtggataacgagactgcatacaataaggtgaacttttataatctggacggggattcctattcgaattgttaccaggttgaggtgaaatatgagttgatccctcgtttggaagccacgttagcttatcgttacaatgatgtgaagacgacgataaacggagatctgaaacgtactcctttaacgagccgttataaaggactggtgaatttgtcatacttcaccaacttgaagaaatggcagttcgatttcacgactcagtttaacggttccggacgtttgccggagcagggtgggattgccgatgaatatcgggtagcctcccgttttgatgatttccagatcatgaatgcacaggtcacgaaatatttccgattgtggagtatttacgcgggatgcgaaaatattggggatttcacccaaaagaatccgatcgtgaattctcataatccctggagcgatacctttgactcgtcgaaagtgtggggacctcttcacggacgtaaattttatatcggtctgagatttgccttagatcgaaaaggataaccaatcaataaaataattacttttgaaaaacaatgtttttaataactaatatgtttactatgaaaacaataaaaattttattctcgctggtagtgttcgttatgatgggtttaaccgtaagtgcccaggctaagaaagatacaaccgttatttttaaagtaggaatacattgcccttcttgtaaggctaaactggataaggatatgcctttcgagaaaggaatcaaggattataagttgaatatgaaagattcaaccgtgttgatttctttccgtactgacaaaaactctgttgaggccttacgggctgctatcgagcgtcatgacgtgaaagtgataggaatgtgcgataaagacggtaagttgatgaaatgcggtaaagcacataaatgttgtaaagaaggaaataaagaagcttgcaagggaaattgcggcgagaaacataattgcagcgggacctgcgggcaaagttgcggagagaaaaagtgtgatggtaaatgtgaccagacttgcacttcaaaggagagcaaatgtgaaggaaaatgtggtgacaattgctgttccaagacgggtaaaacagacgagtgctgcaagaataagaaaaagtaaggaaattttatcttgaagagtaggaaaacggtagcgaaagctaccgttttttttgtattattgattcaagataaactggttcatcttgtcgaattgtccttccatgtcttgtaataaccttacttgaactttagcccgttgcaggttatgttcaggataggtgatcgggtaataatgatccccgtccaggtaatctgtcaaaaaacggacggcttgtaagtaggtcatcagcgtgcatccttgtgcaagggtctttttttccttgagtgtgaaaaggtgcttggctttttccatgaacccggcggtgaaagcctcaaaataattcatgttaaaatgaacctcgtcaagattgcgggtttcttccccggccgtgttacaagacgagcgaatggcatccccgaagtcgtaatgcacgattcccggcatcacggtgtccagatcgatcacgcataacgggtgatcattgtggtcgaacaggagattatttgctttcgtgtcgttgtgcgtgacccggagcggcagaataccctcgtctttcatccgttgtaattctaacatctcgttatcgaactttttcaggtattcgaggagttccttgctcgcctcgatccggtccggttcggctttagctagggcctcttttaattctcgttggcggcggggaacgttgtggaaaagcgggattgtctcgatcaacaatttcgcgtcaaaatcggaaatccggttctcgaattctccgaacccgatacccacttgataagcgatctgggaatccgggataacatcgtagctctttgatcctttgataaagagtgataacgtccagtagttcccctcgtaatccttgtagtaagcgtttcctttgtccgtgtaaaaatacgtgatgtatttgcgggtgatatcgctcactttatgccggataagtcggttgcggatatgcccgcacaccagttctttgtttcgtaccagtttcgggatgtccttgaacacgttaccgttgattctttggagaatgtactcgacatcctcgtccactttcaccagataggtgtcgtttatatggccagaaccgtacggtgtagcggatataaaccgcccgctcgatacgaacgtgtcgtaaattctcttcagtttgtccatgcttagttgttttttaatgtttacccgtttttatgctatttactgccccatgtcagtgtataatccttccccgtcgaatttctgcaaggcattgtttaccagctctgagtcctctttgtatgttacgccgaaccattgggcactggtgtttaagacttttactttcacggccttttgcttgatgagttcgtccaccacgaaaggtatgtaaatctccgccttgggattttcgctgttcttgtggtaaaactcgatgaattgtttttcgatttcctcgaaaagcatgggcgagaatccccagaaattcatggaaaccacgtcgtcctcatgcagtacaacccctgaattcaaatctttaatcgtatcaccttcccggccaattttcgtgcgttcggtgatactggtcaagaaattgtccccgtctaccgtgcatattcctctggatactgtcccgttctcggatagcgtggctgccaaccggtagccggctaggctgaaacatctctcgtcagtattgctagccacgaaatcgtgcattttcacgaaggcatcccgtccgtaaaagtcgtcagcgttgatagcgataaacggttcgtgaatatggtcttttgcggcccagatggcgtgagctgttccccagggtttctcccgctggatcgggggtagattaccgggcagttgatccatttcctggaaacagtacacggtttcaaccaggctttcggcatattttcccacggcctctttgaattcgttctcgaaactccggcggatgatgaaaacaattttgtcaaatcccgcatgtacggcatcatagattgaataatgcaacaatgtttttttgtgggggccgagtagtgctagttgttttaagctaccgaaccgtgaacccatgcctgctgccataatgagcaaggtcgttttattcttcgtagtctccatgtttttatatttaatcttttacttgtattaccttctttcgggcaaagctaataaaaactgcggaaagaatctagcaagtcatgttttgttttatttcgggtgaaaatttttgccgtttttatgtttcatccccttctgagaacgaatccaataatgcgttttgttcctccttagccggaagtgcttcgaccgagcgaagctgtctttgtatggcgcgggttcgttttcccatgacttcttccagttggttattggcggtttgaaggttcttctgggctttctccagaagtcccccgaacttctcgaattcggctttcacaccgccaagaatgcgccacacctcgctactacgtttttggatggcaagcgtgcggaatcccatttgcaggctgttgagaatcgctgccagcgtggtgggccccgtgacaatcacgtggtattcctgctgtaattgttcgagcaaagcagcccggcgggtaacctcgccgtatatgctttcgaaaggcaagaacatgatcccgaagtccgtggtgtgcggtggggccaggtatttgtcccggatgtcctttgccatgccgcgaatggtctgttcgagtatgcgggaagtagtttccactcgttgcaaatctccggattcgtaggcatcaaggagttgttcgtaaacgtcctttgggaacttggcatcgatgggaagatagaccgattcgtcaccttccgcccgtccgggaagtttcacggcgaactcgaccagcttgtcggatccgggtttggtcttcacgtttgtgtcatattgatccgaggctaggatctgttccagtagcatggaaagttgtacttccccgatcgttccccgtattttcacgttactaagcacccgttttagtccacctacatcttgtgccagcgtctgcatttctcctagtcccttctgcacattttccagttgcttgctgacgagttcgaacgattgcccgatgcgttcgtgtagggtcttctgtaatttttcatccacggtggctcgcatttcttccaacttcttttccgtgttttgcaggagttcctgttgacggagtgatagctctccgaatttttcccgttgcaggcggttgaataattccatgctttcggcaaaacttttctggaaagcttgtatggcggagttggtttgggtggtgatattcttcaaggtttcccggtgttctgtccggaaatggttgagggtagaggcgagttcttcccggtccttgcgggagcggttctcgtcgttttcccggttataacgggattcgtcccgaatcactttttcgaggtccgagatggaccgtgatacctcctgggcggtgttgttcttgcgggaacgaacgtgcaatccgatgaggatcatgttgagaacgagaagtaaaacgcaagatataagtataaataattccatatttctgaacctttagttgttcaaaaatatggaaaataactcagagtttggtcaactcttcttgaatttgttcttgcccgtgcgggacgaagatgagggcggtagtgtcgtaccctctgcgctgagcccgttgcatcaagtctttcagtttgttaggcgggagcttcggtgtacggcttacgatccagagatgatcgcattgggaacttccgataagggctgcgctgtaatctttctcgacttccaggatgtggtagtccgtgttgaagatcagaaaaaaggtcacttttaggactcccggttgagtcgtgtccgggatatgaacgtggcccacgatttcttttttctcaccccggagactgtcttggtaacctcgtccgataaccttgatgcttccatcgggtttgatggtgtactcggtcgtcaccccgaccaagcctcgttcgaaagggtggtcaaagcgtgcgatttcgtaccacagaccaacatacttttttaaatttagtgtgtctatagctcgattatcaatgatcttgtcggattgtgctgttgctgctatgatattgcatccgacgagcaatatggctaataagaaggatttcatactatgagttgataattaggtgtttagtttctcgtaatacgagaagttggggtctgatgttcgtttataagatttataaagtctgtaaagttcataacgtcttttgggggagtgctgggtttgtgagaggggaggcttgtatttaatggggtgttcatcctttttgcccctcgtgtttgtaaagaatttgtttttactaattgatttctacctgattataaccgaaagtaacattttaattaaagtatatgaatattatatgaaccttattatatataaggttcatataaggtttctataaggtatctataaggtttatgacggtaatcatccggaataactcaccttatagtaatctgatatatgctttgttgggtgctaagttttaccatagagagaatggtctgatttgttggtcagtcttcttgtgtttataaaagggaatatggtaggttaactatttttgttggccaattgcccgcaagccgcatcaatatcttttcctttgctgcgacggacattcaccacgatatttttgctttcgaggtagcgaacaaattggtccctgctggcatccgggctgtgacggtagggggcattgtccacttcgttgtactcgataatgttgattttcacgggaaattgccggcagaacaaggcgagtgccttggcatcgtcgagactatcattgacacctttcagtaacaggtactcgaacgtgggacgtgtccccgttttatccacgaaataccggatggcctcggcgagtttggtaagcgggtaagccttgtttatcggcatgattttatcccgggtcgtgttgacagccgaatggagcgagatggcaaggttgaaacgaacgtcgtcatctgccagtcgcttgatgccttccacgatgccggaggtggatagcgtgaggcgatagggggacattcctaatccatcctctgccgtgatgcgttcaatggcggcaaggacattctcgtagtttaggagcggttcgcccatgcccatgagtacgatgttggataacggtagtccccgttcttctcccaggcgtttcacggcaacgacttggtcgaatatttcttccggcagcaggttccgagtaaatcctaacccacccgtggcacaaaagctacattttagtttgcatccgacttgcgaggagacgcacacggtcgatttatccttgcttgggataagtacagtttcaatcaagttcccgtcaggaagggtaaagccgagttttgtcgtaccgtcactactctcttgtttatgggtgagcgtggctgtttgcaggataaagtgattgttcaaaaattcccggaaatcttttgataagttggtcatgtcctcgaaacgggtcactcccttttgccaaagccactgccagatttgtttagcccggaatgctttttccccgtgttgtacgaggacgtttgctaactcttgtaacgtgtacgctcttatattcgttttttccatgtcatcactttttgcgttgcaaaaatacaacaagaaaatgagacggactttataattatggaagaatgttgtgaattgatagtttggaaaaatatatcatttttaataaatagtgattgaaaaaataaaggagaaagtgtggaatttaataatatgaagtggtcgatgagatctaacaggataaaaagacgagattaatttactctgacagcgtgctgtaaaatgttataataatattaaatcacggtgagttacataaggtttcatagaattaaattgtatattcgcgatcgtttgtgagggggcgagggcataatttgacaggaattgaattagatcagattatataattaaacgtgaaatttaaacagatgaagagagtttttattattgtatttgctttgctttcaacgtcaatcgtgcgggcggatgaaggtatgtggcttttgtcattgctcgggaaaaatatcgagcaaatgcaggcacaaggctgcaaattgactgcggaagatatttattccgtgaaccaagcgtcattgaaagatgcgatcgttggattaggaaacgccggacgtcctttctggcatttctgttccggagagatcatttcggacaaaggattggtgttgacgaaccaccactgcggattcggagtgattcaacagcactcaaccgtggaacatgactacttgtcaaacggtttctgggcttacaagtatagcgaagagttaccgaatcccggtattactgcatctatcctgcaacgaatggaagatgtgactgatcaagtgaatgcagttttgaacgataaaatgtcagaagaggaacgtgctgcagctatcaatgctatttctaaacaaatttctgccaaggctgtgcaaggaacaaaccttcacgcgcaggtacaggatatgttcgagggaaatcagttcttcttgttggtttacaaaatctatcaagatgttcgtttagtaggcgcaccggctcaaagtatgggtaaattcggtggtgacacggataactggtcttggccccgtcacacggcagacttttgtatgatgcgtatttacacgggtcctgacggagaaccggctccttataacacgaataatattccgttgaaaccgaaacatcatttgcctgtttctgcaaaaggtgtacaagatggtgatttcgccatgatcatgggattccccggaacaaccgatcgtttcttaactagttttggtttgaaagagacgatggatgtaaccaatgatattcgttacaaagtacgtacagagaagttgcgtatcatgaaagaaggaatggacgccgctgctgccacccgtattcaatatgcatctaaatatgcatcatgtgcaaactattggaaatattctcacgagcaaaatatcgctttagagaatctgaacacgatgggcgaaaaagagaaaatcgagcgtgaatttactgcttgggtgaatgctgatccggctcgcaaagctaaatatggtaatgctttgactttgatcaaagagggttacgaggctatgcacccgtataacgtggctatgtcttatatgcaggaggcagcattacaaggtcctgaagttcccttgtttgccttccaggtggctaataccttggaaaaagctttggatgcagataccccggctgaaatgaagggaatgtaccttgaagctatcaagaagaatgcagcaggtttctttaaagatttcaacaaagatgttgacaaaaatttgatggctgctttgttcaaaatttatagcgataacgtggctgctgaatggcatccggaagtgatcaatttgatcaacaagaaatataaaggtaattacgagaaattcgctaaagaattgtctgacaaatctatttttacggatgaggctcgtttgaacgcattccttgaaaaaccggatatgaagaaattgaataaagatttgggttatatcacgggaaagagcctgttcgaggtttaccagaaattaagcggggaaatgagttctatgcgtagcaatattgccaaaggagatcgtttgttcgtgaatggattgatggcaatggaaccgaacaaagtatgggctccgaacgctaactctactatccgtttgacttatggaaacgtgaagagctacaagccgagagatgccgtgttctatgattattacactacgttaaccggtgttatggaaaaagaaggcccgaaaggtggcgaattcgaagttccgcaaaatttgaaagatttgtattatgcaaagaatttcggacgttacggtgctgacaacatttccgtgaacttcatcacgaacaatgatattacaggtggtaactccggttctccggttatcaatggtaacggcgagttgatcggaaccgcatttgacggaaactccgaggctatgtccggtgatattgatttcgaggaaaacttgcaaagatgtatcaacttggatgctcgttatatgttgttcatcgtggacaagattgcgaatgcgcagaatttgattaacgagatgacgattgtattctagttcgtctataaagtttaaaagttataaagtccctaaggtctaccatggaatccggaccttagggatttttttatgtacgttatttcttaaagtaatatttttacatatactataattttccatagttaaatgtatttaagtgtttgggtatatacagaagaagggtgtttcaaagcataagacgatggagatactaatattttttttgtgctgtatgaacagcatcttatcaacgattttcagtttgtaaaaattgttgcgcttgcaatatagttatatttttgaatatttttttgtaaatcatttgcttgtcaaattaatatctttacatttgtattgagttcttattaaagatttaaaaatggcatttgttatatattaaaggttcatgctttgatagaaatcatagttcgattaaaagggaatatcgtgtaaatcgataactgttcccgcagctgtaattcctaatttcattaagaaattaatttccagaaatatgtcactgttcatctataacgggaagactctggaaaagggatgagtcagaagacctgcctttataatacttatattttacttttgcggaggacaagaggaaaaatacttcaagagagtgtgtattcaagagtaagtttagtattatttgttgtataaatggaacgcttatctataataggtaagcgtgtattgttttttgtttaattaaaaaggaagacgttgccttaaccatttcgaaggggtacttggcaacgtctggtctttcttaaaaagaaaggaggtacgaatgtaaaattttcatttgattttaggtgtagaaaaaatgagtattttgaaattaataaattagttatatgaatttaaataatatgagatatttgaatgttttgttgacattgatcgtaacatgcgttttcacgatttcttgttctaaagaatattgttccataaatgctgaggtaaatggtattaaattgataaaatttccgcaagaaacaataggtgttatggcaggaaatacagaacaatataattcattttcaagatcgttatctttcttgaaagatagtttatggccgggagcaactgggcatacgttgatctatgaaacagatgaaatcacgtccttacaagggttagaaaggtacatatatttaggatcgttattgaaaggaggatctttagaaactcagagataccaagtgttaacaaatagagttgaaccgataactatttcgtattcttttccagctaaatttgtcgtagatgaaattggaagaccttctctttcagcaatgcgacaatctattgttaatactatgaataataatggtatgtctggcaaacagctagtctcgtttagttatgatataaatcagtttacctattatgatgaattgaaattgacatttgcttcaaatattaatgttgcaagtattcttaatataacagtggatgctgcaaaaggaaagattgcgcataaaacaggattgattgctaaatttattcaaaagaattttaccgttgacatggatatacctttagatggaaatttattattagacaatgatacaattaatttaatggaaggattttctcctgtttacatcagctctataacttatggtagaatgggagttattacaatggaatcgaattatggttataatgaagttcggttagcagtaaaagcagcatttgatgctaaaatagtaaatggaaatattagtatctcaaatgaatataaaaaaattattgacgagtctaatattaaaatatacatggtaggaggtgatggtagtggaattgcagagtcggttgagggttttgcggcttttaagaaatatattattgatggcggttattattctccagaagttccaggtgttccaatagcttttactgcgagttatttgatggataattctcctgtttatacaaaattcaaaattaatattccgaattaaagtaatgtgttgatttaattttactaaatatgagtgtaatgaagaaaatacttacattttttatgttattattgattttgtgtgcttgtgagactcgtttgacagataacacagatcaagatatatttgatttccctaaatatcgagaaggagtgattaatattaatactcataattacatgccaagtatggcaaaggaaaagattggggtgacaaatgagaggtcttctgattcggaaatattatcgagagtaacagaggttcttaaagatagtttgtggaaagatgattttgggcgaactatttatgctcaagcagatgaatctcttattttgccaaaccttcagagatatattttcccgggttcactattaagagggaactctatttctgattgtaattatactcctattacagcaacgattaatcctataacagtttcagtttcttttccagcgaaaactgttgttggaacaattaatcatccatccttgtctgcgacaaggagttttgtgaatgaagttttgcaacaagaggaaacagtacagcaaaatgcatcattgaattttagtattgatcagtttacctcgtatgacgagttgagaatggcttttggttccaatgcgaaaacaagtgctttattttttgggaattcctcatcttcttcagagaaagttcataaaatatcgaaaaagactggtttatatgtgagatttgttcaacggaattttacaatagacatggacattccatcatctggtagtctgattagtggaactctgacagccaatcaaactggaggctattctcctgtatatgcagcttctgttacttatggaagaatgggaattatggctattgagtggaaaatccactcaaagtagtcccct

SEQ ID NO: 10715 - DNA, 13068 bp, Unknown
  gut microbiota DNA sequence
aaggaaaattgagttggctattgctgaatctttcatacccagtccggtttctctttccctcttacgaacaaattcgcaagcggatgtctgaaagcaaatcaacagtagaaaagctcggttttgtgaataagattgtagatatcaatggaaatagcaggaacgcaggtgaagatttcgatctatgtcagaaatacgatatatggttgatgaatattgtgagaaatactgtgataaatgtgattcttacttcagtcaaagcaaaacaattgacttatggtaaattgaagaaatggtttctgaaaaacacctgttttggtatccaattggaatatgccaggtctaaccatgtacttacgtccacatggttctcgcagatagattacggaattgaggcactcattaaacagtataatcgttttttgcaagggaaacgaactgattggcgcttgcccgtggatgtactttccatacgttttgaaggtatcctacgtgatatggtgggcgattgtggtgggcgtgttacaaaagtaggacgagatagtacatcacaggttctgctcgatgacttgcttggagaaccatgcttgaaagatgcgtttaggactgaagatatagagttctttaaatatgtgtttactgcaaaaggtcataacatccgaaataatgtagcacatgccttctatataccgcaagattatggaatgatacaagcaacgctggtgtttttgtgtatgttgcgcttgactacgtttagacttaaaggtaaggaagaggtaaacgaatgatgtgtgtgtgagaaacatcaacaaactacgtctcgaatgacaatggaggataccgttgaaagtatccaaaatggggttgtccatattgatgatactgactttattttgagtatattgtggttacggaccaatccgaatggcgagtatttcgtgtggaaaggcatgtacgacttctgccagatcaagtttgatgggaagctgctgcaggtggaggagttcaaccgaatgtacgaaacctatatcggttttatcagaaaaagcatcgaggagagtgcggcaacctagattgtgatggttacccaccacctgctgacctttcaagtggttggactgcagtatctgggctctgtgctgaacaacgcatttgctagcgaaagtaatgttgcccgatcatcacccgagtatagccgccatttaacaggatataagtaaaaataacagtgtcgggactcggataatggaaagtaaacgggaggtaacaagggaacaatttattctcatgttgttgttggctttgtttaaaaatgttgtatatttgtggcgtacgtcataatcagcgaagtagtggacctgcttcaatttcagtggcaggcatttttttgcctgctgctgttgccgatattcggttccgcacccccgtggagtgcattaatgtgcctccggcttcgctgaagtgacgtacaacgggtcaggcgggaccgttctttttggaatacccgtcaaattaatacataattattatggaagaagatgtaaaccgtgtgtctgcggtagacatggaagtacctaggcgggtagcaaatcagttatcaattgaggaaaaacaaaaattgatggagtattattcgaaacaactcgaaatgatgtatccgattgcgtcaccgggaatgacggataaagcgggacttgtgactctccaaagaagaaacacgagtttgattgagatgttgacagtattcgatcgttcatgggcaaatgaaatcacggttgtacaaaaagctgttctgcaatatttggctaccgagggtatttctaaaaaggaacgattacggataatagaagtatggggagattggactacttttgtgttagataattctcgctttcgggtgttgcttggtcgatttttacaatatcatcagcgtcaagcgtgtgaattgaatgagttattgaaagcggagaatatgttgttgaacgtagatgggcaatcaattaatagtcagaattatggggaatagtaattttatcccagcatcgaatgtgtcggaaaaatttacagacgatgaatatctttctgatttcttaaccgaaaattgtttttaccgacatatggtcgaggatcttaaaaaatgtaacgtggatttggtttctgaagatccgttggaaacgatctataattgtatttgccatctcaataatcttttccgggtacttcgtcgtccatggagtaacgagtgtggaaaaatacaaaaagcttgtgcttattatgttgctaacgctaaacagtcaaagcaagagaatggggctgttattgatgcgtcaaatggctttgtatcttcgatctgttatttcacggaatggtatgattttatttgtcagatgcaacaattcctttgtcatcaggaaaaagagctgaagcgggtgtttaagaaacagaagcaaaaagttgtcagtaatgataaacctagcatggaaactacgacttattgtatgactgtgggggaaagtgaaatctatggtatgacgtatgggcaattcgaagaactttacaaggctgtcggtttattcatcaagcgggaaaaagctccttttgactgcaatattaaagagtataacagatatccgattagtatagataagagtataaattttgatgtacgcaaggaagtgttttttgtagactatagtcttgactcgtttgaatctagtttgaattgcatgtctgctgatcaactgaaaagggtggcggatattattgctgaatttttgaaaacgtatggagagaatggagatcggaaggtttgttgggatgttgcggattactctcctgttctgtctggtcgggaaatttattttagagtgaatgaagatttccgaaccacacatttcatgacaccaccttatgttcgaaagtgtattgataaggtggaagatcgggaggtagagatcagttacaatattaatgtgaacgaattggaatcagtaagtttgtcttttgaggaattcatatcgttgtatcgacaattggggagttttttggattagtgcttataaaacgagggagtcattaaatataatcactccctcgttaatgttatttgtagtatcttatttctttttcggcatctgtttcatccgttgttcttgcatccgctgcatttcttccagtttttgttggaatttggattttttcacgggtttcgttttggcgagttctatttgtttcaatagtttctcgtcgttcacgaatttccggatagcccaagtttggacgatcgtgatcaatgtggcgatgaaatagtagtaactcaaaccggaggaataactattgaagatgaacaggaacatgatcggcatgatgtacatcatcgtctgcattcctttcatctggtcattctgcggttggttcttactattgtaccacatatacaagatgttcgtgattgtcattaataaacagaacagactgacatggttcccatagaacggaatggtgaagggcaacgtggcaatggaatcgtatgatgccaagtcggtggcccacaagaaactcttctggcgcagttcgatggctccggggaagaagtagaagagggcgatcaatataggcatctgcaaaagcatcggtaaacatcctcccatggggttcacgcctgctttcttgtacagtttcatgacggcttgctggcgttccatggctttgtcggcagggattttcttgttgatctcgtcaatctgtggtttcaagacacgcatcttggcctgtgacatgtatgatttgtatgtcagtgggaaaagaacaagtttaatgatcagggtcaatagtaaaatgatgagaccgtagttcaaggtcacgtgcgattccaagaagttgaagattggaattacgacataacggttaaaccaagcgatccatttccaacccaagttaatcaactggggaagttcaatatctttgccgtattctcttaggaccggataggagttcggaccgaaaaagaaacgcatatcatatttttcaatggctttccccgagtaaggtaatgaaatttcggcatctgccgttttcaaaaagcccgggttcgtgttgttggccgtggagaccaacacgttcgggaatgactcgtttgcgataagtacggaggaaaagaattgttgtttgtaagccacccatttcacgcttgtcggcaagtctactttctcgtctccggtcagggaaagatgttctacatcattatttgagaagttgtagtataccccggtataacggctttcaaaatccctgcttttttcaagctgaggcatgtccactccccagtatagcgtgaggaaattcgtgttcgaggcgataacgtcattcagattgtacgtgttgatgttgaaatcaaccatgtaagaatccggagctagtttgtactcgaattcgaggtatttattttcatccacgtaagcccgcatggtgagcacttgttccgcaccctccgcgttcagttctttttgattcgtgttgggaacgaaaatcaaattggccgtgttgatttgtttgttccgggcgtagaagttcaagcccatggaactcttgtggtctttccacaggatcaacgggagagagtcgtgtgtgcgatacccttttaggtcaacatagttaatgcatccccctttggtgttgatatgtaatttgattttgttattttccagagtgtactgttctaccggcagtgaatcctgtttgaagatggcccctgtttcggcttgcagtgtttctgtattttgttgttgtgctgcaaaatctgcttggtgttctttctccaatgctgcggcccgttgggcttcaactcgtgcaatggagtcccggacatgcatggctttcagttcctctttggaaggactcatgaaataagagtagccgattagtatgagtgcgatgattactaaaccggttattgtatttctatccatattttaattttaggtttttaatttttaactgttatcttttagtttttatcttttaactgttatgatagacaggctttcacaaatgccacgaatagaggatgcgggttggttacggtactcttgtattcggggtggaactgtgtacccacgaaccatttatgggtcgggatttccacgatctcagttaatcccgtgtccggattaactcctgtcgtgatcataccggcctgttcgaattgttcggtgtatttgccgttgaattcgtaacgatggcgatgtctttcctcaatatcttttgtcccgtaagcctcaatcgctttagatccttctttcaacacgcatttgtatgctcccagacgcatggttccccctttgtctgtaacttctttctgtgactccatcaagtcgataaccgggtatttggttttcggggccatttccgtggaatcggctccgtccaggtgcagcacgttacgagcgtattcgataacagccatttgcatacccaggcatattcctaggaaagggatattgttggttcgggcatattcgatggcaagaagttttccttcaattcctcgttgtccgaatccgggagccacgagaataccgtctacatctttgaatatgtcacacacgttttccacgttgatgtcgtgtgcgctgtgtacccatttaatatttaccttacaatcattagcagccccggcgtggatgaatgattccacgatagatttataggcatcgtgtaactccacgtatttcccgacgagggcgatggtgactttgcgattatagtttttgaatttgtataggaaacgttcccatgattccaagtccggctcgtgttttaaaggtaatccaagctgggaaagaacgatttcatccagtttttcttcccgcattttgatcggtaccttgtaaatagtgtcaacgtctatggattggataacggctttcgggtcaacattacagaaaagagcaacttttctcctcagatctgaacccaattcatgttccgtgcgcaacacgatgatgtccggttgtaccccgttttcgaggagggctttaaccgagtgctgcgtgggtttggttttcaactcaccagaggcactcaggtaggggaccaaagtcaaatggatgaacacggatttttcacccagctcccaacgtaattggcgaacggcctcgatgaacggtaaggattcaatgtcaccgactgtacccccgatttcagtgattaccacgtcgtaatccccttttgccccgaggagttttatatttcgtttgatttcatccgtgatatgcgggatgatttgtactgttttgcctagataatcaccgcgacgttctttcgtgatcacgttttggtagatgcgtccagtcgtgatgttgttcgcctgggacgtcgggatatttgtgaacctttcgtagtgtcccaagtccagatcggtttctgccccgtcattggtcacataacattcgccgtgttcataaggattcaaggttccgggatcgacattgatatacgggtccaatttctggtttgcaactttataacctcttgattggagcagttttgctaatgaggaagcaataattccttttcctaaagaagaagcaactccacccgtaacgaaaacatattttgttgacacgatataaatattttatagttatttctatattatacatccaacggtttgaaaatacttgaactttttgttattcaatgaataacaatcaaatggaacaagtatgttgaaacttaacgacaaaagtaagaaaaaatatcatacaaacataaaaagaggcatttttgaaatgcctctttttgtgtttgatggtctcgacttaaatcatgccatcgatgagtctcagcttttcttgcattaatgccagtttgtggcgagcgctctcgatcttgttggaaaattctttgaccaggctctcggaattacttgatttggagaagaatccaatattgttttcccaagcgtgaaggtctgtttccagttgcttgatcttgttgactaatttttctctttcttgaatgatcttgctgtccttgtcatcactgttgtcgaacgtgttgattttggacttaaatcgttcgatatttttctcgaattcgtcgatgtcaagctgatcaaagtgatcgttgattagtttacggaattcgttttgaacggtttctttttctttgatcggaacaaatccgatttctgcccagcgggtttggaaggctttcaaagcctcgatgtcatcatcgttattgccggtcaatttgaaattgcgtacttcttcaatcagttctcgtttcagttcaagattcttttcctgatcggaagagacgtgtttgaattgcgctgatttgcggtcaaagaaatgatcacaagcagaccggaaacggttccatatcttgttggatacttttttggatacggggccgattgttttccattctttttggtactcgatgattttcttcgtggtcgtaccccaatccgtgctatcctttaacgcctcgactttttcgcaaagttctattttcttggtcaagtttttattctgtaaggtctgtatttcctggaaatattgacgtttcctctcgaagaaggcatcgcaagctgcccgataacgtttatacaggcgattgcgttccttgagtggaattgttccggcatgtttccattcggtttgtagggcaagaacgctatccgtggccacgttccaatcggagagtttatcaaaagaaaccgtggcgtaattttccagtttcacgcaaatctcttctttgatttttaagttgttgtcctgctcttcccggaggttgtcgaagaaacgatggtaagcgttgttgatcttgtccgtcacttctttgaatcggttccaggtttcttcttgaacttctttggcaaccggtccgatctctttccattgcgaatggagagattgcagttgtcgaaaggcatttccgatgttattgtcttcgagtaaagcgttggcttgttcaatcaaagcatttttggcatctaggttttttttcagatcaagatcccgcaactccttgtttattttgatataattgaagaagttctccacgtgatggtgatatgtttccagtaaatcgtttgcttgagcttgcggaaccatacccgtgtttctccatctgtcttgcaaatttctgaaatcctgatatgttttgttcagtgattcctcgtgttgaatcagatcttttaactcctcgataatttggagtttttctttcaagttctgctctttctctccttccagttttttgtaatattctgattttttctcccggtaggttctatacacgctataaaagcgttccttggaattgtcctgatagtcgaatgtctcagccggactcccgtctttggtaaaatcggctaatgctttatcgtattctttttggtactgggcctcgaaaacttggggtagggaatccagcaccttcaggcgttgcacggggaaatcgtcaattaaagacttcatgtgagaaataatttcgtccgtgttaaaactggagaaatcccataccggcacttccttttcgggggctttctctatcggtgtaggttgaccctgaactgaaacctcgtttcgtgtttcgtcatttaaagtatccggagaaattggctcgttgttattcaactcttcggcttgttgtaagttttcttgctccataactgttcgtatttttacgcattcaactcacgaaattaatgattaattctgataatgccaatttataatgagtaaaaaaagcgagagagagttctttttggatttcaattgtaaagcacgtatctttgacatttataattgatgcttatgttttcgtatattctatatggttttatatggttgatcagttttcttccgctccggattctctatctggtggcggatttgaactatttgttgctttactacgtggtccattatcgatgcggggtagtgagaacgaatttatgtaattctttcccggagaaaagtttgcgggagatcaaggtgattgaacggaaatattacaaacatttggctgatttatctatcgaattgtataagttgtggcatatgtccgaggcatcaatccgaaaacgttgcgtgtttaagaacacggaattaccccagtcgtattttaacgagggaaggagcgtgatcggggtgttggggcattatggtaactgggagtggatgtcttcttatagtttgtgggaaacgggggcggattttctggctttgtataaaccgattcgtgataaagtgacggatcgtatgatgaaacagattcgttcaaggttcggggcggtactcgtggcaaaggatgacacgttaagggttatcgctcgttaccgttcggaaaatcgtttgtttctggctggctttatcggtgatcagactcctaacggacgtaatttgaatttctggatgcgctttttaaatcaagataccccggttttgctcggtacggagcggattgcccggaagtataatattccggtagtttcggtgcgaatgcgtaaggtgaaacgtgggtattacgaggtcgagttcgtggatgtgtgtgctaacccatccgagttaccccaggggaaattgacggaaatgcatactcgattgttggaatcttttatacaagaagagccggagttttggctgtggtcgcataaaagatggaaacataagaagaagttttgaatttaaaatttagaatgaaatcaaaaagcggtgttcttgtgtggctggaatttaaaatcataaatctaaaattagaatggcgaaacgggtagctgttattatattgaattggaacggggagaatttgttacgggagtttttaccttcggtcatgaagaacacgaatcttgatttggggcgtgtcgtcgtggtggataaccgttcgacggatggttcctggatatgtttggaacaagagtttccagacgtggaacgggtgctgttcgaggagaatttcggatttgctgggggttataaccgggcgatcgagatgatcgaggcagaatatgtggttcttttgaatagtgacgtggaggtcgctcccggttggttggaaccgttggtcgccgtgttggaccgggacgagaaggttgcggccgtgcagccgaagatattagcatatcgggataaaaataagttcgagtacgctggagcggcagggggatatattgattatttaggatttccgttttgccgtgggcgtgtgatggataccacggaacaggattatggacagtacgatgatgaggtagatgttttttgggcaacgggggcttctctatgtattcggcgggacgtgtaccgtgcggccggagggttggacgaggctttttttgcgcacatggaagagattgatctttgttggcgattgaaaaatggagggtatactttaaaggtaattccttcttctgtcgtctaccatttggggggaggctcattgccgatgaatcatccgagaaaattgtttttgaattaccggaataatttattgatgttgcataagaatctgtgtgctaaacagcgcaagaaaatcttttttgcacgagttttgctggacacgatggcgggagggcttttcctattgaaaggtcaatggtccaacacccgttcggtaattcgggcatacaaggctttccgtgagatgaggaaagcctatccggttcctgaacgttccgtgagtctttcgggaatatatccccggagtatcgtgttggattatttcttgcggggtaaaaagaagttttcggatttaaattttaaatgatggtaaataaaccttcgacataaaatgttgtcatagggatgtaggctttaacgatatgattagaaagcatgaacgaaataagtgatgaagatattgtaagaatgtttcattccggaaatggagaggaaaaagcttttcggttacttgtaggaaagtatagcgagaggctttactggcatatccgtaaaatcgtgatagggcatgaagatagcgacgatgtgttgcagaatacctttatcaagatttggaaggggttgagggagtttcgttacgaggcgaaattatttacatggatgtatcgggtggcgacgaatgaggcgattaattttttgagtgaaaagcgtcggaagacttatggaaactcgcaggagattactcccatgttggaaaatcagttggaaagtgatagttttttctgtggggattcgatccagcgggaattgcagaaagccgtgttgaaattgccggagcgtcaacgtctggtatttaatatgaagtattttgatgatatgaaatatgaggatattgccgaggtgctggatgtcgccgtgggaacgctgaaggcaacttatcacaatgcggtaaagaaaatagaggaaagtttgaagatttcggatactttaccctcgttcgaatagttattggataatagaaaatggaaggttatggataatttggatgagaaatataaatcaaagaacccgttcacggtgcctgatcgttattttgacacgttgggcgatcgggtgatggaccggataaaggatgaggatgggaagactcggaaaacaagtttgtttcagacgttaaaaccttatctcggtttagcgggattattcgctttcgcaatgatcgtcgtacagttgctggttcctaatctggtggatgagaatcggatgctgttaaaaaatggagagcaggcgaacatgacggcacaagcagaggatgagaatattttcgatacggattttaacccatctcgtgaagagatcatcgagtatttgtcacaagagacggatccgatcgagtttttatacgcggagcgtaggtagaattgaatgtacaagcaagatatatgaaaaaggtaagtttgattatattgatggtggggtttggtttttctttatttgcccaaagcgggaaattgagtgaagacaaacggaaagagtttgaggctcaaaaagtagccttttttactcaagagatggatttgaccccggaagaggccactaagttctggcctttatataacgagatgcagcagaaaattcgtgtcgagaatgataaaatacgagatttaacctgtcggaaagataaaaaagaggttccggaagtgacggaacaacaggctttgaagaatttggagataatgttatctgccgaacaggctgtacgggatattaagaaagaatatatcgagaagttgaccaaggctctgtccgccaagaaagtgtggatgatgattgaggccgagcagaaattccatcatcaattgtggaagaagatggggaaatattctgcacctgcgcagaaatagttggtcgagtggggaaattcgtgtctggacgtgaaaaaaaagaaaaaaatcacgtcaaaagcttgcaagaacaataaaaagcactacttttgtcagcgcaattggagagatgggtgagtggctgaaaccaacagtttgctaaactgtcgtacgggatactgtaccgggggttcgaatccccctctctccgccaccaatttttgagctcattttcggggcgtagcgcagtccggtagcgcatctgctttgggagcagagggtcgcaggttcgaatcctgtcaccccgacagatagacagccacgagagtgactgtttttttatttgaataaaaaacttatctttgtccctataaatttaatacttacacgaatgaagatgtctaaataaacaagtcggttgtaaaaccggtaaagtctccaaagtctacgtgataggagcatcgggttttattaattgttttatgtgctacatacaattgtcttgaagttgtagtgtgccgacttttaatttaggatagtgtccccaaaagtgtgtaaatcctttcttttttcatctttgcaaatctattcatttttaataaaataatcttgattctaaaaaattataaatagggtatttataaatatccgcgttttgagccacggtccccatcagtagaatggatagtgtttcaaaaagtgtgtaaattccataataagttatttttgactgttctattacaaaaataaataaattggaatttacacacttt

SEQ ID NO: 10716 - DNA, 10505 bp, Unknown
  gut microbiota DNA sequence
taatctcgctccctcagagattattcgatgcttacctggagcttagtcattccgtaatgtttgagccacgaggaagcttcgaatgatcttcgaataagggggattatttccctaggatttccgtgggatttctcttgttttttattataagatagttgttctctgaactaagtttgcttgtaggctccttaaccttttctgtattctccataaagtgttaccttatagttcatttagatgaaggagcattcatcctgcattcatcttgcattcaccttcgattaaattgattttttaatcgtttttgtttgaatcttcatgcccttatgaagtatatttgttatatggataattttagtcggatgatagtggggcatagagggagggtaaggaatcgggagaccagtcgtatccttcgtgcgttaggttcgagattaccgggtggcaggatatattgaaaatataggcgaatgttatagaagtatgaaaatttatacttaatttcgatggcaaagtgaccgggttcataaggtatatttgtagatgattgtccggtcggaagaacaaaagacaggcacgtgtatggacactttttacgaggaagatatattgggcgaggggtttcaacgaacgacactttctttacgggatgattacgagggatcggctgttgccacgcttgttcgccgtttgtcggatacggggaacggtcggtcggtgctttatattcacggttttaatgattatttttttcagcgggaaatggcttgtcgtttgaatgaacggagtttccatttttacgcactggatttgcgaaaatacgggcgttcgtggttatctcatcaaaagtttaatgacatccgggatattcgggtttattttgaggagattacactcgctttgcaaatgatccgggaggagggaagccggacaaccgttttgttaggacattccacgggcggattgattgttacactttacgctaaagaacacggggatagttccctttttgacggcatcatgttgaacagtcctttctttgattttaataaaagttggttcgtgaagaagtgtatcccgtttgcctcgctaatgggaggctttttaccggggataaagattaccggagggttcacggagcaatatggtaaattcctgcaccggggtagtcggggagagtgggagtataatttggcttggaaaccgcatgttgcaccccgaattaatttgggatgggttcgggctattcataaagcacaacgggagttgaggcaaccttttgaagtacgaaaacccctgctggttttacattcggagagatctgtctcgaatttctcggacgaggaacaggtgcagtcccgcgatgctatattgaacgtgagggacattcagcaggtagcacggaatatccgggggcaggtggagatcgtgtcggtcttgggtggtctgcatgatttggttctatcctgcaaggaggtccggggaaaggtctatcagatcatgtttgactggctagagcgtcagaacgggacaaatgatcgtaattgtttaggttaaagcacgtggtaagttttatggtgtgattaaaaaaagagtgggtccgcgacctaatagtgtgtgtatttgggttattgttttgaagatttcgcggaccctgtagctctagggaccctcacggtcagctgtttgcgagcttttgttttttagttaaacaagggacgtgtcccacagttaacaaattatgaaaaaaaaagaaatggttttaatgaacctgattttactcgatgtttgttatttctaagtttatttattattgtttcattaagttgatgtaaaggtacaagattattattaatccaagtaacctataattgtatgtgaatgttggttgttttacaataataacagattgttcttgttttataaatagttttttgcggggaagaatagagaagcgagaaaaaatggctatttttaaaagaaggaacggtgtgctaatgttggatgtttgaattgggaggaaatggagaaggtgcgtgtcaaaaatagtcgtattatgtttcttgtgtttcggggatctgggagtattttccatacttttgacttgagttctttatgaaaatagtgtataagtatgaaagatgtttcactgtatgaaagtttcctggcggaattgcgaaagaaaataccgcaaggggctaagttgacaaatactttggttgatatgttgtatatcgaacgggaagcggtttatcgccggttacgcggcgaggtcccgttcacgtttatggaggttatgactatcgccaaggagttgggaatttctctggataatctgacggaaacggatacatgtaagagtcgtccgtttcaattgaaattggtggagtatgcgaacccgcttgatgcagattttcggatgatgcaggatttcgtcgagatattcgcttgtgcggagaatgaaccggactgggaggccggtttctcgacgaacactcttccccaatctttttgctgttattatcccggtatcacgcgtttttatttatttaaatggttatatcaatatagcaacgtggatacggtgaaacctttccgggaagtagtgattaacgatcgcttggctagaattcaacaggactttttacacgggatgcggtgtgttaaatcctctttttatattcttgatcatctggtgtttcattatctggtgacggatatgttgttctttgccagtattaacttgatcacacccgaggagttgaaggagttgcaggaagagttgattctgctactagagaagttggagcgttttacggctaaaggacgacatgaggatacggggaacgaaatgtatatttatctgtctaatattaatcttgatacgggttattgttatttcggtagcccgaattatcgtttaagtatgttgaaggcattcacactgaacgtaatatcatcttttgacttggagatgttcaaccggttgaaaagctggatgaattcgttgaagcgttcgtccacgctgatcacggtgagcggggagaaagagcgtgtgcgtttttttaatgaccagtaccgtttggtgctgggtatgacgaacacggtctgaaaaaaaattgtgaccgtgttcgttctttattatagtttcacgattctttcgtttgttctttttagatgaaaccatgaaaaaagaaaaagaaggagtacgtaaagatgttccgatgtccagtacactgctagcgggacttctccgaactgcttgatgcaaaagagataaatgaggtatatgacgatcgtgatacattgatagataaatgctgcacgagtggcacccgttcccgacacggcgttacagaatatatgtgcgggaagggagagaaggtaatttgataacataacaacaaagggccagaaggctaattgcacgagttgtttgtccggggtgtaaatgcccatgaccgtgtggggaaataacagggcaattgtgattaatgggatgccaagaatgtagccgagacgaatgattttccgacacaagggcatgatttgttttctttccctggctcccgccaagttactgacgagtgatcccgtggtggtggaaaaggaactcacgatgacgaagaagatcgtggatatactccggatgatattggcaattgctaattgcgtggtaccgagatgttcgatgagaataaagaaaaggaaccagggtgccacactgataaaggagtgcatcatgctccagacggataggcggaaaagttgtcccatgagtcgtttgtaaaaaatggcaaggaggccgtaatgttgtttgtctattttgaaacgagtatagctgaccagcacgagtaatcctcccagttcggagatcgtggatgccatagcggcacctgatatgccctgggcggaaatcttcccggtgccgaaaatcagcagatagttcagtaacacgttcatacttgctagagtgacggcagagacggtgagtatgcgggttctggtgattcccacgaaaaatgcccggaaggccagcatcggaaaggcgaaaagcaggccgagagttcgccagtccagatattgtataacagcctcgtatatttccggggaagtcagtaatcgttgtagaatgaacggggtgaatattttagacaggccgaagagcgtggcggcgagcgtggtcagaaaaagtaatccttggaagaatacttttcccgtttccgcgggacgttgttcaccgtttcgacgggcgatcattacttgcaagccgagactgaacccgaatcccagtatgtaaagggaaaggtagtacattcctgctatggcggaggctcctagttcagtttctccgacgtgtccgaggaatatggcatccgtgatatttattaattgttcgactaacacactcatcatcactggatagttgatgagccagatttgtttgcttgtaaaattcatgcttcaacttgaatagcacatagcaagttatttccacgtgagtagatcacttgttatgtccggtaaataaaaaagggtataaactctgttcccggcaggcttgtgcctgcaatcggaatactatacaaggagcgtggctatatacagagttgtgctttcatgttgaataatagagttaacggtacaaacatacaaaaaagatgtgagattctttttttttgtaaaacttttatatcaagaatgaatagggaaatacggtatgtaaccctctatttttgaggacgtataataataggtaggatgggaagtttctcccatggattaataataaattagaaggttatgagagaacgtgaagaaaagaagaaaaaagtggcgagtgatgaccggcgtgcccggaatattccttcaaaacaagacaaaagttgggtcggtgaacaacagatgcaacaagaacaatttgacaagaccgaattcgaggaacgggaagctaaaaaacattccagaagaaggatatgtcactgatttggtgcttattttcgagggtaataaaaacatattaccctcgtgttatttttacgatccggattgtttgtttattaaaaatattatcgtagatttgtcgtgattttgagttttgatttgatcgctacagagcgtttgccttcatcgtattattacatgtatcgttaagcagacttttctagacaatatccaacctcaagtatttaaattattaattttaaagtttgtattaatgaacatttacatttcaaatttaagttacgacgtgaatgatagtgacttaagagaattattcgaagagtacggtgaagtttcttcagctaaagttatcatggatagagaaaccggaagatcaagaggtttcgggtttgtggaaatgtctgatgacacgcaagggcaaaaagctattgatgaattgaatcaagctgaatatgatggtaaggttatcaacgtgaacgttgcaaaaccgagaaccgatcgtccggccggtggtcgtggcggttttaaccgtaacgggggcggtcgtgatcgtcgcagtaacggtggtggccgtagtttcgagaaaagattctaaaatatcttggataataagaaaaggtggttttttaaccacctttttttattctgtaacccgatcagtgaagagggttgctgtcaatgcatgagagaagatataggacgctgggtatgctccttgtttctgaacaagatgttccatgatttcctgtttatcaggtccgatgacggggattaatatagccgaactttttaaaattacggtccctgtcattgtaattctttgttgtccggtcttcgggtggtgtgaaactgcgtaaattcgttggtcggtcagtagattcatcgaatcactgaatatggaggccacgtgtccatcagccccaatgcccagtatcgtgcagtcgaaacggggcatattcgagtagccggggagttcccattttaccatttccgaatatcgttcagcttcaactttaggttcttgttctccccaaatgcgatgaatgtgattttgaggaatatccagaggcatgaaaagaaggcgttcggcatgtttgaaattgctctcgtcgtcttccggcgacacgcatcgttcgtctacccagtaaaagcgaagaatgtcccaagggatattattccggtattcttttacccataatttgaagagttgttgtgccgtggaacctccagacagggcgatatgaaaaggtttcgatttactttttttaatcaccgttatcaaagtttcggtcattgaacgcaatgtttcttcggcagttttatatacttctattttcatgattatatggatctaattcgtacctgtttatacgatgcaagttacggtttattcatgatataaacaagaaaaaaagttaaaaactcttattaatttatgattttaaattttagattttagagtccaactgcacaaggcaattgtataaatcataaatcataaatctaaaatttataagcttgtaactcgccgtagatgaatgttcctcactgatttattgaatctacggatgaagagggtggcagcgaacatgaggccgccacagaatccagagagtagtccgggagctccgaagtcgagcagaattccggcaatatatgctagcggtacggcgacaaataaataggaaacgagggcatagatcatgggacgttgcacgtcggtgatgcctcgtaaagctccgagtgcggttacttgtaatccatcgaagatttcaaacagggcgaccacgaagaataggttgcgagctacttttatcacgtcgggatcaggggtgaaaatggacgcgatgggggccccgaaaagggcgtagatcacggctgctccggccatgaaaataacggcgaggcgtagagaggcatgggcgtaacgacgcattttcccgatatttccccgtccgaattcatgactgacgagtatggtagaggctccggcgattccgctggagatcatgaatgtaagtgaaatcatggacatgacaatttgatttgccgcaagggcgatggtgcctaaccatcccatcattacggtgatgaggctgagggatagaaattccacgaccatttgtccggctatgggataaccgacttgtaataattgtttgattttccgacggcttgtgttgctaaattgaaaaaaacgaaatacggggctgtatatttgggaacgatggatgtagagaaaaaaagcaatgggcatcatcaagcgggagattaatgttgctagtcccgcacccgctactccaaggaatggcgcaccgaatttaccatatataaatatgtagtttaggaaaatattcattaaattgcatgaaatcgtgatcaccatggctaccttcgtgtttccaattccttccatgtattgtttgaatgtcatgaacaggatgaacgggatgaccgagaatgaggtcaggatataatatcctttgcataattctacaacttctgcgggttgtcccatcatggaaaggtagggcatgagcatgaacaagaaaagggtgagtacgagtgacacggttgtgttcagtagaagtgaattttggaaaaatccggctatacgttctttatcatcaagcgcatgagcttggcccacaagtggggttaggccggtggcaatacccatgccgacaaccatcgtgttcatgataattgctcccgctagtgacactgctgccaattccggggctccaagttgtcctaccatgatgttatctgccatttgtacgatcgcctgaccggctaatgatagcatgatcgggaaggcgatgttgatgttctgtttgtaatacagtgagttaattctcatgacttgaattttaaaaacgggggcaaagatgtacatttattgtcacaaataaaaatgttaaaatctttttatgggaaatgcaactaagttaatcatggtttccgtataatggataaatgaaacgcaaaaatttgagaaatttaactatatattaagtcaaaaaattgcgagaattggaaaatatgtgtatttttggtattgtaaatagagtgaaatgaaaggattgatatttcgatatttttcgttgttactcctcttcttggtcatcggggtaaatctctttggaagtgaagattccaaggggaatattcttgtttctgataaggagaacatagaagaagcgtcggaagaatttcagatttccacaaccccgtttgatcagcatggagtttttgaacgaactttagagttttcaagtcggcaaattgttaataatggaagtcgggaacaattctccctctcgttctatcggaaaacagaacttgcgtcacgtagaagtgaattccggatgatggaagaaaagacttacgggtatttttcctatttgctgggacttcgacatcttcaaggtttctacgtgttcgatttgtgtaaaatcattatttagctattcctaggtccgttttgtccagtgtcacgaatggtgataccggtgagttgtactcgctcattgaaagcgtgttttgatatgacatgctggtatagaggtgactaatgtaattatggtatctttcttcggatacggacggacgaattatatccttatttttcagtgtattataaaattgaatttattcataaacgaataataatagtagacctatggagaatagtaaagaagataccaagggttttaccaactcggcattatttcagacattgtacccgatcgtgatcatgttagtcatatttggtttggttttcttggcattatacgtggcattataatattaaagcatttaaaatataaaaatactcctatgaaaaagactgcaacaaaacaaggaacaagaagaagtttaggtatttctgcatttccgataatcattctgtgttttatactggcaatggttatttatcatttcgtgtatggtaatccggctaattttattaataatgacccgaataatcatcctattcagggaaatttgctaggtacgatttataaaggggggatcatcgttccggttatccagaccttgttatttacggtattgactttaagcgtggagcggttgattgccttaaaaagagcaaaaggaaagaagaatttgcaacaattcgtgacgaaggtgaagagtgatcttgaggaggggaatattgaggctgttcgccaagcttgtgacgaacagaaaggaaccgtggcaaacgtgattaaagcatcgctttctacttattcacaggtgtcagtttgtgacacgttgtcgaaagaagagaaacagttggcagtacggaaagatctggaagaggcgaccatgcttgagttgccgacaatggaacagaatctgggggtaatagccacgatcacgactttggggactttgatgggattgctcggaactgtaatcgggatgatcaagtcttttgcggcattatcttctgccgggggaacggattctattgccctttctaccggtatttcggaggctcttgtgaacacggctttcggtattgcaaccggggcgtgtgctgtgattgcttacaattttttcactagtaagatagacgggatcacgcatagtattgacgagatcggggcttacttggtacagagtttcacgattaaacaacgctagtatacacttgttaatatatacgttatgagtcagaaaattaaaaagaaatcaacgttcatcgacatgacggccatgagcgacgtgacggtactgttgttgacgtttttcatgctgacttccacgtttatccagaaagaaccggtgcaggtgaacccgccgcagtcggtttctgagatcaagattcccgaatcaaatatcgtctctattttagtcgagccaacgggaaaggtgttcatgggactggataaaccacaggatcgtatcgaggtgttgaaaaagatgggggagagttatcagattgaattttcggatcaggaattgaaaaaattcagtctgtgtaattcattcggggtgcctattcagggaatgaaacaattcttggcattatcatcggaagaacaggataaagtgatcatgaattatggaattccttgtgatagcacgaataaccagtttaaatcgtggatgcaatttgcccgggaggtgaacaaggacttggtgatcgctatcaaggcggatcagaaaactccttacccgttgattaaggatattatggcaacattgcaggatctgcgagagaatcgttataacttgattacttcgttgcgtaatatgccggaggtatgatagaaccttataacttgtaatttatttattatggcagaaatacaacaaaaggatagcggggaacgcaagaaagggaaacagaagaaattcagtatccgggtggattttacgcctatggtggatatgaatatgttgttgattactttctttatgctctgcacgtccatgagtaaaccccagacaatggaaatcagtatgccgaggaaagatttgttgaatgagcaggagcagaacaaggtgaaggcttccaaggc

SEQ ID NO: 10717 - DNA, 3991 bp, Unknown
  gut microbiota DNA sequence
aaaataagctatgggaaagtatataggagcgcacgtgagtgcatcgggaggagtggagaacgcaccgttgaacgcccgcgaaatcggggcgacggcttttgccttgttcacgaaaaaccagcggcagtggaaggcggcaccgctgacagcggggagtatcgcgttgttcaaagaacgctgcgaggaattcgggttcacgccgaaacagatattgccgcatgacagttatttgattaatctcggcaacccggatgcggatgcgctggcgaagtcgcgggaggctttcctcgacgagatgcagcgttgcgagcagttggggctggatcggttgaattttcaccccggcagcacgttgaagaagatcagcgacgaggaatgtctggcgctgatcgcggagtcgattaacttgacgctggataagacctgcggcgtgacggcagtgatcgagaacacggcggggcagggatcgaatctcggctacacgttcgagcagattgcctatattattgaccgggtagaggacaagagccgggtgggcgtctgcattgatacctgtcattctttcgccgcgggttacgacttggcctcgacgggaggattcaccgagacgttcgagcatttcgataacgtgatcggtttcaagtacctgcggggtatgcacctgaacgatgccaaaaaagaactgggttcacgggtggaccgccacgacagtttgggaaaaggaacgttgggcatagagcctttcaagtggatcatggaggatgaacggtttgacggtattccattgatattggaaacgccggatgaggcgttgtggccggaggaaatacggatgttaaaggggttcgtgaaatgataggggtgcgtgcatccgtgaaatggttgttgacggcggtggccgtcctttcgggggtatccctcgcggcgcaagttttgccgggggaagaaggtattcttgaacggggaaggcgtcttcccggcgaggtgagcgtggaggcacttgtagacagcgtggcacggtggggacggacggaacgggagaaagtgatcgtgctggcggggtggttccgcgagtatatggcgattgatgtcgggaagttcctcacgggaggcccggacggggattaccgcgacgtgttgaaggagaggaagggaatttgcggggatttcacggggttgttcggggagttatgcaacaggttggggatcgagaacgagcgggtggaaggatacgtggtgggggatggccgggagcgcggggaaacgtgtctccggacgaatcacgtgtggaacgccgtgcgggtggcgggggagtggtggcacgttgatatgatgtgggccgtgggggcgttggggagagatgccgggggagaatggatgttcaagcggcattggaacccggagtacgtgttgatgcggggtgagcaatttctgaccactcatatgccggctgatccggcgtggcagttgaccgacaggccgtacgccatggacgcgtttatcgaggggaatttggcagatggtgaacggggagattattataattacatggatagtattacggttttccggcgcttgccgagggatgaacggcagatgctttttgcccggcgggcgaaccgttttaacccgcggaacaaggaggtaatggcggtgacgtactataacgaggcggttttcctgttgaattataaccggaagacgcgggccgtgttgaaccgggcgagggagtatttcaggatcgcggaagagtacgcgagggatttgcccggcgtgaaagagagtattgacgagggactccggaacgtggaggctctaattaaatagaggaatgagaatattacatacttcagactggcatttgggaaagcggttgaatgaccgggagcgtgccggggagcaagtggccgtgatggatgagatcgtgcgggtgaccgacgaggaggccgtggacgcggtgatcgtggcgggtgacttgttcgacacgtttaacccgcccgtggaggcgatcgagttgctttaccgcacgttgcatcggttggcacggggcgggcagcggctggtggtagctattgccgggaatcacgattctccggaccgggtggattcgcccgacgtgctggcacgggagagcgggatcttcttcgccgggaacccgatgatcgtgtcgcgggagacgcgaacggaaggcggggtaaccttggtccggtcggatgaggggtttgctgagttccgcttgccggggtttgattacccgttgcgggtgctacttaccccttacacgaacgggcaacgggccaaacgctacatgggtgcggaggatgccgacgaggggttgcgggttttcctgcgggatcactgggcaggggtggccgacaagtattgcgatacggagggggtgaacctgttggtggctcatcttttcatggcgagggagggcggtgagttgcccgaagagccggaggatgagcgaccgatcaatatcggcggtgccgatgccgtctatactttgttgattcccccggccatgcagtacgcggcactgggacacctgcatcgttggcaaacggtggacatggagccttgtcccgcggtgtacagcggcagtccattgagttacagtttcagcgaggccgagcaggataaatacgtgacgctcgtgaaccttgaaccgggaggtccggcctgtgtcacgaaacgtcggttgacgagcgggcgtcccttggtgcgtcgtcgtttcgagggggtggaggctgccttgcaatggctcgcggagcatcccaacacgtgggtggaactgaccgttgctacggatactttcctcacggcgcaagaagtaaaatccctgcatgccgcacatgacggtatagtttgtatcatcccggacgtgcgtgacgcttctctcgtgaacgatcgtgtggcctctatccacgacctgcgttcggacgttaacgccctctttgccgagtacttccgccagcgcaagggacaggaaccgaatgaagaaatcatgtcacttttccgtgaggcgttgtcgattgatggcggttcgaggaaaagtgacagttaaaagatatcagtaagttacaggttctatcatttttaattttcaatttcctatgttgcccgttaaattaacccttgaaggtatttactcctaccgggagcgccagacgatagattttacccgattgacggaggcccggttgttcgggatattcggtccggtggggagcggtaaatcgacgatattggaggcgatgatttatgccatttacggtacgattgaccgtttaaataatgatgtaaaatataacgtgatgaatctgcaatccgaccgcctgttcgtggacttcgagttccgggcgggagaggacgggcgactgtaccgggcgacggtggagtgcaggcggagcaagaagaggtttgctgacgtgagttcaccgaaatacctttaccacgtgtgggagggcgacgagtggttgccctgtacgagggaagaagtggtcggggcgattgggctgacggcacagaatttcaagcgggtggtgattatcccgcaggggaagtttcaggagtttctgatgttgcgggacaaggagcggacggatatgatgatggagcttttcggggaactccggcgctacgatctgggtgggcgggtggcttacctggagggggagacgacccggcgggtgattgatttgcggggacagctcactggattgggagaggtggacagagagcggttagccgagcggaaacagcgttacgtggccttgcaggaagaaattgccggggtgaaaaaagagattcacgagggacaggagcaagtggagagagggaagaaagtgaaacaactcaccgacgagcgggtggcacgacaggaggaggaacgaaagctgttggaacaacgggaggcgatggcgggtttgcaggctcgcgtggacgagtacgagcgatgtttgcagcagttccagcaaccattgag
